United States Patent Application Publication US 2011/0277190 A1 - sequence listing, part 9

SEQ ID NO: 36627 - protein, 661 aa, Streptococcus agalactiae A909
MTFDAVDQLAVNTVRTLSMDAIQAANSGHPGLPMGAAPMAYVLWNKYMNINPKTSRNWTNRDRFILSAGHGSAMLYSLLHLAGYDLSIDDLKNFRQWGSKTPGHPEVNHTDGVEATTGPLGQGIANAVGMAMAEAHLAAKYNKPGFNIVDHYTFALNGDGDLMEGVSQEVASLAGHLKLGKLITLYDSNDISLDGPTSMAFTEDVKGRFEAYGWQHILVKDGNDLDAIAKAIEEAKAETEKPTIIEVKTIIVFGSEKQGTSAVHGAPLGAEGIVFTKNAYKWTYEDFIVPDEVKARFQEGLQARGEQAENAWNELFAKYEAEYPELAKGYKEVFSNEPVSVELAAHELGSSKASRVSSQEAIQQISEQVASFWGGSADLSASNNTMVKVEKDFQPGQYEGCNIWFGVREFAMAAAMNGIALHGGTRVYGGTFFVFSNYLLPAVRMAALQSLPTMYVMTHDSIAVGEDGPTHEPIEQLASVRSMPNLNVIRPADGNETNAAWKHALAEIDKPTMLVLTRQNLPVLEGTKELAEEGLNKGAYILSEAKGEMDGIIIATGSEVKLAMDTQAALAEEGIHVRVVSMPSQNIFDAQSDAYKEEILPATITKRLAIEAASSFGWAKYVGLAGKTLTIDTWGASAPGNRIFEEYGFTTENATVLYKAL

SEQ ID NO: 36628 - protein, 354 aa, Synechocystis sp. PCC 6803
MTGSFFCYLFPRSFSMLKIGINGFGRIGRLVARIAMANPQVTLVGINDLVPASNLAYLFKYDSTHGSYGGTVVAKEEGIVIDDQFIPCFSQRDPAQLPWGDLGADYVVESTGLFTTYATAENHLKAGAKRVIISAPSKDPEKIPTFVVGVNHLNYNADTDKIVSNASCTTNCLAPIAKILDDNFGIVEGLMTTVHAMTATQPTVDGPSKKDFRGGRGAAQNIIPSSTGAAKAAALVLPQLKGKLTGMAFRVPTPNVSVVDLTFKTEKATSYEEICAAMKTAAEGELKGILGYTADDVVSMDFRTDPRSSIFDAGAGIGLNSNFFKVVSWYDNEWGYSCRVIDLMLTMASKDGLV

SEQ ID NO: 36629 - protein, 433 aa, Bacillus thuringiensis serovar konkukian str. 97-27
MKEVDIMKTFLSALQWALFILAGSLIVPISVATSYGLDGAEAIAFVQRTLFVLGFAGLLQAIFGHKLPIQEGPAGLWWGIFSLYASLGVVLFGSSNETLKVLQYAFLLSGIICIILSVLGLIDKLVRYFTPTVIGTYLFLLVAQLSGAFLKGMFGLDGQHTEVQADVFILSLIVILLSFFIMKLPIIGQYSVLFSIVCGWILFACFGLSNPITPVTDIIRLPSLFVFGMPRIEWNMAITVVFVTLLLLTNMLASIRVVQKVVSKYEENATPDRFKQAGIITGINQLLGGLFSAIGPVAISGSAGFIATTNIYKRLPFMLGSSFIIVVSIFPKITSFFAAIPVAVGYAAIYPVFASMIGLAFREYDTVQNKERLFKVAGLSIFTGVGVMFVPAGAFSTLPPFLASFLSNGLVLGSVMAILLEILFSRSTEKQLS

SEQ ID NO: 36630 - protein, 310 aa, Sulfolobus solfataricus P2
MKAAILTQFNSPFIIGNAEPHGVGVRINVAYTGICGRDLVIWKGGFKNLKLPLILGHEIVGYYNGRPVAVYPNLYCGSCDYCKSGKENLCDNARILGEGEITGGYAEQVIVPERNLIPLPDDKLEKYAATMDPVATAIHASKLADLKKDSKVLVTGAGGGVGIHLVQYLKYLGISNVYGLSSKGEKLKELGVTPVSDIRGEKFDAIFELVGSKTINDSLRALKKEGILVLIGNTEGEPITLSRPAMSIMRQHKIVGSASYTQAEYEEAIKLVGYGKIKAIYEIYELERINEAYRKMLERKVLGRAILKVI

SEQ ID NO: 36631 - protein, 299 aa, Glycine max
NSAPSCLIPTLPISTTTEKSEQMIETSEASVYGVMASWLTPSNLFIFINLVIGTIAISSRFANTTKRQHQLVRSPSLLERLASFNLCYHKHEPTTRMMTTTTTMFHRVVDPVERLDEFRLDQVPSSSLLDRVRSFNLGFYKSDNIERHGPVHNSDLPQLVQLDRLPSSSLLDHVKPLNLEIERPDLVHRLDSSQLDRVSSISLLERVRSFNLGFSKVEMEKPDSIQQQLTRAPSILQRLKSSLSFEPESEVTGGGELAEETEEEGVDAKADDFINRFRQQLRLQRLDSIIRYRDMLKRY

SEQ ID NO: 36632 - protein, 283 aa, Astragalus membranaceus
MGKDVEVAEHGEFSAKDYTDPPPAPLIDMAELASWSFYRAIIAEFIATLLFLYITVLTVIGYKSQSATDQCGGVGILGIAWAFGGMIFVLVYCTAGISGGHINPAVTFGLFLARKVSLIRAVMYMVAQCLGAICGVGFVKAFQKSYYVKFGGGANELADGYNKGTGLAAEIIGTFVLVYTVFSATDPKRSARDSHVPVLAPLPIGFAVFMVHLATIPITGTGINPARSFGAAVIYNKDKAWDDQWIFWVGPFVGAAIAAFYHQFVLRAAAIKALGSFRSNAHN

SEQ ID NO: 36633 - protein, 637 aa, Petunia x hybrida
MMESCDCIEALLPHDDLLVKYQYLSDFFIAFAYFSIPLELVYFVHKSSCFPYRWVLMQFGAFIVLCGATHFISLWTFFMHSKTVAVVMTITKMLTAVVSCITALMLVHIIPDLLSVKTRELFLKARAEELDKEMGLIIRQEETGRHVRMLTHEIRSTLDRHTILKTTLVELGRTLDLAECALWMPCQGGLNLQLSHNLNNLLPLGSTVPTNLPIVNEIFSTTQAIQIPHTNPLARMRTTAGRYIPPEVVAVRVPLLHLSNFHINDWPELSARSYAVMVLILPMNGLRKWRDHELELVQVVADQVAVALSHAAILEESMRAHDQLMEQNIALDVARQEAEMAVRARNDFLAVMNHEMRTPMHAVIALCSLLLETDLTPEQRVMIETILKSSNLLATLINDVLDLSRLEDGILELENGTFNLHGILREAVNLIKPIASLKKLSITLALALDLPVLAVGDAKRLIQTLLNVAGNAVKFAKEGHISIEASVAKPEYARDSHPPEVYPMPSDGQFYLRVQVRDSGCGISPQDIPLVFTKFAEAQSTSNRSTGGAGLGLAICRRFIQLMKGNIWIESEGLGKGTTVTFVVKLGVCNHPNAMPLLPTVPRSRLNQGSDDLFRYRQFHGDDSAMSVTVQRYQRSL

SEQ ID NO: 36634 - protein, 584 aa, Prochlorococcus marinus str. MIT 9312
MAKQLSFSNESRDALEKGVNFVANAVKVTIGPKAKNVVIERKFGSPDVVRDGSTVAKEIEIENPISNLGAKLIEQVASKTKESAGDGTTTATILTQKMVQEGLKNIASGASPMELKKGMEVGLAFVLEKLSSKSISLSGSDIQKVATVSAGGDQEIGSIISKAMDIVTSDGVITVEESQSLDTELDITEGMSFDRGYSSPYFVTDQERQVCELENPKILITDQKISTLANLVPILEEIQKSGSPFLILAEDIEGEALTTLVLNKNSGVLNVASVRAPLFGERRKAALEDIAILTGAKLISEDKSMTLDQVSINDLGKAKKITITKDKTTIVAFEDTKDLVKARVEKLKREVEMTESEYDQDKINERIAKLAGGVALIKVGAATETEMKYKKLRIEDSLNATKAAIEEGVVSGGGQTLIEISDELLNLSQKSSDDLRTGINIVKEALLEPTKQIAKNAGFNGDVVVAEIKRLNKGFNANSGKYENLKESGILDPTKVIRLALQDSVSIAAMLLTTEVAIADIPEPEAAAPGGPGGDPMGGMGGMGGMGMPGMGGMGMPGMGGMGMPGMGGMGMPGMGGMGMPGMM

SEQ ID NO: 36635 - protein, 104 aa, Triticum aestivum
KNTHQALSLPQHPDLQAVVYRSMEASRRLLSAALLLVLLLAATGELGGPVMVAEARTCESRSHRFRGPCVRRSNCANVCKTEGFPDGKCRGFRRRCFCTTHCHH

SEQ ID NO: 36636 - protein, 898 aa, Streptococcus pneumoniae TIGR4
MSLQKLENYSNKSVVQEEVLILTELLEDITKNMLAPETFEKIIQLKELSTQEDYQGLNRLVTSLSNDEMVYISRYFSILPLLINISEDVDLAYEINHQNNIDQDYLGKLSTTIKLVAEKENAVEILEHLNVVPVLTAHPTQVQRKSMLDLTNHIHSLLRKYRDVKLGLINKDKWYNDLRRYIEIIMQTDMIREKKLKVTNEITNAMEYYNSSFLKAVPHLTTEYKRLAQAHGLNLKQAKPITMGMWIGGDRDGNPFVTAKTLKQSALTQCEVIMNYYDKKIYQLYREFSLSTSIVNVSKQVREMARQSKDNSIYREKELYRRALFDIQSKIQATKTYLIEDEEVGTRYETANDFYKDLIAIRDSLLENKGESLISGDFVELLQAVEIFGFYLASIDMRQDSSVYEACVAELLKSAGIHSRYSELSEEEKCDLLLKELEEDPRILSATHAEKSELLAKELAIFKTARVLKDKLGDDVIRQTIISHATSLSDMLELAILLKEVGLVDTERARVQIVPLFETIEDLDHSEETMRKYLSLSLAKKWIDSRNNYQEIMLGYSDSNKDGGYLSSCWTLYKAQQQLTAIGDEFGVKVTFFHGRGGTVGRGGGPTYEAITSQPLKSIKDRIRLTEQGEVIGNKYGNKDAAYYNLEMLVSAAINRMITQKKSDTNTPNRYETIMDQVVDRSYDIYRDLVFGNEHFYDYFFESSPIKAISSFNIGSRPAARKTITEIGGLRAIPWVFSWSQSRVMFPGWYGVGSSFKEFINKNPENIAILRDMYQNWPFFQSLLSNVDMVLSKSNMNIAFEYAKLCEDEQVKAIYETILNEWQVTKNVILAIEGHDELLADNPYLKASLDYRMPYFNILNYIQLELIKRQRRGELSSDQERLIHITINGIATGLRNSG

SEQ ID NO: 36637 - protein, 208 aa, Phytolacca americana
KRRNGLLKKAYELSVLCDAEVALVVFSSRGRLYEYANHSVKGTIERYKKACSDQSGAGSVAEANAQYYQQDSAKLRNQIRTITENNRLLSRHMMGEGLSSLTMKELKNLEGKLERGISRIRSKKNELLFAEIEFMQKREIELHNNNQFLRARIAENERAQQSMSLMPGGGDYELVPSQSFDSRNYFQVNALQPNNQYSRQDQTPLQLV

SEQ ID NO: 36638 - protein, 237 aa, Prochlorococcus marinus subsp. marinus str. CCMP1375
MPLALAIQLREGTKKSHTLAENTGFVSCFLKGVVDKSTYRKLMADLYFVYLAMEDEIGRLSKANHPVVSLIGFQELNRLETIEQDLHFYFGEDWSDLVQPSSSAKAYVDRIRHIAKATPELLVGHHYTRYIGDLSGGQILSRIARKAMNLTGKDGLRFYEFEQISDQKEFKLKYTQTLNTLPIDQEMADSIIDEANLAFKYNMDMFKELEGNLIGVIGKLLFSFLTRKSRRGSTESV

SEQ ID NO: 36639 - protein, 411 aa, Psychrobacter arcticus 273-4
MRRVVITGAGIVSCIGHDLATVTEALKQGRSGITFNESYAEHNFKSHVSGSIDQSELDTSAIDRKLKRFFSDASLYAYVSALSAIEHAGLSLETINNNPRVGVVASSGGASTENIANAIDAMREKGLRGVGAMAVPKTMGSSVSAALATGLKIQGISYSLASACATSTHCIGHAAELIQLGKADVILAGGSEAEHWTQSCMFDAMGAVSTQYNDTPELASRAYDKDRDGFVIAAGGAMVVVESLEHAQARGANILAEIVGYGASSDGAEMVAPSGEGAVRCMKLALAEAGLESVDYINSHGTSTPLGDITELKAIAKVFDNDISRVPAISSTKSMTGHSLGAVGAQELIYCLLMLQDGFIAPSINITALDPAAKGFDIVTEKRDVKLETLMSNSFGFGGTNATLIIKKFDA

SEQ ID NO: 36640 - protein, 446 aa, Suillus bovinus
MREIVHIQTGQCGNQIGAKFWEVVSDEHGIERDGLYKGTNDMQLERISVYYNEIGSNKYVPRAVLVDLEPGTMDSVRSGPLGGLFRPDNFIFGQSGAGNNWAKGHYTEGAELVDSVLDVVRKEAEGTDCLQGFQITHSLGGGTGAGMGTLLMSKIREEYPDRMMCTYSVVPSPAVSDTVVEPYNATLSVHQLVENSDETFCIDNEALYDICFRTLKLSTPTYGDLNHLVSFGMSGITTCLRFPGQLNSDLRKLAVNMVPFPRLHFFMTGFAPLTARGSQQYRAVTVPELTQQMFDAKNMMAASDPRHGRYLTVAAVFRGKVSMKEVEEQMQNVQNKNSAYFVEWIPNNVLSAQCDIPPRGVKMAVTFLGNSTAIQELFKRVSDHFTAMFKRKAFLHWYTQEGMDEMEFTEAESNMQDLIAEYQQYQDATVEEEAEYEEEVPADEES

SEQ ID NO: 36641 - protein, 660 aa, Thermococcus sp. B1001
MYKIFGFKDNDYLGKVGITEFSIPKSGSYAYLLGNFNAFNEGSFRMREKGDRWYIKVELPEGIWYYTFSVDGNLILDFENNEKTVYRRLSYKFEKTVNVAKIFSGEKFYHYPSLVYAYSLGDSTYIRFRAMKGVAKRVFLISDQKYEMRKKAQDELFEYFEAVLPRKEGLEYYFEIHEADEIIDYGDFKVDFNEQKERFKPPAWVFERVFYQIMPDRFANGNPENDPHNCIEFKTITHHGGDLEGIIEKLDYIEELGVNALYLTPIFESMTYHGYDIVDYYHVARKFGGDEAFEKLMQKLKKRDIKLILDGVFHHTSFFHPYFQDVVKNGKNSKYKDFYRIISFPVVPEEFFEILNSKLPWDEKYRRLKSLKWNYESFYSVWLMPRLNHDSKGVREFIRNIMEYWIKKGADGWRLDVAHGVPPEVWEEIREKLPSNVYLVGEVMDDARLWIFNKFHGTMNYPLYEAILRFFVTREINAEQFLNWLELLSFYYGPAEYVMYNFLDNHDVDRMLSLLGDKRKYLCALVFLFTYKGVPSIYYGNEIGMKNIEAPFMERSRAPMEWNKKKWDKEILKTTKELIKLRRRSKALQKGIFKPVKFKDKLLVYKRVLNNENILVAINYSKKEKHLDLPPSFEILFQSGSFDRVNIRLKPFSSIIAKKL

SEQ ID NO: 36642 - protein, 192 aa, Thalictrum dioicum
KRRNGLLKKAYELSVLCEAEIALVVFSNRGRLYEYANNSVRKTIDRYKKTCGEGSSTLTVSEANLLFYQQESSKMKQQIEILQNSNRHLMGEALSCLSIKELKQLESRLEKGLSRIRSKKNEMLLAEIEYMQKKEIELHNDNIYLREQITVNEKAQQHINSMPGNVYEAITSAPYNSKPNQYGSDATFLQLC

SEQ ID NO: 36643 - protein, 212 aa, Debaryomyces hansenii CBS767
MGLKYTNFFENSSYESSDTQIVICKNCSSHLCLSNLILSDNFRGSTGPAYLVDKLINYQLENGSQETRMLTGNYLINKVKCHQCSNQLGWTYKKAFSYSETYKEGKFVIEKDYIKLIPNNFSTASLVEKAKLNNSRRRSSGSSSSSVDYNTTSDDLFKFNSVDPTKEKMEESVGDSSINFRDNDGVSILGRLRFQGIDKEEFDEDQDVFVDV

SEQ ID NO: 36644 - protein, 739 aa, Thermococcus sp. B1001
MRSRKIYMLVVLLLFLGFSEQISTVAAGVSPSYPAGDPQTWVIYQIVIDRFYDGNTSNNDPLKSPGLYDPNKENWKLYWGGDLEGIIAKLPYLYELGVSAIWISPVFDNIDVPINGSNGLEAGYHGYWPKDFKVIEEHFGTWEIFRRLSQEAAKYNITIIIDFVPNHSNPNDAGEYGALYDNGTFVIDYPTDANYATVHPITKSLSYIYNHNGGITNWNDRWEVRYKNLFNLADLNQLNPWVDNYLKESTVSYLEAGIGGIRIDAVKHLEPGWLKTYADYVYARKNVFMFGEWYQGFNDEMYWDMVKFANYTGIGLINIPLQQVLVDVFAYDTKTMWDLESAVNKYTIDFMWQNKLTIFVDSHDVPRFLSLRNDLIRFHQALAFVLTAPGIPIIYYGDEQYLHNDTVNDFGQVGGDPYNRPMMKTWNTSTTAFKLIKTLASLRRYNPALAYGLIATRYVSDDIYIFERKFFDNVVLVAINRNLNSPYVVSNVYTSLPDGSYNDYLGGLLNGVGITVSSGTFSVELPAGSVSVWQYKATPTDPWVGAIDPVMGRAGNIVTVSGEGFGDVPGRVLITNGQDYWTAEVTYWSDKSVEFIVPSGITTQLNENHVEVRIERADGATSNGIAFEYLTNKQIPAIFEVRNTQGTNLETQVGEFLWLTGSVPELSYWSPETIKAVGPMLCPGWPDWFVVASVPADTYIEFKFLKAPLGGTGIWEVGSNHAYLTPSSGIGEVSVEANR

SEQ ID NO: 36645 - protein, 475 aa, Ralstonia metallidurans CH34
MRQQQGFDAIVEREQGLHRGLSTGQLSMIAIGGAIGTGLFLGSGFAIGFAGPSVLVSYAIGALIALLLMGCLAEMTVAHPTSGSFGANAEHYIGPLAGFLVRYAYWSSIVFAVGTEVTAIAVYMKYWFPMVPGWYWIVGFSAALIGINATSVKVFGAVEYVFSMLKIVAIVGFILLGAYVVTRAPTGSGIGLANYTAHGGFFPKGMWGTWVAVIVSIFSYLSIEMIAVAAGEARDPETAITRAFRATMVRLVFFYLLTLALMLMIVPWTAAGAGESPFVRVMAATRVPGAAAVFNFVILVAALSAMNSQLYITTRMMFSLSRAGYAPKALGQVNGRGVPMTALLLSTVGIAFAVVLNVVYPDASFMLMMAISMFGAMFTWLMIFITHLFFRRQHRGRPLAFRMWGFPVTTLLGAGLMFATLVTTWFTPEFRMTLVAGVPFMLALSAAYWLWYRKRGGAAQGDGEDAGRAEVRNSW

SEQ ID NO: 36646 - protein, 466 aa, Haemophilus somnus 129PT
MEKKVKKSSFVLTGIALGLSVLTTSINVQASLPMAVDGQSLPSLAPMLQKVLPAVVSIAVEGKQKNDFSFNNEIPEEFRRFFGDSFGFEGFSSRAPRSFRGIGSGVIIDAEKGYVLTNNHVIDQADKITVKLEDGREFKAKVLGKDDMSDIALIQLENPKNLTAVKIADSDKLRVGDFTVAIGNPFGLGQTATSGIVSALGRSTGFDSGAYENYIQTDAAVNRGNSGGPLVNLNGELIGINTAIISPSGGNAGIAFAIPSNMAISLVKQIIEFGEVRRGLLGIKGGELNANLAKEFNIDVQQGAFVSEVLPNSAAEKAGLQAGDVITAIDGQKLASFAELRAKIATSGAGKEIKLTYLRDGKSKTAKVKLQSDDGDTISAVGNISILEGAELSNYNQKGTKGVEIKEVKSRSLAAQYGLEKGDIIIGVNRHKVENLSDLRKILGKKPSAIALNILRDNSRFYLLIQ

SEQ ID NO: 36647 - protein, 148 aa, uncultured soil bacterium
MALVPWTPMHNFAALQGQMNQLLNQFFRGGNGEEAPWGVSAWMPPVDLYETPDEFILSADLPGLTKDDIHLEVHDRTLTLRGERKPAAGMTEAHYQRRERAYGSFQRAFTLPTPVDTDKVQASMKDGILDLHLPKHEAAKPRRIAVQS

SEQ ID NO: 36648 - protein, 226 aa, Thalictrum dioicum
MGRGKIEIKRIENTTNRQVTFCKRRNGLLKKAYELSVLCEAEVALVVFSSRGRLYEYSNNSVKKTIERYKKASTDSPNSGSVYEANVQFYQQEASKMRNQIASLQNHNRNLLGESLSNLNIRELRQIEKKIEGGISKIRAKKNELLFSEIEYMQKREIDLQTDNKYLGAMIAANERVPPEHMNLMPANEYHIMSSAPFDSRNFLPANLLDHNNNYSHSDQTTLQLG

SEQ ID NO: 36649 - protein, 1955 aa, Ustilago maydis 521
MSFHLDSFVNSPASADQAPAWQLHSSTDSYLEWDANPKSLIEQQPSSTTTSPPPSMSRLRSTSSTVATLAPGAQTPAEPPSTDSASVLSHNGHTTSPERSVSPSYFTKLYFHPPDRTTSATSPTITFTSAIEPSLVAHAQPSPLLPTDAQSASHLPSPARESHTGRRPSISAVGSSSTTSPLTTPLSPTLSSRSSAAGGGFFASLRPSSPGNLPISTSKPQDGDNLGKPRRPSSVFDHVGNVWERFGRKVHHTRTATSEHHSSSSSHTRRSASQASPPIGLTPESADPFDTARNSPSGSFISQASPSQSTTTDSECRTPATPGGEPPAQLSTPQPLPSAPAYTSVSALDSSVNAPQQEEAEELPYLAPESPRPQPQSFNTIGSPRIPSGQRSATSHRRTSSLLERVLIQVTDDNERFSVVDISGVDSADAIKERMFAKLHLFDADHSSFQLFRTEIGQSEATGPVVSDDALLVLCLQMGDDRGTLKFLVQQIAPPPNSTVRALPPPTSTIVSQRAINNIRRTSGTGSAPGQHLRTESQSSKSSLSDALVYPEMIGADAAHEGSNRNSGSSLTRSKAQTRRALPSAPPVDDLRSPTHSCISSTTQSAVQDRRSIASSGDGSANESWARHGASASDGAPSAIPTQRSSSVNANASAAQSSSSGSAGRHPSNLEDDRQRYDAEPGVNRSLHAPATGSSHWQERSDEGARESLRVQTTAQLPGLTLHNAKSMDDLHRPSQSASQPSTLTTQAEVRKQAGMDRDGRYPTPAIMRPSTAAPAGAGARESASSHRQYSSDALGSSRSPQEPTLGLDPRMLQRNRSAQAAIPSGQQLVNHGPTRMSSTPQIRSPPMQHVYLGQGQIDPRFNTQPPHSAHPMQAHPSNMVARPPYSAAPSFASQPAYQSQSFGQAALRPMGHGFVNEFGARAPAASVNFNTYHGHDPRMNASAMQGSLTPRPYSYYEQPSMHQQQPMYRPYAQPSLVTASPYRTREDPFTTRYFPASSSRQVSEFQMQAGRLEPGMTVQQTLRTQEAIWGHTSAGSPGQAYQSAHAHPPGPSYGPRDPRQPGQSNQYTGMQAYPNASAAPQMQQRPSYQGSAMPNLHHVPPPRPQSYPSAQPQPQPPRNAHDRHPAPPAGHSGPQMMPQSSGSSAGRAPMQPQQNQQLSQPSQPSQREQPGHAQAMPGSESHRRDPPVRTNASERSSGSSFSSQGSFQHGRPHNDDCNSRNSIEESFSAPTSARSSQSEAASAKPVNVEHRSSYADQERDLADDELEHVRPLPKLPHSSATTRTDAFKSSSCDASGATVGGSVRRSEDEDTLRAGEWAQLWRALDPKSDGTVSGTAISGSSGGDGDTVRAEPSTPGASRPQTKDGATLPISLEPPRIPSPSLAPEENGTVSSFGTFDDDETESGTWAQPLDSDVNAPRLPLRLDADSEALSDDHATLLPGQDTLLQASTRGTRGFSAASNSPKRPELRLTIDPAAGPTVMTWTASQASTNSPRASTSHLSSALNSGGITRSNSFARRDDDWAFRPPPEQLYENLDDFFPKHDLDKPLLDTTAGPESGLVSSPRAEASVPSVASVGAQQGLSQRSRHKKSIRLVAEDRKRILERADTRRAAQGAELSSGLVRRRSTKLWGTKVVEMTPGQELATPASATSAESPWSDTASTTGQPVFKWVKGDLIGKGTYGRVYLALNATTGEMIAVKQVELPRTASDREDSRQKGVVAALKSEIETLKDLDHPHIVSYLGFEETRQFLSIFLEYVPGGSVGSCLRKHGKFEESTIKSFLHQILEGLAYLHSKGILHRDLKADNILVDFEGTCKISDFGTVRRSDDIYGNVENMSLQGSIFWMAPEVVSLSKKGYSAKIDIWSLGCVVLEMFAGRRPWSDDEAVQAMFKIGAQRKAPPIPADVKLTKQAAHFLKNCFEIDPAKRPTAQRLLDHVFTVPVPGWQFSHSALCRSLHR

SEQ ID NO: 36650 - protein, 200 aa, Houttuynia cordata
NGLLKKAYELSVLCDAEVALVVFSSRGRLYEYANNSVKATIERYKKSNADSTNSGSVAESSSQYYQQESAKLRNQISQLQNAIGRLTPEGIASMNPREVTNAEKEILRSITKIRSKKNEVLSAEIEYMQKREIDLQNDNIYLRSKIAENERVHQHMNVMPGQQYEVMPAHPFDSRNFLEANLLEPNLHYSQQEQTALQLG

SEQ ID NO: 36651 - protein, 763 aa, Methanococcoides burtonii DSM 6242
MNYFENMPIRKRLIIYIVIGTFLVLIASSSLIISASTAQHEEYAYLNSVETAKKYANQFNSDMIRSHSIGKTIAYSMTVDTERDRDKANMVLREILVQNPELIGTYACFEPNAFDGKDIEYANTSAHDSTGRFIPYWNKLNGSLTLDPLQDYEEFDYYALPKSLKTDVITEPYWYDDQIIISYSTPIFSDDEFIGISGVDVSLNYLDNIVSDITIFDSGYAFLSSNKGVILTHPTEKVWIGNNSLCEFDGNVYEMSKDIEDGKSGHIETIDSTTGKEVVIYYEPLTEGNYSFVLVVPKNEMLAGVVSLRNELALFSALAIMFMGIVAFLTANTINRRIEDIVDDFEQISDSALNGNLKVRANTKIGIDLKRIPIGLNELLRNLEKSHELNEEMNNIIEHSPVTVFKWKNEKGWPVELVSENITQFGYNADDFLSKQMDYADIIHPDDVGRVEDRLGESLKRHVPNFISQYRIISKSGEIFWVEEQTLSHADQNGDTKYLHGIIVNITKRKKAEDMVIQAKLDAEATNRTKSEFLANMSHELRTPLNSIIGFSELLLEKTIGDINNKQERYISNILTGGQHLLSLINEILDISKVESGKMELHYDEFAISSMISDIVILLNPLAITNRIEIITDIDKRLSLINADKIKIKQILYNLLSNAIKFTNENGTISIEAIFDDKLMQICIKDNGIGIEKENIEKLFQPFQQIDSAASRKYQGTGLGLALVKNFVEMHGGNIWVDSEMGKGSAFTFTIPINGIEGRNNEQ

SEQ ID NO: 36652 - protein, 216 aa, Sanguinaria canadensis
IENTTNRQVTFCKRRNGLLKKAYELSVLCDAEVALIVFSNRGRLYEYANNSVKSTIERYKKTCQDPSNSGCAVEANTQFYQQEASKLRQQIGFLQNSNRNLTGEALSSMTVKELKQLETRLEKGISRIRSKKNELLFSEIEYMQKREIDLQNDNMYLRAKIAENERAQQHMNLMPGNEYDVMTSSAYDSRNFLQVNLLESTNHHYSRQEQTALQLG

SEQ ID NO: 36653 - protein, 268 aa, Salmonella typhimurium
MERYENLFAQLNDRREGAFVPFVTLGDPGIEQSLKIIDTLIDAGADALELGVPFSDPLADGPTIQNANLRAFAAGVTPAQCFEMLAIIREKHPTIPIGLLMYANLVFNNGIDAFYARCEQVGVDSVLVADVPVEESAPFRQAALRHNIAPIFICPPNADDDLLRQVASYGRGYTYLLSRSGVTGAENRGALPLHHLIEKLKEYHAAPALQGFGISSPEQVSAAVRAGAAGAISGSAIVKIIEKNLASPKQMLAELRSFVSAMKAASRA

SEQ ID NO: 36654 - protein, 147 aa, Fritillaria agrestis
TMLSSVATAARAAPAQASMVAPFVGLKSTSSFPVTQKPATGLSTLPSNGGRVQCMKVWPIVGLKKFETLSYLPTLSVESLLKQIEYLIRNGWVPCLEFSLEGFVSRDNNKSPGYYDGRYWTMWKLPMFGCTDAAQVVKEAAECKKEY

SEQ ID NO: 36655 - protein, 317 aa, Ralstonia metallidurans CH34
MSLACMKDEGEVIVLTRLPLDQDWLRAHAPRYRFVPWTAVDEAQRVQARAVLTNGSTGLTGAEMAALPALELVASFGAGYENIERDAARMRGVRVCHAPDTNSQVVADHALAMMLAWSRGIAMLDRGLKAGQWDALRAPRPGVRGKTLGIVGLGNIGQRLAALAEAVGMRVAYLRRSGALQPNRTPYGDVRSLAAASDVLALTCPGGPATRHLVDAEVLRALGPDGLLVNVARGSVVDTEALVQALRRGELGGAALDVLEAEPLVPEAFREMDQVILTPHMAGRSPETRVAQHEALLRNLDGWFRHAAPAHPVDLAG

SEQ ID NO: 36656 - protein, 645 aa, Leptospira interrogans serovar lai str. 56601
MEKTSLYHLIRDVASVYSDRPMYWIREESGDFKGISYKDWYENLKNLSTFLIDLGMHKGNTAGLICDNRYEWSLCSLSLVTIGCVDVPRGCDATIEDLKYILEHSEAKILFLENEKVLKKLLENKSSLAKVKTILLIDPPTKWKDLENSRALLSGIQFLFLEDALLEGEKSRIKKGDKTYDQRGESLGGKDLATIIYTSGTTGAPKGVMLNHRSFTWGIHQIQEFIPGSYNDRTILFLPPWHIAERLLETTLIAWGASMACSSIPTIPADMQKVKPTVLVSVPRLWEGLYKRIYDTVRKSSPFKQKLFHFAVKMAEITTSLQDTIRDSYATTETENPNQKLLDRFIASVFLLSLVPIKILSNKILERVRNLFGGKIRFALCGAGAMPSHIQFFFRSTGIHIIETYGMTETTGIGAIGEFPIPKNGAIGAPLPGTAIKLVGENGKVVTTPGEKGVAWHKGPHVTMGYYKEPEKTSKALQDGWLDSGDILTWTHTGELKFAGRAKDTIVLSGGENLEPAPIEAKLTESEFINQVIVVGQDQKNLGVLIVPFFDRVQEEFQNQAVKIPKDPTEWSSSKEVTTFFKNIVKDKISTKAGFKSFEKIAHVHILSKEFEKGKEMTETMKLKRNVIFDLYQDVIQSLYDHDED

SEQ ID NO: 36657 - protein, 147 aa, Fritillaria agrestis
TMLSSVATAARAAPAQASMVAPFVGLKSASAFPVTQKPATGLSTLPSNGGRVQCMKVWPIVGLKKFETLSYLPTLSVESLLKQIEYLIRNGWVPCLEFSLEGFVSRDNNKSPGYYDGRYWTMWKLPMFGCTDAAQVVKEAAECKKEY

SEQ ID NO: 36658 - protein, 760 aa, Petunia x hybrida
MLRTLASVLLISSFLVYLSAADDGFPRCNCEDDGFWSIESILECQRISDFFIAIAYFSIPIELVYFVSCSNFPFKWVLFQFIAFIVLCGMTHLLNFWTYYGQHTFQLMLSLTIFKVLTALVSFATAITLITLFPMLLKVKAREFMLTKKTWDLGREVGLIKKQKEAGLHVRMLTQEIRKSLDRHTILYTTLVELSKTLNLHNCAIWKPNENRTEMNLIHELKGRSFSSMYSLPIPTSDPDVKAIKGSDGVKLLDVDSPLAAASSGGSSQPGAVAAIRMPMLKVSNFKGGTPELVPECYAILVLVLPSEQGRSWSNQEIEIVRVVADQVAVALSHAAVLEESQHMRETLEEQNRALPQAKQDALKASQARNASQMVMSHGLRRPMHSILGLLSLLQDDKLGNEQQLLVDAMAKTSNVVSTLINDVIDTSTKDNGRFPLEMKHFQLHSMIKEAACLAKSLCAYRGYKISIEVDKSLPNHVMGDERRVFQVILHMVGNLLKDPNGGYLTFRVLAESASREDIEGAWRTRRSNSSRDNAYIRFEVGTRNIHSGITSTLPHCSQRRCSREVEESLSFAVCKKLVKLMQGDIWVIPNPDGFDQSMAVVLGFQLWPSISIGIPEYRELSDHSHPHLLLQGVKVLLADYDDVNRAVTRKLLEKLGCSVSAVSSGHDCLGALGPAASLFQIVLLDLHLPDLDGFEVTMRIRKYRSRSWPLIVGLTASADEDVSGRCVQIGMNGIIRKPVLLPGIADELQRILLQATRIM

SEQ ID NO: 36659 - protein, 191 aa, Bradyrhizobium sp. BTAi1
MIDRRTVLFGIGASMAGSAFISPAARAENAVSKTTAYRFSFPALSGDPIRLAEFTGKPVLVVNTASQCGYTPQYTGLQQLWSEFHERGLSIIAVPSNDFNQEPGVAGDIAELANKQFGVTFPMTAKAVVTGSNAHPFYRWAAEARPKDTPRWNFHKYLIGRDGYIADVFASSVEPTDTRVKTAIARNLADG

SEQ ID NO: 36660 - protein, 319 aa, Salmonella enterica subsp. enterica serovar Paratyphi A str.
MKAMNKVWVIGDASVDLVPEKQNSYLKCPGGASANVGVCVARLGGECGFIGCLGDDDAGRFLRQVFQDNGVDVSSLRLDADLTSAVLIVNLTADGERSFTYLVHPGADTYVSPQDLPPFRQYEWFYFSSIGLTDSPAREACLEGARRMREAGGYVLFDVNLRSKMWRNTDEIPELIARSAALASICKVSADELCQLSGASHWQDARYYLRDLGCDTTIISLGADGALLITAEGEFHFPAPRVDVVDTTGAGDAFVGGLLFTLSRANCWNHALLAEAISNANACGAMAVTAKGAMTALPFPEQLNTFLSSHSLAQAMTVK

SEQ ID NO: 36661 - protein, 207 aa, Arabidopsis thaliana
LYGKAWYAVQGSRSRNSPGRPTRPWGPAIIGHADDEVLAALAETMKKGTSFGAPCLLENVLAEMVISAVPSIEMVRFVNSGTEACMGVLRLARAFTGKQKFIKFEGCYHGHANSFLVKAGSGVATLGLPDSPGVPKAATSDTLTAPYNDIAAVEKLFEANKGEIAAIILEPVVGNSGFITPKPEFIEGIRRITKDNGALLIFDEVMT

SEQ ID NO: 36662 - protein, 410 aa, Arabidopsis thaliana
MMQLGRAHSLKGFSITVAQTKFNYLNPSKDLADFQFITIPESLPASDLKTLGPIWFIIKLNKECEISFKKCLGQFLLQQQEEIACVIYDEFMYFAEAAAKEFNLPKVIFSTENATAFACRSAMCKLYAKDGIAPLTEGCGREEELVPELHPLRYKDLPTSAFAPVEASVEVFKSSCEKGTASSMIINTVSCLEISSLEWLQQELKIPIYPIGPLYMVSSAPPTSLLDENESCIDWLNKQKPSSVIYISLGSFTLLETKEVLEMASGLVSSNQYFLWAIRPGSILGSELSNEELFSMMEIPDRGYIVKWATQKQVLAHAAVGAFWSHCGWNSTLESIGEGIPIVGPWLLANGWRVGVHVEGELERAVKRLMVDEEGGEMKISALNLKEKLKASVLPGGSSYNSLDDFIRTL

SEQ ID NO: 36663 - protein, 191 aa, Zea mays
MAGLQRSATTFRRSGSSGLVWDERFLTEADAEAKAGAAEDAEQPELRHSRSVGMLRRAGGGGDSRSKKGKESRQKQAESARRSNQQVFRTKDVAPDMDPPSPRVSGCAFCAVFRGGSGGTGRRAQARRRLVQLFRLGSAAGPSGSACGFGFETGREAGWSDDELVRDAAELGGQTGRLVVADGMSGDNSEC

SEQ ID NO: 36664 - protein, 270 aa, Burkholderia sp. 383
MAGPGRVLLDAPQLPSLPTARSMYKLVLIRHGESTWNKENRFTGWVDVDLTEQGRNEAYQAGELLKEAGYTFDIAYTSVLKRAIRTLWHVQDKMDLMYLPVVHSWRLNERHYGALSGLNKAETAAKFGDDQVLVWRRSYDTPPPALEATDERAPFNDPRYAKVPREQLPLTECLKDTVARVLPLWNESIAPAVRAGKQVLIAAHGNSLRALIKYLDGISDSDIVGLNIPNGVPLVYELDENLKPIKHYYLGDQDAIAQAQAAVAKQGKAG

SEQ ID NO: 36665 - protein, 215 aa, Debaryomyces hansenii CBS767
MRSIKSVVIGDGGVGKTCLLISYTTNTFPNDYIPTVFDNYSATAMFNGEPIKLGLWDTAGQAEYDRLRPLSYPQTEIFLCCFSIVSPESLENVKAKWIPEILHHSPKDILVLLVGTKADLRDDLLVLDKLDDGNQKPTTAAQGERLAKELGLVGYKECSAATQMGVKEVFDFAIKSVVSPPEGNQGRNGGTNNAATNMRNSQARKVKKAKKCTIL

SEQ ID NO: 36666 - protein, 344 aa, Ralstonia solanacearum
MRGKAIGMAADRRAMIAGRRAASERRDTFPPLLTMQPTLLILIAMAADHLARIGQHFHVIYAPTRAERDAAVTRDGHAVRVVLTNGSTGLSAPEIAAMPALELACALGAGYENIDVQAARARGVVVANGAGTNDACVADHAIGLLLATVRGIPKLDRATRNGIWRDDIPLQPGVWGKRLGIVGLGTIGLQIARRAAGFDMQIGYHNRKPRENVPYRYFDAIGAMAEWADFLIVATPGGAQTRHLVNRDVLEALGPTGYVVNIARGSVVDTAALEAAIRAGRLGGAGLDVYESEPAPPAGLLDLEQVVLTPHIAGWSPESIAATVDRFLENARLHLAGEAVVSPV

SEQ ID NO: 36667 - protein, 338 aa, Pseudomonas fluorescens Pf-5
MNSHAGWWPVALSRQLHKQPLACTLHGVPLVLFRDADGAAAVLPDRCPHRFAPLSAGRVRDGQLQCPYHGWRFDPQGRCTQLPGQEQQRCSQPLLQPLHSCEAQGLVWASLASERPNAPPVAAAEQAQALDVFWISDRVQCSLQDAAENFLDGFHTHFVHAGWIRHDRQRQRIRAWVHQLEDGVEAQYSEEGTQSGLISRLFEGERGLSMGRFRLPGLAEIEYRDRQGRLNLLVSAWLTPAAEGELRLFARIATARGRLPGWLKRAVLQPLFKVILKQDRQILEKVSANQQRFAQVPLRWHRPTPLDSSLDLLGPWIRQLLEQGELKDFQECREEFWL

SEQ ID NO: 36668 - protein, 464 aa, Haemophilus somnus 129PT
MKLTRFQQYHTEAKKLIAIATPILLAQVAQNSMGLVDTIMAGRVSAADMAAVAVGASIWLPLVLFGHGLLLALPPTISYLNGSGQRDHIAHQIRQGLWIVFISCIPLGLLIYNSDFVIQYMKMEEKLANITIGYLRAMLWGLPGYLLLINFRCLNDGIAKTKPAMVITFFGLLCNIPLNYIFIYGKLGIPAFGAVGCGIATAIVNWIMCLMMIVYSKHARNQRDLKVFEHLFEKPDTKTLAKLFRLGLPIAVSLCCEVALFALTSLLLSPLGTQVVASHQIALNTSSFAFMLPMSLGMATTILVGQRLGEGKIDNAKQISFSALTVGLSIAFLTASIIFFFRYEIAAIFVNDKEVIAISSSLLMIVALYQFSDTAQVVSSGALRGYKDTQAILYITLFCYWGIGMPLGFSLSRTDWIIPSIGAAGFWVSFVVSLTIAAILLLWRMYKIQQQPAPILLAKLDKLK

SEQ ID NO: 36669 - protein, 225 aa, Meliosma dilleniifolia
MGRGKIEIKRIENTTNRQVTFCKRRNGLLKKAYELSVLCDAEVALIVFSTRGRLYEYANNSVKATIDRYKKACADTSNTGSVSEANAQFYQQESSKLRQQIVILQNSNRHLMGEALSAMTVKELKQLEGRLEKGISRIRSKKNEMLFAEIEYMQKREIDMQNDNMYLRAKIAENERAQQHMSMMPTSEYEAMPPQQFDSRNFLQVNLLEPNHHYSRQEQTALQLG

SEQ ID NO: 36670 - protein, 476 aa, Campylobacter coli RM2228
MGKFVNNVNEFFDFCKQNEVLFVDFRFTDMIGTWHHITYNLHAISEETFEAGIPFDGSSIHGWQPIEKSDMILKPDAQSAFLDPFTADPTIIVFCDVYDIYKGQMYEKCPRSIAKKAMEHLKNSGIADTAYFGPENEFFVFDSVKIVDTTHCSKYEVDTEEGEWNDDKDFADSYNTGHRPRNKGGYFPVQPIDSLVDIRSEMVQTLEKVGLKTFVHHHEVAQGQAEIGVNFGTLVEAADNVQIYKYIVKMVAHLNGKTATFMPKPLYGDNGNGMHVHMSLWKDGVNLFYDKEGYGGLSQTAINYIGGVLKNARSVAAFTNPSSNSYKRIVPGFEAPCILTYSCQNRSASCRVPYGIGKNSARVEIRFPDSTANPYLAFVSLLMAGLDGIKNKTIPVGPMDENLFDLTLDEIREKGIEQLPHTLRGSLEALIRYNAFLKPVMSDIFIDDYQHLKFETQVWPVEARPTAYEFKTCYSC

SEQ ID NO: 36671 - protein, 339 aa, Psychrobacter arcticus 273-4
MYDVMAIGNALVDHEYLLSDAALEETDLTKGHMTLAGIEEQQQLLAYFKLAEIEPSKQAGGGSAANAMVAFSSLGGKPFYACRVGDDKQGEFYLKDLHEAGVTTSPQSIHAGGVTGSCVVAVTEDGERTMQTFLGTSSDITADNVDFNALTQAEWLYLEGYLAMSAGIQPAMDQLRQQAGVNGAKIAVSFADPAVVKFAKDGLLNMLGNKVAMIFCNSEEARLFTDETQYKSAARALLQHCQTAVVTDGANGAVIAHQPNDESDIEIYDIPTPAVDNVIDTNGAGDNYAGAFLYALSQQYSLPECGHLASAVAAQVIQQFGPRLASKDYQDIAKRVLSA

SEQ ID NO: 36672 - protein, 212 aa, Chloranthus spicatus
IENTTNRQVTFCKRRNGLLKKAYELSVLCDAEVALIVFSTRGRLYEYANNSIKSTIERYKKASADSSSTTSIAEANTQYYQQEASKLRQQIHILQNSNRHLMGDALSSLSIKELKQLENRLERGITRIRSKKHELLFAEIEYMQKREADLQNDNMYLRAKIAENENAQQANMLPGPEFDTLPTFDSRNYFQANILEAAPQYSHQDQTALHLG

SEQ ID NO: 36673 - protein, 147 aa, Fritillaria agrestis
TMLSSVATAARTAPAQASMVAPFVGLKSTSAFPVTQKPATGLSTLPSNGGRVQCMKVWPIVGLKKFETLSYLPTLSVESLLKQIEYLIRNGWVPCLEFSLEGFVSRDNNKSPGYYDGRYWTMLKLPMFGCTDAAQVVKEAAECKKEY

SEQ ID NO: 36674 - protein, 213 aa, Chloranthus spicatus
IENTTNRQVTFCKRRNGLLKKAYELSILCDAEVALVVFSSRGRLFEYSNNSVKTTIDRYKKAHADSNSASVSEANTQFYQQEAAKLRQQLGILQNSNRHMMGESLSSMNIKELKSLEVKLEKGISRIRSKKNELLFSEIEYMQRREMDLQNDNMYLRSKIAENERAQQHMNVLPGPEYDVMPAFDGRNFLPVNLLGSNHHQFSHQDQTALQLG

SEQ ID NO: 36675 - protein, 147 aa, Fritillaria agrestis
TMLSSVATAARTAPAQASMVAPFVGLKSTSAFPVTQKPATGLSTLPSNGGRVQCMKVWPIVGLKKFETLSYLPTLSVESLLKQIEYLIRNGWVPCLEFSLEGFVSRDNNKSPGYYDGRYWTMWKLPMFGCTDAAQVVKEAAECKKEY

SEQ ID NO: 36676 - protein, 226 aa, Saruma henryi
MGRGKIEIKRIENTTNRQVTFCKRRNGLLKKAYELSVLCEAEVALIVFSSRGRLYEYANNSVRTTIDRYKKASDSSNPASVSETNSQYYQQEATKLRQQIGILQNANRHLMGESLSSMSVKELKQLETRLEKGISRIRSKKNELLFAEIEYMQKREVELQNDNIFLRGKIVENERAQQNMNMLPGGGGYEVMSQHPPYDSRNYLPVNLLEHNQHFSHQEPTALQLG

SEQ ID NO: 36677 - protein, 147 aa, Fritillaria agrestis
TMLSSVATAARAAPAQASMVAPFVGLKSTSSFPVTQKPATGLSTLPSNGGRVQCMKVWPIVGLKKFETLSYLPTLSVETLLKQIEYLIRNGWVPCLEFSLEGFVSRDNNKSPGYYDGRYWTMWKLPMFGCTDAAQVVKEAAECKKEY

SEQ ID NO: 36678 - protein, 196 aa, Nymphaea sp. EMK-2003
KRRNGLLKKAYELSVLCDAEVALIVFSSRGRLFEYANNNIKATIDRYKKACAESSNANSVTEANAQYYQQEATKLRQQIQILQNANRHLMGESLSNLSVKELKQLENKIERGITRIRSKKNELLFAEIEYMQKRELELQSDNMYLRAKVAESERAQHSNMLPGSDYETMQTFDSRNFFSVNMLQYSNQDQTALHLG

SEQ ID NO: 36679 - protein, 321 aa, Bacillus thuringiensis serovar konkukian str. 97-27
MVVNEKVELATFAGGCFWCMVSPFEEMEGIIKVVSGYTGGHKENPTYKEVCSETTGHYEAVQITFDANKMPYEELLNIYWRQIDPTDVGGQFHDRGQSYETVIFYHNEEQHKKAEASKEELAKSGRFSKPIATKILPAATFYPAEEYHQGYHKKNTFRYELYRKGSGRDAFIKQHWPKDNAHLKEKLNEMQFYVTQENGTEPPFRNEYWNHKEEGLYVDIVSGEPLFTSLDKFDSGCGWPSFTKPVMSASVKEKMDVSHNMTRTEVRSKEGDSHLGHVFPDGPGPNGLRYCINSAALRFIPKEELEKEGYGDFLILFGNKK

SEQ ID NO: 36680 - protein, 147 aa, Fritillaria agrestis
TMLSSVATAARAAPAQASMVAPFVGLKSTFAFPVTQKPATGLSTLPSNGGRVQCMKVWPIVGLKKFETLSYLPTLSVESLLKQIEYLIRNGWVPCLEFSLEGFVSRDNNKSPGYYDGRYWTMWKLPMFGCTDAAQVVKEAAECKKEY

SEQ ID NO: 36681 - protein, 498 aa, Solanum tuberosum
MKKVTVGAAVVGAAAVCAVAALIVNHRMRKSSKWGRAMAILREFEEKCKTQDAKLKQVADAMTVEMHAGLASEGGQSSRCLSPMSIISQLVMKLGVFYALDLGGTNFRVLRVQLGGKDGGIIHQEFAEASIPPSLMVGTSDALFDYIAAELAKFVAAEEEKFHQPPGKQRELGFHLLIPSNADFNNSGTIMRWTKGFSIDDAVGQDVVGELTKAMKEKVLDMRVSALVNDTVGTLAGGKYTQKDVAVAVILGTGTNAAYVERVQAIPKWHGPVPKSGEMVINMEWGNFRSSHLPLTEYDHALDNESLNPAEQIFEKMTSGMYLGEILRRVLTRVAEEVLAFLAMRSLQSLKDSFVLRTPDMSAMHHDTSPDLKVVGEKLKDILEISNTSLKTRKLVLSLCNIVATRGARLDAAGVLGILKKMGRDTPKQGGSERTVIAMDGGLYEHYTEYRMCLENSLKDLLGEELATSIVFVHSNDGSGIGAALLRASHSMYLEDQA

SEQ ID NO: 36682 - protein, 401 aa, Fritillaria agrestis
MDYVYGPGRNHLFVPGPVNIPEPVIRAMNRNNEDYRAPAIPALTKTLLEDVKKLFKTTTGTPFIIPTTGTGAWESALTNTLSPGDTIVSFLIGQFSLLWIDQQQRLKFKVDVIESEWGQGANLDELASKLAADRTHTIKAVCIVHNETATGVTNNLAAVRKLLDDYNHPALLLVDGVSSICALDFRMDEWGIDVALTGSQKALSMPTGMGFICASPKALEASKTAQSARVFFDWNDYLKFYKIGTYWPYTPSIQMLYGLRAALDLIFEEGLDNVIARHSRLGKATRLAVEAWGLKNCTQKEEWHSDTVTAVVVPPYIDSSEIVRRAWKRYNLSLGLGLNKVAGKVFRIGHLGNLNELQLLGCLSGVEMVLKDVGYPVKLGSGVAAAATYLQNSTPMIPSRI

SEQ ID NO: 36683 - protein, 474 aa, Synechocystis sp. PCC 6803
MSQDFDYDLVIIGAGVGGHGAALHAVKCGLKTAIIEAKDMGGTCVNRGCIPSKALLAASGRVREMSDQDHLQQLGIQINGVTFTREAIAAHANDLVSKIQSDLTNSLTRLKVDTIRGWGKVSGPQEVTVIGDNETRILKAKEIMLCPGSVPFVPPGIEIDHKTVFTSDEAVKLETLPQWIAIIGSGYIGLEFSDVYTALGCEVTMIEALPDLMPGFDPEIAKIAERVLIKSRDIETYTGVFATKIKAGSPVEIELTDAKTKEVIDTLEVDACLVATGRIPATKNLGLETVGVETDRRGFIEVNDQMQVIKDGKPVPHLWAVGDATGKMMLAHAASGQGVVAVENICGRKTEVDYRAIPAAAFTHPEISYVGLTEAQAKELGEKEGFVVSTAKTYFKGNSKALAEKETDGIAKVVYRQDTGELLGAHIIGIHASDLIQEAAQAIADRKSVRELAFHVHAHPTLSEVLDEAYKRAV

SEQ ID NO: 36684 - protein, 629 aa, Haemophilus influenzae R2866
MEKNQQSTAEQYSEQIEQLMELGRTQGYLTFAEINDLLPEDAIDPEYYDKLLQTLQNDAGIPVLDEAPESDDMMLSDTIPDEDAVEEATQILSNVESEIGRTTDPVRMYMREMGTVDLLTREDEISIAKRIEGGIDEVQTSIAAYPEALNGLLKNYDDVEKGNFRLTDLITGFVDPNAEIEEHNGLDEDFSDEDDEEESSNADVEDNEDEEDNESESTSDSSDSDNSIDPEVAREKFQQLREQHSKTLAVIEKHGRSGKRAQDQIALLGEIFKQFRLVPKQFDLLVLSMKEMMKRVRYQERQLQKILVDIAGMPKDDFEKIITTNGSNSEWVAKALKSSKPWAKRLIKYEDRIYEALNNLAITEENTKLTITQMRDICDAVARGEQKARRAKKEMVEANLRLVISIAKKYTNRGLQFLDLIQEGNIGLMKAVDKFEYRRGYKFSTYATWWIRQAITRSIADQARTIRIPVHMIETINKLNRISRQLLQEMGREATPEELAERMGMPEDKIRKVLKIAKEPISMETPIGDDDDSHLGDFIEDSTLELPLDSATAQSLKVATHEVLEGLTPREAKVLRMRFGIDMNTDHTLEEVGKQFDVTRERIRQIEAKALRKLRHPSRSETLRSFLDE

SEQ ID NO: 36685 - protein, 592 aa, GIBBERELLA ZEAE PH-1
MNAMYVYPSATPKPPESVLTSQISPKSIVGDACASYSTLDKLNLHTKPAIDDLTQNTDFFSHYRVNLFHKKCPFWDDENGMCGNIGCAVETLDNEEDIPEIWRAHALGKLEGPRAKHPGKKAQRQHPQRPLGGLLGENVGESCVFEYDDECDERDYCVPEDESASSKGDYVSLVRNPERFTGYAGDGAKQVWDAVYRENCFQKSSFPKSADLGQSGWQHGPAAQDFKQILDAAGRQAQLEERRQENPNTPFVANTGFEVEDECLEKRVFYRVMSGMHASISTHLCWDFLNQTTGQWSPNLSCYEHRLHKFPDRIGNVYFNYALMTRAIAKLSPYLQKEEYKFCLGDPSEDAATRAKVLEVTEKAASVPQIFDESLMFVNGEGPSLKEDFRNRFRNVSRLMDCVGCDKCRLWGKLQTAGYGTALKILFELDNNNEDVPHLQRTEIVALFNTYARISSSLHNIGEFRKMMEAKVENEKVAKEFDEATEKGRLRAKLEAEAAENDQIDDAMREFIELRAKGPEEESMMGHLEHEFAQFKAVLRIILNGWMRTPKTLWAIFKYETWRLFRLWVGLPVGPRVWTFGLPNVDLGKDEL

SEQ ID NO: 36686 - protein, 131 aa, Deinococcus radiodurans R1
MAKPTKGKAPRRSRRNISAGRAYVHASYNNTIVTITDLDGNSVAWSSGGTIGYKGSKKGTPYAAQLAAADAVKKAQTSFGMAAVDVIVRGSGSGREQAIRAIQASGIEVRSIMDDSPVPHNGCRPKKKFRA

SEQ ID NO: 36687 - protein, 432 aa, Bacillus thuringiensis serovar konkukian str. 97-27
MNVTTDVQSTTGETKEKRYKTLFGSALGYAAEGLDMLLLSFVLVYILKEFHLSPVEGGNLTLATTIGMLIGSYLFGFIADLFGRIRTMAFTILLFSLATALIYFATDYWQLLILRFLVGMGVGGEFGIGMAIVTETWSKEMRAKATSVVALGWQFGILVASLLPAFIVPHFGWRAVFLFGLIPALLAVYVRKSLSEPKIWEQKQRYKKELLQKESEGNLTTTEAEQLKQMKKFPLRKLFANKKVTITTIGLIIMSFIQNFGYYGIFTWMPTILANKYNYTLAKASGWMFISTIGMLIGIATFGILADKIGRRKTFTIYYVGGTIYCLIYFFLFTDSTLLLWGSALLGFFANGMMGGFGAVLAENYPAEARSTAENFIFGTGRGLAGFGPVIIGLLAAGGNLMGALSLIFIIYPIGLVTMLLCVPETKDKVLE

SEQ ID NO: 36688 - protein, 477 aa, Wolbachia endosymbiont strain TRS of Brugia malayi
MIQSILRLLYITAVLTRYNISPYLLSPSRKSINRIRGYKLRCAFEKLGPVFIKFGQSISSRTDILNEDITNNLLLICDKLPSFSHKIAVKTIESEFNCKLSDIFSSFSEKPIAAASISQAHKATTTEGKEVAVKILRPNIEKTFSKDIKMLFWLAGIVEKFSKQSRRLKPIELVETFAEICRLELDLRFEAAHSSELRENTKNDRGFYVPEVDWSRTSKRVLTLEWIGATPVYEVEKLNNHKQIAINLIESFCNQVYRDCFFHADMHPGNLMIDSNNSIVALDCGIMGRIDRETCYYVIEILKGFLNRDYDRVAKVHFRAGYVSPQHKSFVTACRAIGEPIIGQPIQKISFASLLAQLLKITGDFDMKVQTQLLLLQKTMILLEGTCRKIYPEINVWKVVEAWTENQHKNKISYKERIKSSYPVKTIQEIFNLIEKLNLIANQKLENIQIKDRSNGKIYFLLWSMVIALIVKLLIFL

SEQ ID NO: 36689 - protein, 204 aa, Carboxydothermus hydrogenoformans Z-2901
MLEKIIARYEKESGEGLSCGNNIAVGSLKPGMIVLDLGCGNGGETIRAAQIVAPGFAVGLDITEKLLEKGQKKAREQGVKNVVFIKGEIENLPFVGESFDVVISNCALNHARDKLKVYREIYRVLKEDGYFIVSDPVSLVELPPEIKNNEELWAQCFAGAEEESKYLRYIIEAGFTLEILKRREYEKNGYPFASLTIKGTKKRR

SEQ ID NO: 36690 - protein, 96 aa, Haemophilus influenzae R2866
MNIRPLHDRVIIKREEVETRSAGGIVLTGSAATKSTRAKVLAVGKGRILENGTVQPLDVKVGDTVIFNDGYGVKSEKIDGEEVLIISENDILAIVE

SEQ ID NO: 36691 - protein, 138 aa, Streptococcus agalactiae A909
MEQTFFMIKPDGVKRGFIGEVISRIERRGFSIDRLEVRYADADILKRHYAELTDRPFFPTLVDYMTSGPVIIGVISGEEVISTWRTMMGSTNPKDALPGTIRGDFAQAPSPNQATCNIVHGSDSPESATREIAIWFNN

SEQ ID NO: 36692 - protein, 548 aa, Haemophilus influenzae R2866
MAAKDVKFGNDARVKMLKGVNVLADAVKVTLGPKGRNVILDKSFGAPTITKDGVSVAREIELEDKFENMGAQMVKEVASKANDAAGDGTTTATVLAQAIVNEGLKAVAAGMNPMDLKRGIDKAVSAVVSELKNLSKPCETAKEIEQVGTISANSDSIVGQLISQAMEKVGKEGVITVEDGTGLEDELDVVEGMQFDRGYLSPYFINKPETATVELDNPYLLLVDKKISNIRELLPVLEGVAKAGKPLLIIAEDVEGEALATLVVNTMRGIVKVAAVKAPGFGDRRKAMLQDIAILTAGTVISEEIGMELEKATLEDLGQAKRVVINKDNTTIIDGIGDEAQIKGRVAQIRQQIEESTSDYDKEKLQERVAKLAGGVAVIKVGAATEVEMKEKKDRVDDALHATRAAVEEGIVAGGGVALVRAAAKVAASLKGDNEEQNVGIKLALRAMEAPLRQIVTNAGEEASVVASAVKNGEGNFGYNAGTEQYGDMIEMGILDPTKVTRSALQFAASVAGLMITTECMVTDLPKDDKADLGAAGMGGMGGMGGMM

SEQ ID NO: 36693 - protein, 445 aa, Saccharomyces cerevisiae
LDAFGDDQAISKPNTVVIQQPQNEPVLVLSSLSQSPCVSSSSSLSTPCIIDAYSNNFGLSPSSTNSTPSTIQGLSNIATPVENEHSISLPPLEESLSPAAADLKDTLSGTSNGNYIQLQDLVQLGKIGAGNSGTVVKALHVPDSKIVAKKTIPVEQNNSTIINQLVRELSIVKNVKPHENIITFYGAYYNQHINNEIIILMEYSDCGSLDKILSVYKRFVQRGTVSSKKTWFNELTISKIAYGVLNGLDHLYRQYKIIHRDIKPSNVLINSKGQIKLCDFGVSKKLINSIADTFVGTSTYMSPERIQGNVYSIKGDVWSLGLMIIELVTGEFPLGGHNDTPDGILDLLQRIVNEPSPRLPKDRIYSKEMTDFVNRCCIKNERERSSIHELLHHDLIMKYVSPSKDDKFRHWCRKIKSKIKEDKRIKREALDRAKLEKKQSERSTH

SEQ ID NO: 36694 - protein, 139 aa, Wolbachia endosymbiont strain TRS of Brugia malayi
MAIERTLSILKPDTVKNNIIGNINSYIEKSGLRIIAQKMMLLTKKQAELFYAIHKDRPFFGGLVEFMTSGPVIVQVLVGENAISKYRQIMGATDPKQADKGTIRGDFADDVNENRVHGSDSLENAHKEIAFFFAECELV

SEQ ID NO: 36695 - protein, 249 aa, Triticum aestivum
  misc_feature (118)..(118): Xaa can be any naturally occurring amino acid
  unsure (1)..(249): unsure at all Xaa locations
RPLRTLVEKWDDHSKDEFCSEQVKILFYAIYTTVNQLGVVASAIQNRDVRKHLIELWLQLLRSMMSEAEWRMRKYVPTVEQYMSNAVVSFTLGPIVLTSLYFVGPKLSGCVIQDQEYXELFRLTSTIGRLLNDIQGLERESREGNLDCVSLLILHSGGSMSIETAKETIQKAIASCRKDLLKLVLRENTVVPRPCKELFWKMCKIVHLFYSQTDGFSSPNEMVSAVNAVINEPLKLQINNRPLPMQSVN

SEQ ID NO: 36696 - protein, 184 aa, Prochlorococcus marinus str. MIT 9312
MKFFFSIITSVFLFLGITPIALAANGPALNADRASTEYTASALNKCSENPKFIERASSATTQKDIARFERYGKASCGDDGLPHLILGAPLEPWGALLNRGHEGDLLIPGTIFIYIAGIIGWSGREYLIESKKTKNPADMEIFIDFALAQKCLIKGAQWPLLANKQGRSGELRESDKNITLNGPR

SEQ ID NO: 36697 - protein, 411 aa, Xylella fastidiosa Ann-1
MNRRVVVTGMGMVSPLGNDLTTSWDGIVHGRSGIAPIVQIDASKFPTQIAGEIKGFDPMKFVSAKDAKKMDSFIYYGIGAAFMALDDAGLEINEINAERVGALIGSGIGGVFGIEEQTIKLYEGGARKISPFYVPATIINMLPGQLSVLKGLKGPTFSAVSACATSNHSIGMAMRMIQYGDADVMLAGGSERASSPTAIGGFCAMRAMSTRNDDPTGASRPWDKGRDGFVLGDGAGILVLEEYEYAKARGARIYAELAGFGATSDAFHMTMPVEDGEGAARCMRIALQDAKVTPEQIDYLNAHGTSTPLGDLCETNAIKTVLGDHAYKVMVSSTKSMTGHLLGAAGGVEAIFSVMALHTGIVPPTINLEEPDEGCDLDYVPHVAREAKLDVVVSNGFGFGGTNGTLVFKRI

SEQ ID NO: 36698 - protein, 161 aa, Zea mays
MAGKSHTRKAFLLCNYVLMGAASSCIFLTLSLRLLPSPCGLLLLFLHALTAVFSAAGCSGSFTAPATPAQWHNAHTAGAALTAIFQGAVALLAFTRTSDFLAELQSYVRDEDGAVILKMVGGLGTAIFVLEWAALALAFSLRLDDDDDDDLQAKNWQQYHV

SEQ ID NO: 36699 - protein, 504 aa, Burkholderia sp. 383
MRKLLMSLLMAGSLIAAGVGSALADDAASAAAASAPAAMASDASAAAAPAASAPAATDASATAAAAAPASGATDASAAAAASAPAAPAAPTEPFTVDSSKISAGDTAWMLTSTALVLFMTIPGLALFYAGMVRKKNVLATVMQSFAITAVITVLWTVVGYSLAFTPGNGFIGGLSRAFLHGMTYVKGDKATTLTVSHLATTIPESVYFVYQMTFAIITPALICGAFADRMKFSAMLVFMTLWSLIVYVPIAHMVWEPTGWLSSDGVLDFAGGTVVHINAGIAGLVSCLMLGKRIGFGRESMAPHNLVLTMIGGSMLWVGWFGFNAGSAVAADGRAGFAMLTTQVATACAALGWMFAEWISHGKPSVLGIVSGAVAGLVAITPAAGFVGVTGALVIGIAAGVVCFWSATWLKSKLGYDDSLDAFGVHGVGGILGALLTGVFAVKDIGGADGSLLLQAKGVLITLVYSGVLSFVLLKLIDLTIGLRVSEEEEREGLDVVLHGEHVE

SEQ ID NO: 36700 - protein, 220 aa, Arabidopsis thaliana
MGRRPARCYRQIKGKPYPKSRYCRGVPDPKIRIYDVGMKRKGVDEFPFCVHLVSWEKENVSSEALEAARIACNKYMVKSAGKDAFHLRIRVHPSHVLRINKMLSCAGADRLQTGMRGAFGKALGTCARVAIGQVLLSVRCKDAHGHHAQEALRRAKFKFPGRQKIIVSRKWGFTKFNRADFTKLRQEKRVVPDGVNAKFLSCHGPLANRQPGSAFLPAHY

SEQ ID NO: 36701 - protein, 447 aa, Mesorhizobium sp. BNC1
MNIKSTATSLFLILQFAAGHALAETATLDALIDQKYPALEAIYQDIHANPELGFHETRTANLLAEELEKLGFDVTVGFGVDSGLVGVFKNGDGPTIMLRTELDALPMEEKTGLPFASRVQVPATQWPGNTDESAKVFVAHSCGHDIHMAAWLGAAQLLVDMKDDWRGTLLLIGEPAEEIGGGATAMLKAGLFEKFPKPDFGFAIHVSPDPAGKIVVKDGPFSGNSDTFDLTFKGRGAHGSAPHLSIDPIVLGSRFVTDIQTIVSREKDPREPGVISVGSFNAGTAANIIPAEAKLKLTLRSTSPETRKLLLDSMQRVAKATAQSSGAPEPELQRIGGGAVAGVNSTELISKLKPALDSAFQNIEYVPEAVKPTLGVETYPEFIEAGVPSIYYRVGGSTPEQIEKAKLENRPVPASHSPFFAPDPEVTIKTGAKLFAISVIENAGVNE

SEQ ID NO: 36702 - protein, 989 aa, Prochlorococcus marinus str. MIT 9312
MESFQQIKNNKVDLISTNDPLDKNRLLIEDLWESVLREECPDDQAERLIQLKELSYSKQIEGDSSKTFKKEIVDIVNSMDLAESIAAARAFSLYFQLVNILEQRVEEDRYIQSFTNKNVQKSPDNLDPFAPALARQNAPVTFRELFYRLRKLNVPPGKLEELLQEMDIRLVFTAHPTEIVRHTIRHKQTRVANLLKKIQVEQFLTKEEKNFLKIQLKEEVRLWWRTDELHQFKPSVLDEVDYALHYFQQVLFNAMPQLRGRIAEALTENYPDVQLPSQSFCNFGSWVGSDRDGNPSVTPEITWRTACYQRQLMLERYITATSHLRDQLSVSMQWSQVSSSLLESLETDRVKFPAIYEARATRYRSEPYRLKLSYILEKLRLTQERNNLLADNGWKFDLEGELNTKNIDKVENLYYKSVNEFTYDLELIKNSLISTDLTCEAVNTLLTQVHIFGFSLASLDIRQESTRHSDAIQELTKYLDLSVQYDQMSEDEKIKWLVDELNTKRPLIPSDVKWTNTTEETFSVFKMVKRLQQEFGSRICHAYVISMSHSASDLLEVLLLAKEMGLLDQNSKNSNLLVVPLFETVEDLKRAPEVMEKLFKLDFYKSLLPKVGESFKPLQELMLGYSDSNKDSGFVSSNWEIHRAQIALQNLASRNNILLRLFHGRGGSVGRGGGPAYQAILAQPSGTLKGRIKITEQGEVLASKYSLPELALYNLETVTTAVIQNSLVNNRLDATPEWNQLMSRLAETSRSHYRKLVYENPDLLNFFQEVTPIEEISKLQISSRPARRKKGAKDLSSLRAIPWVFGWTQSRFLLPSWFGVGTALSSELNSDPQQIELLRVLHQRWPFFRMLISKVEMTLSKVDLEVAKYYVDTLGSEENKDSFDDIFEVISKEYSLTKSLVLEITGKNKLLESDRDLKSSVSLRNKTIIPLGFLQVSLLRRLRDQTRQPPISEFLIDKDESRRAYSRSELLRGALLTINGIAAGMRNTG

SEQ ID NO: 36703 - protein, 692 aa, Triticum aestivum
  misc_feature (285)..(285): Xaa can be any naturally occurring amino acid
  misc_feature (352)..(352): Xaa can be any naturally occurring amino acid
  unsure (1)..(692): unsure at all Xaa locations
MAGAAPSEEALRRALAERQTAVDAQADAVRSLKASGAKEGVDAAVEALKALKIEAGAAARRLQAAVGSGGGAAREEMRQTVVNTLERKLFYIPSFKIYRGVAGLYDYGPPGCAVKSNVLAFWRQHFVLEENMLEVDCPCVTPEVVLKASGHVEKFTDLMVKDEKTGTCYRADHLLKDFCKDKLEKDLTLSPETAAEFKRVLAVLDDLSPEELGAKIKEYGIVAPDTKNPLSAPYPFNLMFQTSIGPTGLSVGYMRPETAQGIFVNFKDLYYYNGQKLPFAAAQIXGQAFRNEISPRQGLLRVREFTLAEIEHFVDPEDKSHPKFVDVADLEFLMFPRELQLSGESAKLTKLXKAVSKGTVNNETLGYFIGRVYLFLTRLGIDKSRLRFRQHLPNEMAHYAADCWDAEIECSYGWIECVGIADRSAYDLKAHSEKSGVPLVAHEKFSKPREVEKLFIVPSKKDLGLAFKGNQKMVVEALEAMSEKEAMDMKTALESKGETNFQVCTLGKDVVITKKMVSISMEKKLEHQRVFTPSVVEPSFGIGRIIYCLFEHSFYTRPSKSEEEQLNVFRFPPIVAPIKCTVFPLVKNQEFDGAAKVLAKELTAAGISHIIDTTGISIGRRYARTDEIGVPFAVTVDSATEVTIRERDSKQQVRVGIDEVASVVKELTEGQSTWTDISFKYPSHIGPQGDQE

SEQ ID NO: 36704 - protein, 207 aa, Mesembryanthemum crystallinum
MASRRRKLLKIIILGDSGVGKTSLMNQFVNKKFSNQYKATIGADFLTKELQFEDRLFTLQIWDTAGQERFQSLGVAFYRGADCCVLTYDVNVMKSFESLNRWREEFLIQASPADPDNFPFVLLGNKIDVDGGSGRVVSEKKAKAWCMSKGNIPYFETSAKDGTNVEEAFQCIAKNAIQNEPEEETYLPDTIDMAGSTRPQSSSACEC

SEQ ID NO: 36705 - protein, 213 aa, Nymphaea sp. EMK-2003
KRRSGLLKKAYELSVLCDAEVALIIFSSRGRLYEYANNSVKATIDRYKKACDSSNSGTVTEANAQYYQHESHKLRQQISKIQQDNRQMLGEGISEMSHRDLKNLESKLERSISKIRSKKNDLLNAEIQYMKKRDDDLQKENIYLRARINENERAHQQQQQQQHVTVMTGGPSSEYEVLPMTFQHVNLLEPSHHQHHHHHHYSAHQERTALQLG

SEQ ID NO: 36706 - protein, 224 aa, Nymphaea sp. EMK-2003
MGRGKIEIKRIENTTNRQVTFCKRRSGLLKKAYELSVLCDAEVALIVFSSRGRLYEYANNSVRGTIERYKKAYAESSSSGAVAETNAQYYQHEAHKLRQQISKIQQDNRQMLGEGVSEMSLRDLKSLENKLERSISKIRGKKNDLLNGEIQYMQNWNEDLQKENTFLRAKVCENERAQQQHISILAAGPAEYELPPAVPFQHINLMESSHHQYSHQERTALQLG

SEQ ID NO: 36707 - protein, 85 aa, Selaginella moellendorffii
EVVSLSPKTLMESDRYICEICNQGFQRDQNLQMHRRRHKVPWKLLKRATPEVRKRVYVCPEPSCLHHDPCHALGDLVGIKKHFRR

SEQ ID NO: 36708 - protein, 547 aa, Xylella fastidiosa 9a5c
MAAKEIIFSEKARSRMVHGVNLLANAVKATLGPKGRHVVLDKSFGSPIITKDGVSVAKEIELADKFENMGAQMLKEVASKTNDHAGDGTTTATVLAQALIREGCKAVAAGMNPMDLKRGIDKAVIAAVTELKKISKPTSDDKAIAQVATISANSDESIGNIIAEAMKKVGKEGVITIEEGTTLENELDVVEGMQFDRGYSSPYFINNQQSQIVELDNPYILLHDKKISSVRDLLTVLDAVAKESKPLLIVAEEVEGEALATLVVNNIRGIIKVCAVKAPGFGDRRKAMLEDMAVLTGGTVISEEVGLSLEKATTSHLGKAKKVRVSKENTTIIDGIGDNDAINGRVKQIKTQIEETTSDYDREKLQERVAKLAGGVAVIKVGAATEVEMKEKKARVDDALLATRAAVEEGVIPGGGVALIRAITAISNLKGANEDQTHGIQIALRAMEAPLREIVANAGEEPSVILNKVKEGKDNFGYNAATGEFGDMVNLGILDPTKVTRSALQNAASIAGLMITTEAMVAEAPKKDEPTPPAAGGGMGGMGGMDF

SEQ ID NO: 36709 - protein, 217 aa, Meliosma dilleniifolia
KRRNGLLEKAYELSVLCDAEIGLIVFSSRGRLYEYSNNSIKSTIERYKKACTNSSSTTTIVETSAQYYQQEAVKLRQQIQILQNANRHLMGESLGSLSIKELKQLENRLERGITRIRSKKYELLFAEIEYMQKREVELQNDNLYLRTKISENERPQQTMMVPEPGFDAIQTYNSQKQDFEQEIQTYDARNNYLQATNMLEGGPTTYSHPDQTALHLG

SEQ ID NO: 36710 - protein, 204 aa, Berberis gilgiana
KRRNGLLKKAYELSVLCDAEVALIVFSARGRLYEYANNSVKTTIERYKKACSDSTNTGSVSEANAQFYQQEATRMRQQIGNLQNANRHLLGQDLSSVSVKDLKQMETRLEKGISRIRSKKNELLFAEIEYMQKREIDLQNDNMYLRAKIAENERAQQQMNLMPGNEYETITSAPYDSRNFLQVNLLPESNNQYSRSDQTALQLG

SEQ ID NO: 36711 - protein, 338 aa, Bacillus thuringiensis serovar konkukian str. 97-27
MAILITGGAGYIGSHTCVELLNNNYKIIVVDNLSNSSIESLNRVKEITGKQFEFYKENVLNREKMNEIFLENNIEAVIHFAGFKAVGESTTTPLAYYYNNIISAIVLCDVMQKHNVKNFIFSSSATVYGIPKTSPITEEFPLSVTNPYGQTKLMIEQIMRDVAKADDEWSIALLRYFNPFGAHQSGRIGEDPNGIPNNLMPYVTQVAVGKLKELNIFGNDYPTKDGTGVRDYIHVVDLAKGHVKALEKVLKTKGIEAYNLGTGKGYSVLEMVKAFEKVSGKKIPYKVIGRRPGDVAICFADVSKAKRELGWEAEYGLEEMCVDSWRWQVNNKNGYQMI

SEQ ID NO: 36712 - protein, 449 aa, Desulfotalea psychrophila LSv54
MDPIIQQLHAKDQDQHEFHQAVEEVLESVKPVLDRNLWYRQQGVWERLIEPERVIMFRVPWVDDEGNVRVNRGFRVEMNSALGPYKGGLRFHPSVNLSIIKFLAFEQTFKNSLTTLPMGGGKGGSDFNPKGCSDFEVMRFCHSFMLELYRHIGPNTDVPAGDIGVGAREIGYLFGMYKKIKNEFTGVLTGKSLGWGGSLIRPEATGYGNVYFASEMLTTRDQTIEGKSCLVSGSGNVAQFTIEKILDLGGKVHTISDSDGYIYDEEGIDCDKLGWIKQLKNIRRGRVAEYVETYPQAVYTPIDPTLGYNPLWDHSADCAFPSATQNEINEQDAKNLVKNGVFLISEGANMPSSPEAVAVFHDANCLYGPSKAANAGGVAVSGLEMSQNTIRMSWPREEVDTRLKQIMHSIHSTCVDAASEYNYGQNYVAGANIAGFVKVVNAMLDQGVV

SEQ ID NO: 36713 - protein, 202 aa, Akebia quinata
RRNGLLKKAYELSVLCDAEVALVVFSNRGRLYEYANNSVKTTIERYKKACIDSSNSGSVSEANAQFYQQESLKLRQQIGNLQNLNRHLMGEALGSMSIKELKQLETRIEKGISRIRSKKNELLFAEIEYMQKREIDLQNDNMYLRAKIAENERAGQHMSLMPGNEYEVMSSAPFDSRNFLQVNLLEPNNHYSHTDQIALQLG

SEQ ID NO: 36714 - protein, 409 aa, Bradyrhizobium japonicum USDA 110
MDYSQFFNSALDRLHTERRYRVFADLERMAGRFPHAIWHSPKGKRDVVIWCSNDYLGMGQHPKVVGAMVETATRVGTGAGGTRNIAGTHHPLVQLEAELADLHGKEAALLFTSGYVSNQTGIATIAKLIPNCLILSDELNHNSMIEGIRQSGCERQVFRHNDLADLEALLKAAGANRPKLIACESLYSMDGDVAPLAKICDLAEKYNAMTYVDEVHAVGMYGPRGGGIAERDGVMHRIDILEGTLAKAFGCLGGYIAANGQIIDAVRSYAPGFIFTTALPPAICSAATAAIKHLKTSSWERERHQDRAARVKAILNAAGLPVMSSDTHIVPLFIGDAEKCKQASDLLLEEHGIYIQPINYPTVAKGSERLRITPSPYHDDGLIDQLAEALLQVWDRLGLPLKQKSLAAE

SEQ ID NO: 36715 - protein, 337 aa, Podospora anserina
MTVKVGINGFGRIGRIVFRNAVEHPDVEIVAVNDPFIEPKYAEYMLKYDSTHGVFKGTIQVSGSDLIVNGKTVKFYTERDPSAIPWKDTGAEYIVESTGVFTTTEKASAHLKGGAKRVIISAPSADAPMYVMGVNEKTYDGKAAVISNASCTTNCLAPLAKVVNDKFGIVEGLMTTVHSYTATQKTVDGPSAKDWRGGRGAAQNIIPSSTGAAKAVGKVIPELNGKLTGMAFRVPTSNVSVVDLTCRLEKPASYETIKAALKEASEGELKGILGYTEDEIVSSDLNGNANSSIFDAKAGISLNDNFVKLVSWYDNEWGYSRRVLDLLSYVAKYDASH

SEQ ID NO: 36716 - protein, 598 aa, Klebsiella oxytoca
MITISSLSHSAKSADSYAYNKETLHIRFRTVKGEVAKVSLWIGDPYQWEEGGLDGGNLGGSDAHGWSGGNEVHMEKEGQSESYDHWFAAFTPCKRRSRYGFILYGNNGEKLLFGERRCVDISKPPVAETELSNLSNFFCFPYINPGDVLSTPEWVKKTIWYQIFPERFCNGDPSISPENVQPWGTPPDSKNFMGGDLQGIINKLDYLQDLGVNGLYLCPIFTANASHKYDTVDYFNVDPHFGGNDRFKELVQKAHQRGMKVMLDAVFNHIGNQSPLWLDVVKNGDKSPYADWFWIKKFPVYPSGDKNEWDFRNFNYETFGNVIEMPKLNTENPACRDYLLQVARYWIEEFDIDGWRLDVANEVDHEFWRAFRRTVKSIKPDCYILGEIWHEGMPWLRGDQFDSLMNYPLMQATTDYFALQAYDKKTFIDIVTHAYLCYPRNVNEVMFNLLESHDTSRLLSLCGNDKRKARLAYLFMFSQVGSPCIYYGSEVGMNGSRAMGSEDNRKCMIWDEQKQDLEFKSFIKDLILWRKKHSEWNDPKIHWNNVDHPAVVAFSRGEVHFLLNNSDESLAINYQGRTLSLTPFGFYIIGLDHKDIIS

SEQ ID NO: 36717 - protein, 130 aa, Brassica napus
  misc_feature (2)..(2): Xaa can be any naturally occurring amino acid
  misc_feature (6)..(6): Xaa can be any naturally occurring amino acid
  misc_feature (9)..(9): Xaa can be any naturally occurring amino acid
  misc_feature (14)..(14): Xaa can be any naturally occurring amino acid
  misc_feature (17)..(17): Xaa can be any naturally occurring amino acid
  misc_feature (20)..(20): Xaa can be any naturally occurring amino acid
  misc_feature (26)..(26): Xaa can be any naturally occurring amino acid
  misc_feature (29)..(29): Xaa can be any naturally occurring amino acid
  misc_feature (67)..(67): Xaa can be any naturally occurring amino acid
  misc_feature (82)..(82): Xaa can be any naturally occurring amino acid
  unsure (1)..(130): unsure at all Xaa locations
GXMELXQNXLLPVXRQXVTXEPELKXVQXSEDDEFIVLACDGIWDCMSSQEVVDFVHKQLKTEDKIXSVCEKLLNRCVAPTXGGEGCDNMTVIVVQFKKPALAVATSSAEQATAEGMRPNEVDGPDYPPK

SEQ ID NO: 36718 - protein, 212 aa, Zea mays
MKRFAVQESEMARMLVLMSRSHGQDQALPLSACLAGGQQGEDRQAPERVFVCKTCNRVFPSFQALGGHRASHKKPRLDGDGGGDPSLAKPKLHGCSVCGLEFAIGQALGGHMRRHRAMTGGVPAVPPATTRIVVDEKPDGDVVGIIRHDHVHDHGGVKQPRGGLWLDLNYPPCDDGRDAVEAECGRNAAAATGITFHQFLDTATMAVDCLGY

SEQ ID NO: 36719 - protein, 456 aa, Candida albicans SC5314
MVLPHEPEFQQAYDELVSAVEDSTLFKEEPQYKKVIPVVSIPERIIQFRVTWENDKGEIEVNNGFRVQYNSALGPYKGGLRFHPTVNLSILKFLGFEQIFKNALTGLSMGGGKGGSDFNPKNRSDNEIRRFCVSFMRQLARYIGPDTDVPAGDIGVGGREVGFLFGAYKQMRNNWAGVLTGKGLTWGGSLIRPEATGYGCVYYVEKMIEKATNGKETFKGKRVAISGSGNVAQYAALKVIELGGTVVSLSDSKGSIISKNGITADQVYAIAAAKLKFKSLEEIVADSVQLFSGDHSVEYLAGVRPWTKVGQVDVALPSATQNEVSGEEAKALVDAGCKFIAEGSNMGSTKEAIEVFEANRDSNGVWYAPGKAANCGGVAVSGLEMAQNSQRVQWTNEEVDAKLKEIMYTCFENCYKTAQKYSIEKNENGLPSLLKGANIAGFIKVADAMFDQGDVF

SEQ ID NO: 36720 - protein, 492 aa, Arabidopsis thaliana
MDPYRVRPSSAHDSPFFTTNSGAPVWNNNSSLTVGTRGPILLEDYHLLEKLANFDRERIPERVVHARGASAKGFFEVTHDITQLTSADFLRGPGVQTPVIVRFSTVIHERGSPETLRDPRGFAVKFYTREGNFDLVGNNFPVFFVRDGMKFPDMVHALKPNPKSHIQENWRILDFFSHHPESLHMFSFLFDDLGIPQDYRHMEGAGVNTYMLINKAGKAHYVKFHWKPTCGIKCLSDEEAIRVGGANHSHATKDLYDSIAAGNYPQWNLFVQVMDPAHEDKFDFDPLDVTKIWPEDILPLQPVGRLVLNKNIDNFFNENEQIAFCPALVVPGIHYSDDKLLQTRIFSYADSQRHRLGPNYLQLPVNAPKCAHHNNHHDGFMNFMHRDEEVNYFPSRLDPVRHAEKYPTTPIVCSGNREKCFIRKENNFKQPGERYRSWDSDRQERFVKRFVEALSEPRVTHEIRSIWISYWSQADKSLGQKLATRLNVRPNF

SEQ ID NO: 36721 - protein, 554 aa, Arabidopsis thaliana
MYIKAIMNRHRLLSAATDECNKKLGQACSSSLSPVHNFLNVQPEHRKTPFIRSQSPDSPGQLWPKNSSQSTFSRSSTFCTNLYLSSSSTSETQKHLGNSLPFLPDPSSYTHSASGVESARSPSIFTEDLGNQCDGGNSGSLLKDFLNLSGDACSDGDFHDFGCSNDSYCLSDQMELQFLSDELELAITDRAETPRLDEIYETPLASNPVTRLSPSQSCVPGAMSVDVVSSHPSPGSAANQKSRMRWTPELHESFVKAVIKLEGPEKATPKAVKKLMNVEGLTIYHVKSHLQKYRLAKYMPEKKEEKRTDNSEEKKLALSKSEADEKKKGAIQLTEALRMQMEVQKQLHEQLEVQRVLQLRIEEHAKYLEKMLEEQRKTGRWISSSSQTVLSPSDDSIPDSQNMSKTKASSPQPPLPAENKASETEDDKCESPQKRRRLENIAESEDPKRSLSETCKLITDIEDVTAFTVRKESLILCLCVYRSLTFMHTITYGKQNNLSKILHSHQSSLSLSLGKVKIKGFVVALTGLDSLGGVFCKKVVCFDLLCYNGENFSE

SEQ ID NO: 36722 - protein, 470 aa, Arabidopsis thaliana
MADGNTRFTVDEALVAMGFGKFQIYVLAYAGMGWVAEAMEMMLLSFVGPAVQSLWNLSARQESLITSVVFAGMLIGAYSWGIVSDKHGRRKGFIITAVVTFVAGFLSAFSPNYMWLIILRCLVGLGLGGGPVLASWYLEFIPAPSRGTWMVVFSAFWTVGTIFEASLAWLVMPRLGWRWLLAFSSVPSSLLLLFYRWTSESPRYLILQGRKAEALAILEKIARMNKTQLPPGVLSSELETELEENKEPGFSLLALLSPTLMKRTLLLWVVFFGNAFAYYGVVLLTTELNNSHNRCYPTEKQLRNSNDVNYRDVFIASFAEFPGLLISAAMVDRLGRKASMASMLFTCCIFLLPLLSHQSPFITTVLLFGGRICISAAFTVVYIYAPEIYPTAVRTTGVGVGSSVGRIGGILCPLVAVGLVHGCHQTIAVLLFEVVILVSGICVCLFPFETSGRDLTDSISASKEPPSASV

SEQ ID NO: 36723 - protein, 273 aa, Arabidopsis thaliana
MALEAMNTPTSSFTRIETKEDLMNDAVFIEPWLKRKRSKRQRSHSPSSSSSSPPRSRPKSQNQDLTEEEYLALCLLMLAKDQPSQTRFHQQSQSLTPPPESKNLPYKCNVCEKAFPSYQALGGHKASHRIKPPTVISTTADDSTAPTISIVAGEKHPIAASGKIHECSICHKVFPTGQALGGHKRCHYEGNLGGGGGGGSKSISHSGSVSSTVSEERSHRGFIDLNLPALPELSLHHNPIVDEEILSPLTGKKPLLLTDHDQVIKKEDLSLKI

SEQ ID NO: 36724 - protein, 398 aa, Hordeum vulgare subsp. vulgare
VQTPVIVRFSTVVHERGSPETLRDPRGFAVKFYTREGNFDLVGNNMPVFFIRDGMKFPDMVHAFKPSPKTNMQENWRVVDFFSHHPESLHMFTFLFDDVGIPLNYRHMDGFGVNTYTLISRDGKAHLVKFHWKPTCGVKCLLDDEAVTVGGTCHTHATKDLTDSIAAGNYPEWKLFIQTIDADHEDRFDFDPLDVTKTWPEDIIPLQPVGRMVLNKNIDNFFAENEQLAFCPAVTVPGIHYSDDKLLQTRIFSYADTQRHRLGPNYLMLPVNAPKCAHHNNHHDGLMNFIHRDEEVNYFPSRFDPTRHAEKYPMPPRVLSGCREKCIIDKENNFKQAGERYRSFDPARQDRFLQRWVDALTDARVTHEIQSIWVSYWSQCDASLGQKLASRLKIKPNM

SEQ ID NO: 36725 - protein, 460 aa, Arthrobacter globiformis
MADQATAQEFDILVLGGGSGGYAAALRAVQLGLTVGLVEKGKLGGTCLHNGCIPTKALLHSAELADHARDSAKYGVNVTLDSIDINAVNAYKDGIIAGKYKGLQGLIKSKGITVIEGEGKLQGTDTVVVNGTAYKGKNIVLATGSYSRTLPGLEIGGKVITSDQALTMDYIPKSAIILGGGVIGVEFASVWKSFGVDVTIVEGLPSLVPNEDATIVKNFERAFKKRGIKFSTGVFFQGVEQNDDGVKVTLVDGKTFEADLLLVAVGRGPVTANLGYEEAGITIDRGFVITNERLHTGVGNVYAVGDIVPGVQLAHRGYQQGIFVAEEIAGLKPVVVEDINIPKVTYSEPEIATVGYTEKAAKEKFGEDQVQTQEYNLAGNGKSSILGTSGLVKLVRQKDGPVVGVHMIGARMGEQVGEAQLIVNWEAYPEDVAQLLHAHPTQNEALGEAHLALAGKPLHG

SEQ ID NO: 36726 - protein, 434 aa, Prochlorococcus marinus str. MIT 9312
MTDILNCTKSEEIFSAAQELMPGGVSSPVRAFKSVGGQPIVFDRVKGPFAWDIDGNRYIDYIGSWGPAICGHAHPEVTTALQEAIEKGTSFGAPCVLENKLAEMVIDAVPSVEMVRFVNSGTEACMAVLRLMRAFTGRDKVIKFDGCYHGHADMFLVKAGSGVATLGLPDSPGVPRTTTANTLTAPYNDLEAVKKLFSENPDAISGVILEPIVGNAGFITPEPGFLEGLRELTTENGSLLVFDEVMTGFRISYGGAQEKFGVTPDLTTLGKVIGGGLPVGAYGGKKEIMSMVAPSGPVYQAGTLSGNPLAMTAGIKTLELLKQEGTYEKLDAITSRLIEGIIQSAENNGIAIYGGSVSAMFGFFLCDGPVRNFDEAKTNDAKLFGKLHREMLRRGVYLAPSPFEAGFTSLAHNEEEIDKTIEVFDQCFNTIKNQ

SEQ ID NO: 36727 - protein, 470 aa, Shigella flexneri 2a str. 301
MVDQVKVVADDQAPAEQSLRRNLTNRHVQLIAIGGAIGTGLFMGSGKTISLAGPSIIFVYMIIGFMLFFVMRAMGELLLSNLEYKSFSDFASDLLGPWAGYFTGWTYWFCWVVTGMADVVAITAYAQFWFPDLSDWVASLAVIVLLLTLNLATVKMFGEMEFWFAMIKIVAIVSLIVVGLVMVAMHFQSPTGVEASFAHLWNDGGWFPKGLSGFFAGFQIAVFAFVGIELVGTTAAETKDPEKSLPRAINSIPIRIIMFYVFALIVIMSVTPWSSVVPEKSPFVELFVLVGLPAAASVINFVVLTSAASSANSGVFSTSRMLFGLAQEGVAPKAFAKLSKRAVPAKGLTFSCICLLGGVVMLYVNPSVIGAFTMITTVSAILFMFVWTIILCSYLVYRKQRPHLHEKSIYKMPLGKLMCWVCMAFFVFVVVLLTLEDDTRQALLVTPLWFIALGLGWLFIGKKRAAELRK

SEQ ID NO: 36728 - protein, 342 aa, Glycine max
LEEPPRHPGFILQTKWTKVKDKRKSDEPPRHPGFILQTKWTKDSKIRSLSLSLDSLLDYTDKDVEESNLELSLFAESFYEMLQFQMGSRILTFLQKLRIKFVIKRNHKKTHREHDQEMDDVKKFPVKRQKGDDPSVKSEPTNMDTLNPTQLDDEKAVVGNENSSNKEDDVKMEDGSDEEEDPEEDPEEYEEMENGSPQHEASHDNNAEQEVKADTKSENITTNNKTTDETSKEEIKVKDEVQESKADAQVKEEKEGKDDTKKETPAVKEVVVDRELLQAFRFFDRNRVGYIRVEDMRIILHNLGMFFSHRDVKELVQSALLESNTGRDDRILYNKLVRMSDI

SEQ ID NO: 36729 - protein, 484 aa, Oryza sativa
  misc_feature (474)..(474): Xaa can be any naturally occurring amino acid
  unsure (1)..(484): unsure at all Xaa locations
MNVLASKIFPSRSNVASEQQQSKREKATIDDAKNSSKNKNLDRSVDESVLGIILGGGAGTRLYPLTKKRAKPAVPLGANYRLIDIPVSNCLNSNISKIYVLTQFNSASLNRHLSRAYGNNIGGYKNEGFVEVLAAQQSPDNPNWFQGTADAVRQYLWLFEEHNVMEFLILAGDHLYRMDYEKFIQAHRETDSDITVAALPMDEKRATAFGLMKIDEEGRIVEFAEKPKGEQLKAMMVDTTILGLDDVRAKEMPYIASMGIYVISKNVMLQLLREQFPGANDFGSEVIPGATNIGMRVQAYLYDGYWEDIGTIEAFYNANLGITKKPVPDFSFYDRSAPIYTQPRHLPPSKVLDADVTDSVIGEGCVIKNCKIHHSVVGLRSCISEGAIIEDSLLMGADYYETEADKKLLGEKGGIPIGIGKNCHIRRAIIDKNARIGDNVKIINVDNVQEAARETDGYFIKSGIVTVIKDALLXLAEQLYEVAA

SEQ ID NO: 36730 - protein, 295 aa, Triticum aestivum
  misc_feature (252)..(252): Xaa can be any naturally occurring amino acid
  unsure (1)..(295): unsure at all Xaa locations
MDGLHGADACFSPGRAMSPQVRPPAGPPDVGSHYLTELLQEHQKLVPFTQVLPICSKLLGHEIMRVSSLLKHQHGGDFERLPPMASPNQMHHHQSPPMPNFCGNGFGPWNHGAHPERVGFPQGPVGWQGAPQSPSSYIVKKILRLEIPTDTYPNFNFIGRLLGPRGNSLKRIEASTGCRVFIRGKGSIKDPGKEEQLKGRPGYEHLDDPLHILIEAELPAIVIDARLSKAQEILEELLKPVDESQDYYKRQXQLRELAMLNSPLREGEPSSKPASKPRTQARIKAALHPSSKRVG

SEQ ID NO: 36731 - protein, 204 aa, Helleborus orientalis
KRRNGLLKKAYELSVLCDAEVALIVFSTRGRLYEYSNNSVKKTIERYKKASTDSSGSGSVSEVNAQYYQQEASKLRNQIATLQNSNRNLLGEQLSNLNIRELKQIEKKIETGINKIQSKKNELLFAEIEYMQKREADLQNDNMYLRAKISENERTQQHMSLMPGTNDYEVISSGAFDSRNFLQVNLLGSNDTYSRSDQTALQLG

SEQ ID NO: 36732 - protein, 408 aa, Triticum aestivum
  misc_feature (85)..(85): Xaa can be any naturally occurring amino acid
  misc_feature (95)..(96): Xaa can be any naturally occurring amino acid
  unsure (1)..(408): unsure at all Xaa locations
MDRAALTVGPGMDMPIMHDGDRYELVKDIGSGNFGVARLMRNRADGQLVAVKYIERGEKIDENVQREIINHRSLRHPNIIRFKEXILTPTHLAIXXEYASGGELFERICNAGRFSEDEARFFFQQLLSGVSYCHSMQVCHRDLKLENTLLDGSTAPRLKICDFGYSKSSVLHSQPKSTVGTPAYIAPEVLLKKEYDGKIADVWSCGVTLYVMLVGAYPFEDPDEPKNFRKTIQRILSVQYSIPDYVHISSECRDLIAKIFVGNPATRITIPEIRNHPWFLKNLPADLVDDSTMSSQYEEPEQPMQSMDEIMQILAEATIPAAGSRINQFLNDGLDLGDDLDDPDSNAEPHVQKNGGKKVCLLTRPKPLQLPKGLGFPAVSDNPPHKGYFGWRWVLALPWWRTTGLALW

SEQ ID NO: 36733 - protein, 338 aa, Haemophilus somnus 129PT
MAILVTGGAGYIGSHTVVELLNHHVEIVVLDNLSNSSEVSLQRVQQITGKNITFYQGDILDRKILQRIFSQHNIKAVIHFAGLKAVGESVKKPLRYYQNNVIGSLTLLEEMLKAGIYNLVFSSSATVYGDPEIIPITETCKVGGTTNPYGTSKFMVERILQDAVSANPHLSVVILRYFNPVGAHESGLIGEDPNGIPNNLLPYISQVAVGKLPQLSVFGSDYDTHDGTGVRDYIHVVDLAIGHLKALEKHQNDPGCHIYNLGTGIGYSVLDMVKAFEKANDIQIPYKLVERRPGDIATCYSNPQKALEKLGWKTERDLTQMMKDTWNWQKNNPNGYKS

SEQ ID NO: 36734 - protein, 907 aa, Mycobacterium leprae
MRADIRLLGTILGDTLREQNGDEVFDLVERVRVESFRVRRSEIDRADMARMFSGLDIHLAIPIIRAFSHFALLANVAEDIHRERRRHIHLDAGEPLRDSSLAATYAKLDLAKLDSATVADALTGAVVSPVITAHPTETRRRTVFVTQRRITELMRLHAEGHTETADGRSIERELRRQILTLWQTALIRLARLQISDEIDVGLRYYSAALFHVIPQVNSEVRNALRARWPDAELLSGPILQPGSWIGGDRDGNPNVTADVVRRATGSAAYTVVAHYLAELTHLEQELSMSARLITVTPELATLAASCQDAACADEPYRRALRVIRGRLSSTAAHILDQQPPNQLGLGLPPYSTPAELCADLDTIEASLCTHGAALLADDRLALLREGVGVFGFHLCGLDMRQNSDVHEEVVAELLAWAGMHQDYSSLPEDQRVKLLVAELGNRRPLVGDRAQLSDLARGELAVLAAAAHAVELYGSAAVPNYIISMCQSVSDVLEVAILLKETGLLDASGSQPYCPVGISPLFETIDDLHNGAAILHAMLELPLYRTLVAARGNWQEVMLGYSDSNKDGGYLAANWAVYRAELALVDVARKTGIRLRLFHGRGGTVGRGGGPSYQAILAQPPGAVNGSLRLTEQGEVIAAKYAEPQIARRNLESLVAATLESTLLDVEGLGDAAESAYAILDEVAGLARRSYAELVNTPGFVDYFQASTPVSEIGSLNIGNRPTSRKPTTSIADLRAIPWVLAWSQSRVMLPGWYGTGSAFQQWVAAGPESESQRVEMLHDLYQRWPFFRSVLSNMAQVLAKSDLGLAARYAELVVDEALRRRVFDKIADEHRRTIAIHKLITGHDDLLADNPALARSVFNRFPYLEPLNHLQVELLRRYRSGHDDEMVQRGILLTMNGLASALRNSG

SEQ ID NO: 36735 - protein, 216 aa, Helleborus orientalis
IENTTNRQVTFCKHRNGLLKKAYELSVLCDAEVALIVFSSRGRLYEYSNNSVKKTIERYKKASTDSSNSGSASEANAQYYQQEAAKLRNQIAALQNSNRNLLGEQLSNLSIRELKQIEKKIETGINKIRSKKNELLFAEIEYMQKREVDLQNDNMFLRAKISENERTQQHMSLMPGTNNYEVISSGPFDSRNFLQVNLLESNNNYSRSDQTALQLG

SEQ ID NO: 36736 - protein, 250 aa, Fragaria x ananassa
MGKCYPTVSEEYKKAIDKAKRKLRGLIAEKNCAPLMLRLAWHSAGTYDVKTKTGGPFGTMKQSAELAHGANNGLDIAVRLLEPIKEQFPILSYADFYQLAGVVAVEVTGGPDVPFHPGREDKPEPPPEGRLPDAGKGSDHLREVFGKTMGLSDQDIVALSGGHTLGRAHKERSGFEGPWTPNPLIFDNSYFTVLLSGEKEGLLQLPTDKALLSDPVFRPLVEKYAADEDAFFSDYALAHQRLSELGFAEA

SEQ ID NO: 36737 - protein, 214 aa, Aquilegia alpina
IENTTNRQVTFCKRRNGLLKKAYELSVLCEAEVALIVFSNRGRLYEYANNSVRKTIDRYKKTCGEGSSTLTVSEANLLFYQQESSKMKQQIEILQNSNRHLMGEALSCLSIKELKQLESRLEKGISRIRSKKNEMLLAEIEFMQKREIELHNDNIYLREQITANERAQQHMNSLPGNVYEAITSAPYNSRDFLQVNLRESKPNQYCDSTALQLC

SEQ ID NO: 36738 - protein, 492 aa, Mycobacterium bovis AF2122/97
MATIHPPAYLLDQAKRRFTPSFNNFPGMSLVEHMLLNTKFPEKKLAEPPPGSGLKPVVGDAGLPILGHMIEMLRGGPDYLMFLYKTKGPVVFGDSAVLPGVAALGPDAAQVIYSNRNKDYSQQGWVPVIGPFFHRGLMLLDFEEHMFHRRIMQEAFVRSRLAGYLEQMDRVVSRVVADDWVVNDARFLVYPAMKALTLDIASMVFMGHEPGTDHELVTKVNKAFTITTRAGNAVIRTSVPPFTWWRGLRARELLENYFTARVKERREASGNDLLTVLCQTEDDDGNRFSDADIVNHMIFLMMAAHDTSTSTATTMAYQLAAHPEWQQRCRDESDRHGDGPLDIESLEQLESLDLVMNESIRLVTPVQWAMRQTVRDTELLGYYLPKGTNVIAYPGMNHRLPEIWTDPLTFDPERFTEPRNEHKRHRYAFTPFGGGVHKCIGMVFGQLEIKTILHRLLRRYRLELSRPDYQPRWDYSAMPIPMDGMPIVLRPR

SEQ ID NO: 36739 - protein, 203 aa, Aquilegia alpina
KRRNGLLKKAYELSVLCEAEVALIVFSSRGRLYEYSNNSVKKTIERYKKASTDSNNSGSVSEANAQFYQQEATKLRNQIASLQNHNRNLLGESLSNLNIRELKQIEKKIEGGISKIRAKKNELLFAEIEYMQKRELDLQTDNKYLRAMIAANERAPEHMNLMPANEYHALSSAPFDSRNFMPANLLDHNNNYSRSDQTTLQLG

SEQ ID NO: 36740 - protein, 287 aa, Oryza sativa (japonica cultivar-group)
RGWPESANTWEPLENLSACSDIIDAFEMRLQSPRPGRKRKRKITTTPVAGSNPSHGKRGRPRLDAKSHTRAPAPEPKQLPCRTSCRRATNCSSKTVAGLDASGSVVRNQLAQNIVQEGSSSVISRTPCQELPLSIRLTDQQNEHHLVNGSSNSENLVKVPPSQGGQVTGAKKRKSGNVRRFEQNKPTQGQGECGALVVAEDVGSTEGETGDKKKTEGCPNRVHITKIIKPVRFAAAVNNDVQQVSITFKALRSDGQEVMVDDKELKANNPLLLISYYEQCLRYNPTS

SEQ ID NO: 36741 - protein, 333 aa, Xanthomonas campestris pv. campestris str. ATCC 33913
MSNDTQPTIAIIGYGSQGRAHALNLRDSGFDVTVGLRPGGPTEAKAQADGFTVVAPAEAVKTADLVAVLTPDMVQKKLYEEVIAPNMKQGACLLFAHGLNVHFDMIKPRADLDVVLVAPKGPGALVRREYEIGRGVPCIYAVYQDTSGKAEQFALTYAGGLGGARANIIKTTFKEETETDLFGEQAVLCGGASSLVQAGFEVLVEAGYQPEIAYYEVLHELKLIVDLFYEGGITRMLEFVSETAQYGDYVSGPRVIDASTKARMKDVLTDIQNGTFTKNWVAEYEAGLPNYTKFKQADLEHPIEEVGKKLRAKMVWLNGEQQAAATPAKQQAA

SEQ ID NO: 36742 - protein, 585 aa, Thermoactinomyces vulgaris
MLLEAIFHEAKGSYAYPISETQLRVRLRAKKGDVVRCEVLYADRYASPEEELAHALAGKAGSDERFDYFEALLECSTKRVKYVFLLTGPQGEAVYFGETGFSAERSKAGVFQYAYIHRSEVFTTPEWAKEAVIYQIFPERFANGDPSNDPPGTEQWAKDARPRHDSFYGGDLKGVIDRLPYLEELGVTALYFTPIFASPSHHKYDTADYLAIDPQFGDLPTFRRLVDEAHRRGIKIILDAVFNHAGDQFFAFRDVLQKGEQSRYKDWFFIEDFPVSKTSRTNYETFAVQVPAMPKLRTENPEVKEYLFDVARFWMEQGIDGWRLNVANEVDHAFWREFRRLVKSLNPDALIVGEIWHDASGWLMGDQFDSVMNYLFRESVIRFFATGEIHAERFDAELTRARMLYPEQAAQGLWNLLDSHDTERFLTSCGGNEAKFRLAVLFQMTYLGTPLIYYGDEIGMAGATDPDCRRPMIWEEKEQNRGLFEFYKELIRLRHRLASLTRGNVRSWHADKQANLYAFVRTVQDQHVGVVLNNRGEKQTVLLQVPESGGKTWLDCLTGEEVHGKQGQLKLTLRPYQGMILWNGR

SEQ ID NO: 36743 - protein, 203 aa, Clematis integrifolia
KRRNGLLKKAYELSVLCDAEVALIVFSNRGRLYEYANNSVRKTIDRYKKTCSDPQTALTVSEANTMFYQQETTKMKQQIEILQNSNRHLMGEALSCLSIKELKQLESRLEKGLGRIRSKKNEMLLSEIEYMQKREIDLHNDNLYLRAKISDNEKAQHNMNVLPGNVYEAMTSAPYDARNFLQVNLPDTKEHPYCSGSTALQLC

SEQ ID NO: 36744 - protein, 152 aa, Astragalus membranaceus
WSVGCVLAELLLGQPLFPGESGVDQLVEIIKVLGTPTREEIKCMNPNYTEFKFPQIKAHPWHKIFHKRMPPEAVDLVSRLLQYSPNLRCQALDALTHPFFDELRDPNARLPTGRFLPPLFNFKPHELKGVPAETSVKLVPEHARKQCPFLGL

SEQ ID NO: 36745 - protein, 376 aa, Hordeum vulgare subsp. vulgare
MDKISAPFFSGTSPAAASVAGVDEDDRLCFQAQELMFAYNISMVLRAAIQLGLLDALSAAGGKALTPNELVENVETSSNKAEAAAAVDRILRYLSCFNVVTCSSEAAGPDGTLVRRYTTGPLCRWLTKDRGDGTLSPFAVFVVDPDHLFPWHHIAEAVTAGGPSAFERTQKWPYYEYMGKNQRLGTLFDNAMAQHSVILVTKMLERFKGFDGVQRLVDVGGGTGSTLGMITSKYKHMTGINYDLPHVIAQGLPLPGVEHVAGDMYESIPTGDAVLLQWITLMLNDDEFVKILSNCHNALPKDGKVIVVDGILPENPDSSLTARDAFTLDIIMFVLFKGAKQRTEKEFARLAKQAGFTGGIKKTYIFFNFYALEFTK

SEQ ID NO: 36746 - protein, 394 aa, Hordeum vulgare subsp. vulgare
VRFSTVIHERGSPETIRDPRGFAVKFYTREGNWDLLGNNFPVFFIRDGIKFPDVIHAFKPNPKSHVQEYWRVFDFLSHHPESLHTFFFLFDDVGIPTDYRHMDGFGVNTYTFVSRAGKSHYVKFHWRPTCGVSCLMDDEATLVGGKNHSHATQDLYDSIDAGNFPEWKLFVQVIDPDEEDRFDFDPLDDTKTWPEDLVPLQPVGRLVLDRNVDNFFNENEQLAFGPGLVVPGIYYSDDKMLQCRVFAYADTQRYRLGPNYLMLPVNAPKCGFKNNHYDGAMNFMHRDEEVDYYPSRHAPLRHAEPASFPVPTRPVVGKREKTRIKKENDFVQPGERYRSWAPDRQDRFVRRFSDALAHPKVSHELRVIWIDFLSKCDKSCGMKVANRLNVKPSM

SEQ ID NO: 36747 - protein, 194 aa, Triticum aestivum
  misc_feature (170)..(170): Xaa can be any naturally occurring amino acid
  unsure (1)..(194): unsure at all Xaa locations
MAATVMASSATSVAPFQGLKSTAGLPVSRRSNGASLGSVSNGGRIRCMQVWPIEGIKKFETLSYLPPLSTEALLKQVDYLIRSKWVPCLEFSKVGFIFREHNASPGYYDGRYWTMWKLPMFGCTDATQVINEVEEVKKEYPDAYVRIIGFDNMRQVHCVSFIAFKPPGCXESGKAYTAHSRQAIYKVPLQLSQL

SEQ ID NO: 36748 - protein, 416 aa, Wolbachia endosymbiont strain TRS of Brugia malayi
MNKKALLELSNGLKIELPVLSGTMGYDVLNIKDLYKVTGLLTYDPGFVSTASCSSAITFIDGDEGVLRYRGHDIADLAQSNDFTAVIYLLLYGKLPNLEQHKKFFLKIQELSKVPEQVVNVIKAFPKTAHPMSILIACFATLSALYHERYGNNVSNENLDFGISAIAQVPAIIAMVYRHTNDQEFIDTDNELNYSKSFLRMMFGNALDNDKSTLFAKALDKIFTLHADHEQNASTAAVRVVGSAGSNLFACLSAGVATLWGPVHGGANESVINMLKEIEQSGNVDKFIEKAKDDKDPFKLMGFGHRVYKNYDPRARILKDACDEILNKLEQDSKLLKIAKELEKIALKDEYFVVRKLYPNVDFYSGIIMNAINIPPSMFTPIFALARTTGWVTQWYEMINDKETKICRPRQLYVGK

SEQ ID NO: 36749 - protein, 325 aa, Arabidopsis thaliana
MHSLNETVIPDVDYMQSDRGHMHAAASDSSDRSKDKLDQKTLRRLAQNREAARKSRLRKKAYVQQLENSRLKLTQLEQELQRARQQGVFISSSGDQAHSTGGNGGALAFDAEHSRWLEEKNRQMNELRSALNAHAGDTELRIIVDGVMAHYEELFRIKSNAAKNDVFHLLSGMWKTPAERCFLWLGGFRSSELLKLLANQLEPMTERQVMGINSLQQTSQQAEDALSQGMESLQQSLADTLSSGTLGSSSSDNVASYMGQMAMAMGQLGTLEGFIRQADNLRLQTLQQMLRVLTTRQSARALLAIHDYSSRLRALSSLWLARPRE

SEQ ID NO: 36750 - protein, 240 aa, Nicotiana tabacum
MAENGIKHQEVGHKSLLQSDALYQYILETSVYPREPESMKELREVTAKHPWNLMTTSADEGQFLNMLLKLINAKNTMEIGVYTGYSLLATALAIPDDGKILAMDINRENYEIGLPIIEKAGVAHKIEFREGPALPVLDQLVEDKKNHGTYDFIFVDADKDNYINYHKRIIDLVKVGGLIGYDNTLWNGSVVAPPDAPMRKYVRYYRDFVLELNKALAVDPRIEICMLPVGDGITLCRRIT

SEQ ID NO: 36751 - protein, 422 aa, Wolbachia endosymbiont strain TRS of Brugia malayi
MSRRVVVTGIGLITPLAADVENTWLKLINGKSGIKKISRFDASDLSCKVAGQVPLQHDNIEHCFNPLNYISEKDLKRTDRFIHYGIAAAIQAVDDSLILENQSINRERIGVAIGSGIGGLPSIQENVIIMQEKGPRRVSPFFVPASLINLISGHVSIKYEFTGPNDSAVTACATGAHAIINSARAIKLGEADVMIAGGSESALCRVGIAGFASMKALSTKFNDKPKEASRPWNEGRDGFVMGEGAGILVLEEYEHAKKRGAKIYAELTGYGLTGDAYHITAPHLEGRGALKAMQLALKSAQINPNQIGYINAHGTSTPLGDKIEVIAIKQLFDDYAYKIPISSTKSSIGHLLGAAGSVEAIFSILVLNNGIVPPTLNLHKPSEGCDLNFIPLKAQEHEIQYALSNSFGFGGTNASLVFGKCS

SEQ ID NO: 36752 - protein, 610 aa, Arabidopsis thaliana
  misc_feature (581)..(581): Xaa can be any naturally occurring amino acid
  unsure (1)..(610): unsure at all Xaa locations
MATVTASSNFVSRTSLFNNHGASSCSDVAQITLKGQSLTHCGLRSFNMVDNLQRRSQAKPVSAKSSKRSSKVKTAGKIVCEKGMSVIFIGAEVGPWSKTGGLGDVLGGLPPALAARGHRVMTICPRYDQYKDAWDTCVVVQIKVGDKVENVRFFHCYKRGVDRVFVDHPIFLAKVVGKTGSKIYGPITGVDYNDNQLRFSLLCQAALEAPQVLNLNSSKYFSGPYGEDVVFVANDWHTALLPCYLKSMYQSRGVYMNAKVVFCIHNIAYQGRFAFDDYSLLNLPISFKSSFDFMDGYEKPVKGRKINWMKAAILEAHRVLTVSPYYAQELISGVDRGVELHKYLRMKTVSGIINGMDVQEWNPSTDKYIDIKYDITTVTDAKPLIKEALQAAVGLPVDRDVPVIGFIGRLEEQKGSDILVEAISKFMGLNVQMVILGTGKKKMEAQILELEEKFPGKAVGVAKFNVPLAHMITAGADFIIVPSRFEPCGLIQLHAMRYGTVPIVASTGGLVDTVKDGYTGFHIGRFNVKCEVVDPGDVIATAKAVTRAVAVYGTSAMQEMVKNCMDQDFSWKGPARLWEKXLLSLNVAGSEAGTEGEEIAPLAKENVATP

SEQ ID NO: 36753 - protein, 196 aa, Oryza sativa
MAGGKKRKAEAARLEETDRALYGAFRGAANSLSQLYTLAMGGQKLSFQAGERHAMEKLYEWILRQHENGLRLTVADIASHIQHEIQYGGDNASASPRSQHASQSTQATVPIPNTMSQQPSPNLFALGNTGLVQSKNSAVFSNALSSPVRRSLQPFHLEQGGDAGYFANGVNRDQNSTASNDSSMDMHSDSPAHDSY

SEQ ID NO: 36754 - protein, 259 aa, Triticum aestivum
  misc_feature (56)..(56): Xaa can be any naturally occurring amino acid
  misc_feature (241)..(241): Xaa can be any naturally occurring amino acid
  unsure (1)..(259): unsure at all Xaa locations
MSTAAANWCYATVAPRARSSTIVASLGTPAPSNSSSFRPKLIRNTPVQAAPVAPAXMDAAVERLKTGFEKFKTEVYDEKPDFFEPLKAGQAPRYMVSACADSRVCPSVTLGLEPGEAFTIRNIANMVPSYCKNKYAGVGSAIEYAVCALKVEVIVVIGHSRCGGIKALLSLKDGAYDSFHFDEDCVRIGFPAKNKVQTDCASMPYDDQCSVLEKEAVNVSLKNLLTLPFVREGVSNGTLKXLVGGHYDFVSGKFETWDR

SEQ ID NO: 36755 - protein, 442 aa, Agrobacterium tumefaciens str. C58
MLSHGARCCRKTDDLDKGGALAMRRVVITGTGMVSPLGCGTEVTWERLLAGQNGARLVTEFEVEDLPAKIACRIPVGDGSNGTFNADDWMEPKEQRKVDPFILYGMAAADMALADANWHPETDDDQIATGVLIGSGIGGLEGIVEAGYTLRDKGPRRISPFFIPGRLINLVSGQVSIRHKLRGPNHSVVTACSTGAHAIGDAARLIALGDAEVMVAGGAESPVCRISLAGFAACKALSTQHNDDPQKASRPYDRDRDGFVMGEGAGIVVLEELEHAKARGAKIYAEVVGYGLSGDAFHITAPSEDGDGAYRCMSMALKRAGLTPDDIDYINAHGTSTMADTIELGAVERLVGESAPKISMSSTKSATGHLLGAAGAIEAIFATLAIRDNIVPPTLNLDNPDVETKIDLVPHKARKRQVNVALSNSFGFGGTNASLVLRRYEA

SEQ ID NO: 36756 - protein, 267 aa, Arabidopsis thaliana
  misc_feature (233)..(233): Xaa can be any naturally occurring amino acid
  misc_feature (243)..(243): Xaa can be any naturally occurring amino acid
  unsure (1)..(267): unsure at all Xaa locations
FLRMDGSGTGSRSGVESILPNYKLGRTLGIGSFGRVKIAEHALTGHKVAIKILNRRKIKNMEMEEKVRREIKILRLFMHPHIIRLYEVIETPTDIYLVMEYVNSGELFDYIVEKGRLQEDEARNFFQQIISGVEYCHRNMVVHRDLKPEDLLLDSKCDVKIADFGLSNIMRDGHFLKTSCGSPNYAAPEVISGKLYAGPEVDVWSCGVILYALLCGTLPFDDENIPNLFKKDXKGGIYTLPSXILSPGARDFYPPRMLFSLTPMKTS

SEQ ID NO: 36757 - protein, 236 aa, Prochlorococcus marinus str. MIT 9312
MAVALAGQLREGTKKSHTMAENTGFVACFLKGVVEKKSYRKLISDLYFVYEAMEEEIERLVHEEHPVIKPIGFKSLFRKKTLENDLKFYFGDNWKNQINISQSAKEYVERIRSVAKNSPELLVGHHYTRYIGDLSGGQILKRIAKKALNLEGNNGLSFYEFDLIEDEKKFKEEYSLTLNQLPINQNTADQIIDEANQAFTYNMKMFKELEGNLIAVLGKIVFNYITKKARKGSTET

SEQ ID NO: 36758 - protein, 576 aa, Cucurbita maxima
MATSFSVPSMIMEEEGRFEAEVAEVQAWWNSERFKLTRRPYTAKDVVSLRGSLRQSYASNDLAKKLWRTLKTHQANSTASRTFGALDPVQVTMMAKHLDSIYVSGWQCSSTHTSTNEPGPDLADYPYDTVPNKVEHLFFAQQYHDRKQREARMSMSREERAKTPYVDYLKPIIADGDTGFGGTTATVKLCKLFVERGAAGVHIEDQSSVTKKCGHMAGKVLVAVSEHINRLVAARLQFDVMGVETVLVARTDAVAATLIQTNVDSRDHQFILGATNPNLRGKSLAGVLAEAMAAGKTGAELQALEDQWISMAQLKTFSECVTDAIMNSNGTESEKRRKLDEWMNHSSYEKCISNEQGREIAEKLGLKNLFWDWDLPRTREGFYRFKGSVMAAIVRGWAFAPHADLIWMETSSPDLVECTTFAKGVKSVHPEIMLAYNLSPSFNWDASGMSDKQMEEFIPTIARLGFCWQFITLAGFHADALVIDTFARDYARRGMLAYVERIQREERNNGVDTLAHQKWSGANYYDRYLKTVQGGISSTAAMGKGVTEEQFKESWTRAGAGNLGEEGSVVVAKSRM

SEQ ID NO: 36759 - protein, 339 aa, Corynebacterium glutamicum ATCC 13032
MTCDREGRHIPSKMSEGLHRHMTNLTSTHEVLAIGRLGVDIYPLQSGVGLADVQSFGKYLGGSAANVSVAAARHGHNSALLSRVGNDPFGEYLLAELERLGVDNQYVATDQTFKTPVTFCEIFPPDDFPLYFYREPKAPDLNIESADVSLDDVREADILWFTLTGFSEEPSRGTHREILTTRANRRHTIFDLDYRPMFWESPEEATKQAEWALQHSTVAVGNKEECEIAVGETEPERAGRALLERGVELAIVKQGPKGVMAMTKDETVEVPPFFVDVINGLGAGDAFGGALCHGLLSEWPLEKVLRFANTAGALVASRLECSTAMPTTDEVEASLNQKV

SEQ ID NO: 36760 - protein, 206 aa, Vigna aconitifolia
MSLRRRTLLKVIVLGDTGVGKTSLMNQYVHKKFSQQYKATIGADFVTKELQIDDRLVTLQIWDTAGQERFQSLGVAFYRGADCCVLAYDVNVMKSFDTLDNWHEEFLKQANPPDPRSFPFILLGNKIDIDGGNSRVVSEKKAKDWCASKGNIPYFETSAKEDFNVDAAFLCIAKAALANEHEQDIYFQGIPEAAVPENEQRSGCAC

SEQ ID NO: 36761 - protein, 299 aa, Prochlorococcus marinus str. MIT 9312
MEKSALLDSDVNYDWNFLNYPIHTVSAKPEQTSKEYAILLIHGFGASTDHWRFNIPILSNKYEVHAMDLLGFGKSPKPQDVEYSGSLWKDQVVAYVKEKIKKPTIIVGNSLGGYAALAAGSELNELNAGVILLNAAGYFSEEKTIKKNILQTSIETVAGIFLKNVVLQRLIFENMRNPKNIKKTLNQVYVDKKNVDDFLVESIRKPSLDYGAFNVFRSVFNPSGPQGLPLDKLFAKLDSPLLLLWGGKDPWMNTPKKRNLYKKFTPKYTKEIILDAGHCPHDEIPELVNQHILDWVDSL

SEQ ID NO: 36762 - protein, 203 aa, Clematis integrifolia
KRRNGLLKKAYELSVLCDAEVALIVFSSRGRLYEYSNNSVRKTIERYKKASSDTSNTGSVSEANAQFYQNEAGKLRNQIASLQNNNKNLLGESLSNLSIRELKQLEKKIEGGITKIRSKKNELLFAEIEYMQKREIDLQNDNLYLRAKIADNERTQQQMNLMPGNEYEVISSAPFDSRNFLPVNLLEPNNSYSHCDQTTLQLG

SEQ ID NO: 36763 - protein, 150 aa, Triticum aestivum
NKFLQKSRLVPVRNSRDIVDPRVREKKKVPKQSLFGNITEALDFSQVRSEKDAELLYEARDSIKDEGRMTREQYAALRRKIGGTYKDFFKSYVEVDGEYVEEGWVDKTCKVCKKDTRGEPRQVDNLGRYMHVACAENSKPTNFFSKLFSR

SEQ ID NO: 36764 - protein, 448 aa, Bacillus cereus ATCC 14579
MCTGTKSFFLLQRFKLKEDVTMEQKPVLDVNEVPKPGKWLFLSIQHLFAMFGSTVLVPFLTGLNPSVALISSGLGTLAFLLITKGQVPAYLGSSFAFIAPIITAKTAGGPGAAMLGGLLAGLVYILISLGIKKSGSEWIMKLLPPIVVGPVVMVIGLALAHTAVNMAMNGADGKYSFTHFSVALVTLAITIICSIFGRGFFSIIPVLLGIIGGYIFAYFQGLVDLKPVAEAKWFVVPDFTVPFVTYTPEFSWKIVLLMVPVALVTISEHIGHQIVLGNVIKRDLIEKPGLHRSIFGDGVATLIASLIGGPPNTTYGENIGVLAITRAYSVYLFIGSAVFAIMFGFIGKISALIHSIPTPVMGGVSILLFGVIASSGLRMMVDDKTDLSDKRNLMIASVILVIGIGGAVLHVGESFQVEGMALAAIVGVLLNLLLPETKQIKQSKQIAS

SEQ ID NO: 36765 - protein, 205 aa, Listeria monocytogenes
IGGILVWFGWYGFNVGSALTIDNVAMTAFVNTNTAAAAGIIGWGLVEWLTNKKPTMLGTISGAIAGLVSITPAAGFVTVPSSLIIGFFGGALCFWAVFWLKGKVKYDDALDAFGLHGIGGIWGGIATGLFATTKVNEAGADGLFYGNASLVVKQLIAIGSTVAYVAVVTALIVVIIKLFLPIRVNEEQEYKGLDLTLHGEKAYQE

SEQ ID NO: 36766 - protein, 216 aa, Ranunculus ficaria
IENTTNRQVTFCKRRNGLLKKAYELSVLCEAEVALIVFSNRGRLYEYSNNSVKKTIERYKKHSTDSSNTGSVSEANAQFYQQEANKLRNQIATLQNSNKNLLGESLSNLSVRELKAIEKKIEGGIAKIRSKKNELLFAEIEYMQKREIDLQNDNMFLRAKIAENERTQQQHMSLMPVNDYEVISSAPYDSRNFLPVNLLDSNHNYSRNDQTTLQLG

SEQ ID NO: 36767 - protein, 203 aa, Ranunculus ficaria
KRRNGLLKKAYELSVLCEAEVALIVFSNRGRLYEYANNSVRKTIDRYKKQCSDASTALTVSEANSLFYQQESSKMKQQIDILQNSNRHLMGEALSCLSIKELKQLESRLEKGLSRIRSKKNEMLLAEIEYVQKREIDLHNDNVYLRQKISENERAQQHMNSLPGNAYEAMTSAPYDARNFLQVNLSDNKDNHYGSSSTALQLC

SEQ ID NO: 36768 - protein, 437 aa, Desulfotalea psychrophila LSv54
MSEKIHRILEELESRLVEFGRKLHNHAESGWTEFWATAFIADILIEAGYHVKMGREVLDADFRMGLPDDEALHAAAERAIAQGANPDLVEKMRGGFTGLVADLKAGPAARIALRFDIDSNTLQECEEVGHRPFDEGFSSRNNGSCHACGHDGNATIGLGIALALAQLRESVSQNIRLIFQPAEEGVRGALPMVRAGVVDGIKALVGCHMGFKAFHTGGLILGAGKFLATSKFDAHFTGVSSHAGAYPEEGQNSLLAAATASLNMHAIPRHSGGATRITVGRMEAGEGRNIIPAQATLVSETRGETTELNDFMLEKAKKVIKHSAGMYDQAWQIKMMGGCKSGESDAEMIALLRQSAEKVSFFQSELIEDYVEFGGSDDVTEFMAAVQEQGGIASYCLAGTELVAGHHNYRFDFNEATLAPAAEFLTNAVFAMCELDL

SEQ ID NO: 36769 - protein, 369 aa, Alcaligenaceae bacterium FB188
MAIGYVWNTLYGWVDTGTGSLAAANLTARMQPISHHLAHPDTKRRFHELVCASGQIEHLTPIAAVAATDADILRAHSAAHLENMKRVSNLPTGGDTGDGITMMGNGGLEIARLSAGGAVELTRRVATGELSAGYALVNPPGHHAPHNAAMGFCIFNNTSVAAGYARAVLGMERVAILDWDVHHGNGTQDIWWNDPSVLTISLHQHLCFPPDSGYSTERGAGNGHGYNINVPLPPGSGNAAYLHAMDQVVLHALRAYRPQLIIVGSGFDASMLDPLARMMVTADGFRQMARRTIDCAADICDGRIVFVQEGGYSPHYLPFCGLAVIEELTGVRSLPDPYHEFLAGMGGNTLLDAERAAIEEIVPLLADIR

SEQ ID NO: 36770 - protein, 200 aa, Saxifraga careyana
KRRNGLLKKAYELSVLCDAEVALIVFSTRGRLYEYANNNIRSTIERYKKANSDSLNTGDVVETNTQFYQHESVKLRQQIQMLQNSNRNIMGESLSSLTLKELKQLENRLERGITRIRSKKHEMLLAEIEYMQKREIDLENESIYLRAKIGEAESIEQANVAAANDLHAIQAYVAHNFFQPSLLDAEPSFGYPNKKSPRLG

SEQ ID NO: 36771 - protein, 212 aa, Saxifraga careyana
KRRNGLLKKAYELSVLCDAEVALIVFSTRGRLYEYSNNSVKQTIERYKKACSGPSNSGSVSEANAQSYQQEASKLHAQINNLQNTNRQMLGEALGSLSPRDLKNLENKVEKGISKIRSKKNELLFSEIEYMKKREIDLHNENQYIRAKIAETERAQQQMSLMPPGGGSTNYDQQLNMHPQQFDSRDFFQVNALQPNNHHYSRQHDQISLQLV

SEQ ID NO: 36772 - protein, 237 aa, Caulobacter vibrioides
MPTLVLLRHGQSQWNLENRFTGWVDVDLTAEGEAQARKGGELIAAAGIEIDRLFTSVQTRAIRTGNLALDAAKQSFVPVTKDWRLNERHYGGLTGLNKAETAEKHGVEQVTIWRRSYDIPPPELAPGGEYDFSKDRRYKGASLPSTESLATTLVRVLPYWESDIAPHLKAGETVLIAAHGNSLRAIVKHLFNVPDDQIVGVEIPTGNPLVIDLDAALKPTGARYLDDSRAEALPKVG

SEQ ID NO: 36773 - protein, 114 aa, Zea mays
MTMTTTRPPKQPRTDRPTGRGSSISEERRRRRTASNRESARRSRVRKQKQLGQLWDQVVHLRGDSRDLLDRLNRAIRDCDRVMRDNARLRNERAGLQRRLLDLITDGDGDDRPF

SEQ ID NO: 36774 - protein, 525 aa, Cicer arietinum
MAVSATGQIMLSSTVQLREPTIMGSTRNLRFVKFCNGEIMGRKIELKAGGAISNCCTKNVIRQNISMSLTADVAAESKLRNVDLEKRDPSTVVAIILGGGAGTRLFPLTKRRAKPAVPIGGAYRLIDVPMSNCINSGINKVYILTQFNSASLNRHIARAYNSGTGVTFGDGYVEVLAATQTPGEQGKKWFQGTADAVRQFHWLFEDARSKDIEDVLILSGDHLYRMDYMDFVQNHRESGADITLSCLPMDDSRASDFGLMKIDNKGRVLSFSEKPKGEDLKAMQVDTTVLGLSKDEALEKPYIASMGVYVFKKEILLNLLRWRFPTANDFGSEIIPASAREFYMKAYLFNDYWEDIGTIRSFFEANLALTEHPSKFSFYDAAKPMYTSRRNLPPSKIDNSKIVDSIVSHGSFLNNSFIEHSVVGIRSRINSNVHLKDTVMLGADFYETEAEVAALLAEGRVPIGIGENTKIKDCIIDKNARIGKNVIIANSEGIQEADRSAEGFYIRSGVTVVLKNSTIEDGLVI

SEQ ID NO: 36775 - protein, 379 aa, Candida albicans SC5314
MAASEESTLVDEYPIKSILNQISPWFIVDETKYGGRGCFAPKVIPQHTVIHSCQTPIGSTLSKPFKKEVCSQCYTYTYGETMKFKISKTEGKHVYSLFFCSEECKSTFTHQDINRVLVENLLAVEKNYLAGLSKPEIEPMEPKNFADDYVKEWDKVASWETKLESLKPSKRQNQIFRIDDNEYLEIKYVIGVLFNMYKVHCNDHIPHFDYPNLDKNEANKVELLLFDLLYSSEFEKVKRYPYLLYSYINIYKFIKLTCTPELQAFIDSTTIRSIIGKNLSNAFGIWSEVTDPSEDKEFLGFGVYPSASFFNHSCSPNIVKTRNNSEMVFTTSKDIEIGEELCISYGNYTDEPVELRQKQLKEWFFDCACTKCQTELKTT

SEQ ID NO: 36776 - protein, 521 aa, Cicer arietinum
MDLAIGSNYASLRSSVFLGETLKGNLSTKFLTSPKFSQIHINNLRSFNPRNGASYSVLTSGINDFEESMTFHEGPYFDTPKADPKSVASIILGGGAGTRLFPLTSKRAKPAVPIGGCYRLIDIPMSNCINSGIRKIFILTQFNSFSLNRHLSRSYNFGNVSTFGEGFVEVLAATQTSGEAGKKWFQGTADAVRQFIWVFEDAKTKNVEHILILSGDHLYRMNYMDFVQKHIDTNADITVSCIPMDDSRASDYGLLKIDGKGRIIQFAEKPKGSELKAMRVDTTLLGLSPEEAKKQPYIASMGVYVFRTETLLKLLRSNCSTCNDFGSEIIPSAVNDDHNVQAYLFNDYWEDIGTIKSFFDANLALTDQPPKFQFYDPNTPFYTFPRFLPPTKVEKCKIVDAIISHGCFLRECSVQHSIVGIRSRLESGVELQDTMMMGADYYQTESEIASLLAEGKVPVGVGENTKIRNCIIDKNARIGRNVIITNADGVEEADRTKEGFYIRSGITAILKNATIKDGTVI

SEQ ID NO: 36777 - protein, 290 aa, Frankia sp. EAN1pec
MPDLLEDRVVVVTGGASGIGRASVLRFLAAGARVVFGDVNGATAQRLLDEVADPARLHFERADVADEAEVAALVAAAVERFGRLDVMFNNAGVGGAFGPLTDIDVADWDRTFGVISRGMFLGTKHAARAMIAQGGGGSIINNSSVAGVGGGGGPTAYSAAKAAVINFTCNAAVELAAHRIRVNAICPGLVDTPLVMGRDEAAIRARMATFQPWPDLGRPEDIAGIVLFLAGPDSAFLTGEAIRVDGGMVAWGPRMTDTSDPRGVTRRFTGFTEGSTGRPLTKRPLDGAGT

SEQ ID NO: 36778 - protein, 561 aa, Ralstonia metallidurans CH34
MTHLKITGMTCDSCAAHVKEALEKVPGVQSALVSYPKGTAQLAIVPGTSPDALTAAVAGLGYKATLADAPLADNRVGLLDKVRGWMAAAEKHSGNEPPVQVAVIGSGGAAMAAALKAVEQGAQVTLIERGTIGGTCVNVGCVPSKIMIRAAHIAHLRRESPFDGGIAATVPTIDRSKLLAQQQARVDELRHAKYEGILGGNPAITVVHGEARFKDDQSLTVRLNEGGERVVMFDRCLVATGASPAVPPIPGLKESPYWTSTEALASDTIPERLAVIGSSVVALELAQAFARLGSKVTVLARNTLFFREDPAIGEAVTAAFRAEGIEVLEHTQASQVAHMDGEFVLTTTHGELRADKLLVATGRTPNTRSLALDAAGVTVNAQGAIVIDQGMRTSNPNIYAAGDCTDQPQFVYVAAAAGTRAAINMTGGDAALDLTAMPAVVFTDPQVATVGYSEAEAHHDGIETDSRTLTLDNVPRALANFDTRGFIKLVIEEGSHRLIGVQAVAPEAGELIQTAALAIRNRMTVQELADQLFPYLTMVEGLKLAAQTFNKDVKQLSCCAG

SEQ ID NO: 36779 - protein, 516 aa, Cicer arietinum
MASMAAIGVLKVPPSSSSSSSSSSSKAIIARNLSFTSSQVCGDKIGTFSRRGRGSYVGNPIIVSPKAVSDSKNAQTCLDPDASRSVLGIILGGGAGTRLYPLTKKRAKPAVPLGANYRLIDIPVSNCLNSNVSKIYVLTQFNSASLNRHLSRAYASNMGGYKNEGFVEGLAAQQSPENPNWFQGTADAVRQYLWLFEEHNVLEYLVLAGDHLYRMDYERFIQAHRESDADITVAALPMDELRATAFGLMKIDEEGRIIEFAEKPKGEQLKAMKVDTTILGLDEERAKEMPYIASMGIYVVSKHVMLDLLREKFPGANDFGSEVIPGATNIGMRVQAYLYDGYWEDIGTIEAFYNANLGITKKPVPDFSFYDRSSPIYTQPRYLPPSKMLDADITDSVIGEGCVIKNCKIHHSVVGLRSCISEGAIIEDTLLMGADYYETDADRRFLAAKGSVPIGIGKNSHIRRAIIDKNARIGDNVKIINSDNVQEAARETEGYFIKSGIVTVIKDALIPSGTVI

SEQ ID NO: 36780 - protein, 300 aa, Agrobacterium tumefaciens
MARNSLPTITAGEAGLNRYLDEIRKFPMLEPQEEYMLGKRYAEHGDRDAAHKLVTSHLRLVAKIAMGYRGYGLPIGEVVSEGNVGLMQAVKKFDPERGFRLATYAMWWIKASIQEYILRSWSLVKMGTTANQKRLFFNLRRLKGRIQAIDDGDLKPEHVKEIATKLQVSEEEVISMNRRLHGDASLNAPIKASEGESGQWQDWLVDDHESQEAVLIEQDELETRRRMLAKAMGVLNDRERRIFEARRLAEDPVTLEELSSEFDISRERVRQIEVRAFEKVQEAVQKEALEAARALRVVDA

SEQ ID NO: 36781 - protein, 395 aa, Burkholderia fungorum LB400
MTVLLALMFIIATLKPQWLQRQGQFGKQLAEPIVALREVAPGIGSGPAQASYADAAQKAMPAVVNVFSSKDGSLPPDPRAKDPLFRYFFGDKNNRKQQEQPASNLGSGVIVSSEGYILTNQHVVDGADQIEIALADGRTTNAKVIGIDPETDLAVLKVNMTNLPTITLGRMDQTRVGDVVLAIGNPFGVGQTVTMGIVSALGRNHLGINTFENFIQTDAAINPGNSGGALVDVNGNLLGINTAIYSRSGGSLGIGFAIPVSTARSVLESIITTGSVTRGWIGVEPQDVTPEIAESFGLDQKSGAIVAGVLKNGPADRAGIKPGDILVNVNGQEITDTTRLLNVIAQIKPGTAAKVHLVRKSREMDLDVTIGKRPPPPKQPVEDNGGGDQQDDDGG

SEQ ID NO: 36782 - protein, 393 aa, Prochlorococcus marinus str. MIT 9312
MCPVAADSKNSKPSSKKKINKKINSNLETVVEENSNINSENLKESSYSNESSLENNNEFSDSEDADKGLGNIKLGPKGIYTEDSIRVYLQEIGRIRLLRPDEEIELARKIADLLQLEELATQYESEKGHFPSVREWAELIDMPLSKFRRRLLLGRRAKEKMVQSNLRLVVSIAKKYMNRGLSFQDLIQEGSLGLIRAAEKFDHEKGYKFSTYATWWIRQAITRAIADQSRTIRLPVHLYETISRIKKTTKVLSQEFGRKPSEEEIAESMEMTIEKLRFIAKSAQLPISLETPIGKEEDSRLGDFIEADIENPEQDVSKTLLREDLEGVLATLSPRERDVLRLRYGIDDGRMKTLEEIGQIFDVTRERIRQIEAKALRKLRHPNRNGVLKEYIK

SEQ ID NO: 36783 - protein, 350 aa, Arabidopsis thaliana
MAKSVLVTGGAGYIGSHTVLQLLEGGYSAVVVDNYDNSSAASLQRVKKLAGENGNRLSFHQVDLRDRPALEKIFSETKFDAVIHFAGLKAVGESVEKPLLYYNNNIVGTVTLLEVMAQYGCKNLVFSSSATVYGWPKEVPCTEESPISATNPYGRTKLFIEEICRDVHRSDSEWKIILLRYFNPVGAHPSGYIGEDPLGVPNNLMPYVQQVAVGRRPHLTVFGTDYKTKDGTGVRDYIHVMDLADGHIAALRKLDDLKISCEVYNLGTGNGTSVLEMVAAFEKASGKKIPLVMAGRRPGDAEVVYASTEKAERELNWKAKNGIEEMCRDLWNWASNNPYGYNSSSNGSSS

SEQ ID NO: 36784 - protein, 262 aa, Triticum aestivum
  misc_feature (200)..(200): Xaa can be any naturally occurring amino acid
  misc_feature (207)..(207): Xaa can be any naturally occurring amino acid
  misc_feature (220)..(221): Xaa can be any naturally occurring amino acid
  misc_feature (231)..(231): Xaa can be any naturally occurring amino acid
  unsure (1)..(262): unsure at all Xaa locations
HSITSLYKKAGWYRSGIPGISSTHASDTKYLATVLAIGNECDIAMLTVDDDEFWKGVLPLEFGLLPALQDAVTVVGYPIGGDTISVTSGVVSRIEILSYVHGSTELLGLQIDAAINSGNSGGPAFNDQGKCVGIAFQSLKHEDAENIGYVIPTPVIKHFIQDYEKSGEYTGFPILGIEWQKMENPDLRKAMGMKSDQKGXRIRRIEXTAPESGCMQPSDXXLSFDGIDIAXDGTVPFRHGERIGFSYPSSQKYTGEKGTCQV

SEQ ID NO: 36785 - protein, 607 aa, Streptomyces filamentosus
MKPDEPTWTPPPDARPAADRRPAEVRRILRLFRPYRGRLAVVGLLVGASSLVGVASPFLLREILDTAIPQGRTGLLTLLALGMILTAVMTSVFGVLQTLISTTVGQRVMHDLRTAVYTQLQRMPLAFFTRTRTGEVQSRIANDIGGMQATVTSTATSLVSNLTAVIATVVAMLALDWRLTVVSLLLLPVFVAISRRVGRERKKITTQRQKQMAAMAATVTESLSVSGILLGRTMGRSDSLTQGFAEESERLVDLEVRSNMAGRWRMSVIGIVMAAMPAVIYWAAGLTFASGAAAVSIGTLVAFVTLQQGLFRPAVSLLSTGVQMQTSLALFQRIFEYLDLTVDITEPEHPVRLERIRGEIAFEDVDFSYDEKNGPTLTGIDVTVPAGDSLAVVGSTGSGKSTLSYLVPRLYDVTGGRVTLDGIDVRDLDFDTLARAVGVVSQETYLFHASVADNLRFAKPEATDEEIEAAARAAQIHDHIASLPDGYDTMVGERGYRFSGGEKQRLAIARTILRDPPVLILDEATSALDTRTEQAVQEAIDALSAGRTTLTIAHRLSTVRDADQIVVLEDGRVAERGTHEELLDRDGRYAALIRRDSHPVPVPVPAP

SEQ ID NO: 36786 - protein, 883 aa, Salmonella enterica subsp. enterica serovar Paratyphi A str.
MNEQYSALRSNVSMLGKVLGETIKDALGEHILDRVETIRKLSKSSRAGNEANRRELLTTLQNLSNDELLPVARAFSQFLNLANTAEQYHSISPKGEAASNPEVIARTLRKLKNQPDLNDATIKKAVESLSLELVLTAHPTEITRRTLIHKMGEINNCLKQLDNTDIADYERHQVMRRLRQLIAQSWHTDEIRKQRPSPVDEAKWGFAVVENSLWQGVPNYLRELNEQLEENLGYKLPVDFVPVRFTSWMGGDRDGNPNVTADITRHVLLLSRWKATDLFLKDIHVLVSELSMVDATPELLALVGEEGASEPYRYLMKKLRARLMATQSWLEARLKGEELPKPAGLLTQNEQLWEPLYACYQSLQACGMGIIANGELLDTLRRVKCFGVPLVRIDIRQESTRHTEALGEITRYLGIGDYESWSEADKQAFLIRELNSKRPLLPRNWEPSNDTREVLETCKVIAEAPKGSIAAYVISMAKTPSDVLAVHLLLKEAGIGFAMPVAPLFETLDDLNNADDVMTQLLNIDWYRGLIQGKQMVMIGYSDSAKDAGVMAASWAQYQAQDALIKTCEKAGIELTLFHGRGGSIGRGGAPAHAALLSQPPGSLEGGLRVTEQGEMIRFKYGLPEVTVSSLSLYTSAILEANLLPPPEPKDSWRHIMDELSVISCETYRGYVRENKDFVPYFRSATPEQELGKLPLGSRPAKRRPTGGVESLRAIPWIFAWTQNRLMLPAWLGAGTALQKVVEDGKQSELEAMCRDWPFFSTRLGMLEMVFSKADLWLADYYDQRLVAKTLWPLGKELRDLLEEDIKVVLAIANDSHLMADLPWIAESIQLRNVYTDPLNVLQAELLYRSRLTEEQGKSPDPRVEQALMVTIAGVAAGMRNTG

SEQ ID NO: 36787 - protein, 340 aa, Triticum aestivum
  misc_feature (146)..(146): Xaa can be any naturally occurring amino acid
  misc_feature (244)..(244): Xaa can be any naturally occurring amino acid
  unsure (1)..(340): unsure at all Xaa locations
NPPKFLRESFESKKPQKESTLHLVLRLRGGMQIFVKTLTGKTITLEVESSDTIDNVKAKIQDKEGIPPDQQRLIFAGKQLEDGRTLADYNIQKESTLHLVLRLRGGMQIFVKTLTGKTITLDVESSDTIDNVKAKIQDKEGIPPDXQRLIFAGKQLEDERTLADYNIQKESTLHLVLRLRGGMQIFVKTLTGKTITLEVESSDTIDNVEAKIQDKEGIPPDQQRLIFAGKQLEDGRTLADYNIXKESTLHLVLRLRGGIQIFVKTLTGKTITLEVESSDTIDNVKSKIQDKEGIPPDQQRLIFAGKQLEDGRTLADYNIQKESTLHLVLRLRGGLWWPFN

SEQ ID NO: 36788 - protein, 413 aa, Photobacterium profundum SS9
MSKRRVVVTGMGMLTPVGNSVESSWKALLSGTSGISTIEHFDASLFATQFAGMIKDFNPEEYMTKKDARKMDLFIQYGIAAGVQAFKDSGIEVTEENAHRIGVAIGSGIGGLGLIEAGHQALMEKGPRKISPFFVPSTIVNMIAGHMSIMHGLRGPNIAISTACTTGLHNIGHAARMIAYGDADAMLAGGAEKASTELGMGGFAAAKALSTRNDDPQAASRPWDKDRDGFVLGDGAGVIVVEEYEHAKARGATIYAELVGFGMSGDAYHMTSPSPDGSGGALAMEATLRDAGINADKIGYINAHGTSTPAGDAAETRGIKRAMGTAADDVLVSSTKSMTGHLLGAAGSVEAIISIMSLVDQAVPPTINLDNPDEGCDLDYVAGEARQVKNLEYSLCNSFGFGGTNGSLLFKKI

SEQ ID NO: 36789 - protein, 97 aa, Shigella flexneri 2a str. 301 [sequence omitted]

SEQ ID NO: 36790 - protein, 548 aa, Shigella flexneri 2a str. 301
MAAKDVKFGNDARVKMLRGVNVLADAVKVTLGPKGRNVVLDKSFGAPTITKDGVSVAREIELEDKFENMGAQMVKEVASKANDAAGDGTTTATVLAQAIITEGLKAVAAGMNPMDLKRGIDKAVTAAVEELKALSVPCSDSKAIAQVGTISANSDETVGKLIAEAMDKVGKEGVITVEDGTGLQDELDVVEGMQFDRGYLSPYFINKPETGAVELESPFILLADKKISNIREMLPVLEAVAKAGKPLLIIAEDVEGEALATLVVNTMRGIVKVAAVKAPGFGDRRKAMLQDIATLTGGTVISEEIGMELEKATLEDLGQAKRVVINKDTTTIIDGVGEEAAIQGRVAQIRQQIEEATSDYDREKLQERVAKLAGGVAVIKVGAATEVEMKEKKARVEDALHATRAAVEEGVVAGGGVALIRVASKLADLRGQNEDQNVGIKVALRAMEAPLRQIVLNCGEEPSVVANTVKGGDGNYGYNAATEEYGNMIDMGILDPTKVTRSALQYAASVAGLMITTECMVTDLPKNDAADLGAAGGMGGMGGMGGMM

SEQ ID NO: 36791 - protein, 430 aa, Legionella pneumophila str. Paris
MKRRVAITGLGVVSPLGNDVSTTWNNLIAGHSGIDSIKQFDASAFPTTIAAEVKNFSPDTSISGKHTRFIMSFTHFALEAARQAFEDASIFPTKQTSDRWGIVTGSGMMTAEFEYLTRFQQTCAAGGEIDWGKLQSNSRDFYNLVDFGKTTSNSGLSLLIQQYGITGYASSVHTACASGGQALGLAMQVIRRGEADFMLAGGFDSMINPLGLSSFCLLGALSTYNETPQTASRPFDATRNGFVLGEGAAFLILEEWSKAKARGAKIYAELAGEGNSLSSYRITDSHPNGDGAIQAIKRALEDAGVQPRDVDYINAHGTSTKMNDLSETNAIKVVFGDRIANLPVSSTKSQTGHLIAAAGALEAVLSVKSIEQAQVPKTANLKTPDPECDLDYVVDGPREKSLGVVLSNSFGFGGSNSCLLFKHPEFEEAK

SEQ ID NO: 36792 - protein, 414 aa, Prochlorococcus marinus str. MIT 9312
MPNFHRVVITGIGAVTPIGNNIDEYLLSLQKGANGVSGITLFDPVDHPCKFAAEVKNLQSQNFIEAKESKRWDRFSQFGVIAAKQAFNDSGLEINEANASRIGVIIGSGVGGLLTMESQAQILSHKGPKRVSPFTVPMMIPNMATGLAAIALGAKGPSSSVSTACAAGSNAIGDSFRLLQLGKADAMICGGAEASITPLGVAGFASAKALSFRNESPQTASRPFDAERDGFVIGEGSGILVLETLENAQKRDARIYGEIIGYGTTCDAHHITAPSPGGVGGAEAIKLAIEDSSISLDEVDYINAHGTSTSANDKNETSAIKSIFKDRSYLIPVSSTKSMTGHLLGGSGGIEAVACILSLTHNFIPPTINYVNPDPDCDLDYVPNNAREARLGVALSNSFGFGGHNVCLAFSKMN

SEQ ID NO: 36793 - protein, 463 aa, Capsicum annuum
MLILSAASSSARISRPPLSSFSTFAASAATTSRLFPISCFGVKSTTVGNRKLQCAVFCASLKVRGMAEMIEDNKELNSSTAAAAAAIAVTASENDELPHSRAFLDARTGEDLLSAVRKAVEDKKLPLNIAEGMEELYQNYRNAVLQSGVPKADEIILYNMALVLDRVFVDVKDPFEFSPYHKAIREPFDYYKFGQNYIRQLVDFRSSYVGNISVFGEMEEKLKQGDNVVLMSNHQSEADPAIIALLLELKHPDIAENIIYVAGDRVITDPLCKPFSMGRNLLCVYSKKHMNDDPELADMKKRANTRSLKEMAMLLRGGSKLIWIAPSGGRDRPDPVTKEWSPAPFDASATDNMRRLVEHAGVPGHIYPLAILCYDIMPPPAQVEKNIGEKRVVSFHGAGVSVAPKIDFREVAGTLEDPEAKMVYTKALYDSVSQQYNVLNSAIHGKQGLEASIPSVSLSQPWQ

SEQ ID NO: 36794 - protein, 668 aa, Prochlorococcus marinus str. MIT 9312
MVAASVSIESLCVNSIRMLAVDAVNKSNSGHPGLPMGCAPMGYALWQNILNHNPNNPKWFNRDRFVLSAGHGCMLLYSLLHLTGYKSVSIEDIKEFRQWGSKTPGHPETFETEGVEVTAGPLGAGISNAVGLAIAETHLAAKFNKPDCNIVDHYTYVIMGDGCNQEGIASEACSLAGHLKLGKLIALYDDNQITIDGRTDVSFTEDVLKRYEAYGWHVQHVEDGNHDVKGITEAIEKAKSITNKPSIIKISTTIGYGSPNKSDTAGIHGAAVGEEEASLTREFLNWEYPPFEIPDEVYKHFRKSIDKGENLEKEWDSRFEEYQKKYPSEGAELKRMLKGQLPENWDSDLPSYTPNDKGLATRKHSQICLGALGPNLPELIGGSADLTHSNYTDIKGETGSFQPHSPEKRYLHFGVREHAMAAVLNGIAYHNSGLIPYGGTFLVFADYMRGSMRLSALSELGVIYVLTHDSIGVGEDGPTHQPIETIPSLRAMPNMLVFRPGDGNETSGAYKLAIKNRKRPSALCLSRQGMPNQENTSIEKVALGGYIVADCEGTPDLIFIGTGSELNLCIEASKEISNLGKKTRVVSMPCIELFEEQEESYKESVLPNSVTKRVVVEAAHSFGWHKYTGFDGICITMDRFGASAPGGECMKNFGFTVENVVNKTKEIL

SEQ ID NO: 36795 - protein, 385 aa, Brassica oleracea var. capitata
MVAHKETVCVTGASGFIGSWLVMRLLERGYFVRATVRDPGNLKKVQHLLDLPNAKTQLTLWKADLSDEGSYDDAINGCDGVFHIATPMDFESKDPENEVIKPTVNGVLGITKACDKAKTVRRIVFTSSAGTVNVEEHQKNVYDENDWSDLDFIMSKKMTGWMYFMSKTLAEKAAWDYAKEKGIDFISIIPTLVIGPFITTSMPPSLITALSPITRNEAHYSIIRQGQYVHLDDLCHAHIFLYEQAAAKGRYICSSHDATILTISEFLRQKYPEYNVPSTFEGVDENLKSIMFSSKKLIDMGFNFKYSLENMLVESIETCRPKGFLPVTLPEHLKSEDRVPGSDDNKEIKNGSAGLTDGMVACKKTEPGMVGEKADSHMSAQQICA

SEQ ID NO: 36796 - protein, 230 aa, Candida albicans SC5314
MSDKEDLNLISDNNRVISMRQLILQLSTTGINKKYKRYTNMFDSTTATQADVTVYKAFQKEFPQFTRWFNHIASFTEEFEDLPAGKAPAASGSAAAAAEEEDDEDVDLFGSDDEVDEEAEKLKQQRLAEYAAKKAAKGPKPAAKSIVTLDVKPWDDETDLDELLTNVKAIEMEGLTWGAHQWIPVGFGIKKLQINLVVEDALVSLDDLQAAVEEDEDHVQSTDIAAMQKL

SEQ ID NO: 36797 - protein, 589 aa, Zea mays
MPAPHSSIEDMASTFGATSTVGLMAAPTGKNVRLQRRANFRVKAAKELYFNKDGSAIKKLQTGVNKLADLVGVTLGPKGRNVVLESKYGSPKIVNDGVTVAREVELEDPVENIGAKLVRQAAAKTNDLAGDGTTTSVVLAQGLIAEGVKVVAAGANPVQITRGIEKTAKALVEELRKLSKEVEDSELADVAAVSADNNYEIGNMIAEAMSKVGRKGVVTLEEGKSSENFLYVVEGMQFDRGYISPYFVTDSEKMTAEYENCKLLLVDKKITNARDLINVLEEAIRGAYPILIIAEDIEQEALATLVVNKLRGSLKIAAIKAPGFGERKTQYLDDIAILTGATVIRDEVGLSLDKADNSVLGTAAKVVLTKESTTIVGDGSTQEEVTKRVAQIKNLIEAAEQEYEKEKLNERIAKLAGGVAVIQVGAQTETELKEKKLRVEDALNATKAAVEEGIVVGGGCTLLRLAAKVDAIKDTLENDEQKVGAEIVRRALSYPLKLIAKNAGVNGSVVTEKVLSNDNFKYGYNAATGQYEDLMAAGIIDPTKVVRCCLEHAASVAKTFLTSDVVVVDIKEPEATPVANPMDNSGYGY

SEQ ID NO: 36798 - protein, 453 aa, Candida albicans SC5314
MDLVIMNFVFLLYLTSVVKCSIKLDFNKVSTPSKYTKRDALPMPLINDKILYTTELEIGSNKDKVSVSIDTGSYDLWVMSNDAVCYKVSEFQTEGAPQLPDIFNDIDQDYSCTFNGTYNSKSSKTFKNTSEDFSIGYVDGSAAQGVWGYDSVQFGQYGVTGLKIGIANRSSVSDGILGIGIANGYDNFPVLLQKQGLINKIAYSVYLNSSNSTTGTILFGAIDHAKYKGALSTVPVDSKSQLSVNVTNLKTKNGNVASGGHSILLDTGSTFSIFPDEWIDALGHSLNATYDEDESVYEIECDGYDEHFFGFSIGDSDFSVPIQDLKTEKDGQCYLAIMSNSVIGGGGILFGDDILRQIYLVYDLQDMTISVAPVVYTEDEDIEEILNPNEDQNEVPTSTSFTQSASSSGSQPSSTISGENMDKNTTSSSSGNCQTRSWIAILSALFLVYIHII

SEQ ID NO: 36799 - protein, 145 aa, Streptococcus pyogenes SSI-1
METSDELKQRIGELSYEVTQHAATESPFTGEYDDFFEKGIYVDIVSGEVLFSSLDKFNSGCGWPAFSKPIENRMVTNHDDSSYGMRRVEVKSREAGSHLGHVFSDGPKEAGGLRYCINSAALKFIPYDQMEKEGYAQWLTLFDET

SEQ ID NO: 36800 - protein, 247 aa, Datisca glomerata
MALEALNSPTTATPVFHYDDPSLNYLEPWTKRKRSKRTRLDSPHTEEEYLAFCLIMLARGRVASANRRDSQSSIQIQPEATTSATKVSYKCSVCDKAFSSYQALGGHKASHRKLAGGEDQSTSFATTNSATVTTTTASGGGGRSHECSICHKSFPTGQALGGHKRCHYEGSIGGNSIHHHNNTTNSGSNGGMSMTSEVGSTHTVSHSHRDFDLNIPALPEFRSNFFISGDDEVESPHPAKKPRILMK

SEQ ID NO: 36801 - protein, 666 aa, Thiomicrospira crunogena XCL-2
MNTSNKSVQPQLGRRQFVKGIALSTISAAIGSHLPSAWAKEEFSAIGAGNLNPKQPVLIGPEFDLTISETPVNITGSPVKATLINNSLPAPTLVWREGETVTIRVKNTLSVDTSIHWHGIILPFQMDGVPGLSYDGIKPGETFTYQFTVQQHGTYWYHSHSEFQEQTGLYGALVILPKKADPLDYDHDFVIQLSDWSDSAPDTLYSNIKKMGDYYNYSQRTVGDFWHEVKTYGFSKAWEKRKMWNQMRMTDRDLSDVTGATYTYLMNGLSPKAHWRTVIESGKKVRLRFVNSSAMTFFDVRIPGLKMTVVAADGNLVQPVEIDEFRIGVAETYDVIVEPDTSKQAYAIFAQAIDRSGFAMGSITSDPTQLADSPEMDPLPILSMTDMGMEMDMGSTSHPMNMDGEMEGMNPSSQPMNMNTDSQRMTPSDHNSMNGTKHDMSSMQQQDYGHALAMEKSQMGKDVSNVDHSKHSHGMENMNVNLDDITIPMDMNPQLPQIKTPSAEGAQIGMRAMAPQYRLDDPGVGLRENGRKVLTYADLKNRFPTRHHPKPTKELVMHLTGNMERYMWSINGIPFEEAEPLNFQYGDRVRITFINDTMMNHPMHLHGVWSDLETGDENHIPRKHTVIVQPGSKISYRVTMDAKGDWAYHCHLLYHMMGMFRKVQIR

SEQ ID NO: 36802 - protein, 509 aa, Ricinus communis
MPIPHAEQSRARAARTSATAAARPPAAVVKRVSLRKLLRVTSIAGGIQFGWALQLSLLTPYVQELGIPHAWASIIWLCGPLSGLVVQPLVGHMSDRCTSRFGRRRPFIFVGAGLICCSVLIIGHSADIGWLLGDRGETRPRAIAVFIIGFWILDVANNMTQGPCRALLADLTGKDHRRTRVANAYFSLFMAVGNVLGYATGSFSNWFKVFPFTVTSACNIDCANLKSAFYLDIVFMVITTYMSITATKESPIGLSDRSSLITEEISEQSGHAQEAFLWELLGTFRYFPWPVWTILLVTALNWIGWFPFLLFDTDWMGREIYGGAPNDGHNYNSGVRMGAFALMVNSVILGLTSVLMEKLCRKWGAGFMWGISNILMALCFLAMLITSYIANHIGYLGHDLPPSGIVIAAIIIFAVLGFPLAITYSVPYALISSRIEPLGLGQGLSMGVLNLAIVIPQVIVSLGSGPWDQLFGGGNSPAFVVGALAAFAAGVIAILGIPRSGAPKPRVLP

SEQ ID NO: 36803 - protein, 300 aa, Pneumocystis carinii
MEQYQRLEKIGEGTYGVVYKAKDLESGTIVALKKIRLEAEDEGVPSTAIREISLLKEMHNDNVVRLLNIIHQESRLYLVFEFLDLDLKKYMNSIPKDMMLGAEMIKKFMSQLVSGVKYCHSHRILHRDLKPQNLLIDREGNLKLADFGLARAFGVPLRGYTHEVVTLWYRAPEVLLGGRQYATALDIWSIGCIFAEMATKKPLFPGDSEIDEIFRIFRILGTPDENSWPGITSYPDFKATFPKWSPKNLGELITELDSDGIDLLQKCLRYYPAERISAKKALDHPYFDDFINLNRSNVVL

SEQ ID NO: 36804 - protein, 604 aa, Bifidobacterium adolescentis
NFNRSTLSDTVRSNGATPNPWWANAVVYQIYPRSFQDSNGDGIGDLKGITSRLDYLADLGVDVLWLSPVFKSPQDDNGYDISDYQDIDPLFGTMADMDELLAEAHKRGLKVIMDLVVNHTSDEHAWFQASRDKNDPHADWYWWRPAKPGHEPGTPGAEPNQWGSYFGGSAWEYDPKRGEYFFHQYSKKQPDLNWENPEVRKAVYKMMNWWMDRGIDGFRMDVITQISKVIDKNGKLPGEAGSEIADNPVGEEGYSSPYPFCSDGPRIDEFLAEMRREVFEGREGYMNVGEAPGITPARNEHVTDPANKELDMLFLFDHVGIDQEGSKWNTVPFEVKNLRDRMTEQQEAVRKAGWASLFFCNHDQPRVVSRWGNDSDRDSRELSAKAFGMVLHMHRGTPYIYEGEELGMTNAHFTKLEQYRDLEALNGYRQRVEEAKCQSSESMMAALALIGRDNARTPMQWDASKYAGFTPADAAAEPWISVNPNHVEINAAEEFDDPDSVYTFYKKLIAMRHNSATISTGEWHLLAADSDQVYAFTRTNGDDTILVVVNLTDRSAALPSDVAELLSDGVSDPQVLLSTYDAMHSVKSIARGELARWEGVVIQL

SEQ ID NO: 36805 - protein, 258 aa, Arabidopsis thaliana
MQVLVVSPPLIAAASLSKPLNSLSKAALSFSRAKPICPFPQTSRRPISVYKSPMNNLFNRLGFGSRPQAQADPSSAAIAQGPDDDVPSSGQQFAQFGAGCFWGVELAYQRVPGVTKTEVGYSHGIVHNPSYEDVCTGTTGHNEVVRVQYDPKECSFESLLDVFWNRHDPTTLNRQGGDVGTQYRSGIYYYTDEQDRIAREAVEKQQKILNKRIVTEILPATKFYKAENYHQQYLAKGGRMGLRQSAEKGCKDPIRCYG

SEQ ID NO: 36806 - protein, 300 aa, Pneumocystis carinii
MEQYQRLEKIGEGTYGVVYKAKDLESGTIVALKKIRLEAEDEGVPSTAIREISLLKEMHNDNVVRLLNIIHQESRLYLVFEFLDLDLKKYMNSIPKDMMLGAEMIKKFMSQLVSGVKYCHSHRILHRDLKPQNLLIDREGNLKLADFGLARAFGVPLRGYTHEVVTLWYRAPEVLLGGRQYATALDIWSIGCIFAEMATKKPLFPGDSEIDEIFRIFRILGTPDENSWPGITSYPDFKATFPKWSPKNLGELITELDSDGIDLLQKCLRYYPAERISAKKALDHPYFDDFININRSNVVL

SEQ ID NO: 36807 - protein, 439 aa, Oryza sativa (japonica cultivar-group)
MAMPFASLSPAADHRPSFIFPFCRSSPLSAVGEEAQQHMMGARWAAAVARPPPFTAAQYEELEQQALIYKYLVAGVPVPADLLLPIRRGLDSLASRFYHHPVLGYGSYFGKKLDPEPGRCRRTDGKKWRCSKEAAPDSKYCERHMHRGRNRSRKPVEAQLVAPHSQPPATAPAAAVTSTAFQNHSLYPAIANGGGANGGGGGGGGGGSAPGSFALGSNTQLHMDNAASYSTVAAGAGNKDFRYRAPPFLWALAMLSGTRFLPDKNLNVALVPGNGVGALVESYKGRAGEQAVFLYSAYGVRPLADEHSPLITGAMDTSIDNSWCLLPSQTSTFSVSSYPMLGNLSELDQNTICSLPKVEREPLSFFGSDYVTVDSGKQENQTLRPFFDEWPKARDSWPDLADDNSLATFSATQLSISIPMATSDFSTTSSRSHNGIYSR

SEQ ID NO: 36808 - protein, 438 aa, Glycine max
MGEKSNVGGDAINTTLLHGKYELGRLLGHGTFAKVYHARHLKTGKSVAMKVVGKEKVVKVGMMEQIKREISAMNMVKHPNIVQLHEVMASKSKIYIAMELVRGGELFNKIARGRLREEMARLYFQQLISAVDFCHSRGVYHRDLKPENLLLDDDGNLKVTDFGLSTFSEHLRHDGLLHTTCGTPAYVAPEVIGKRGYDGAKADIWSCGVILYVLLAGFLPFQDDNLVALYKKIYRGDFKCPPWFSSEARRLITKLLDPNPNTRITISKIMDSSWFKKPVPKNLMGKKREELDLEEKIKQHEQEVSTTMNAFHIISLSEGFDLSPLFEEKKREEKELRFATTRPASSVISRLEDLAKAVKFDVKKSETKVRLQGQEKGRKGKLAIAADLYAVTPSFLVVEVKKDNGDTLEYNQFCSKELRPALKDIVWRTSPAENPTLA

SEQ ID NO: 36809 - protein, 375 aa, Triticum aestivum
  misc_feature (65)..(65): Xaa can be any naturally occurring amino acid
  misc_feature (76)..(76): Xaa can be any naturally occurring amino acid
  unsure (1)..(375): unsure at all Xaa locations
TSLYKKAGWYRSGIPGISSTHASVMVPELRKMVSVSGTPLERLGAYMVEGLVARLASSGHSIYKXALRCKEPKSSXDCSSYMHFLYEACPYFKFGYMSANGAIAEAVKGEDRIHIIDFHIAQGAQWISLLQALAARPGGPPTVRITGLDDSVSAYARGGGLDLVGRRLSHIAGLCKVPFEFHSVAMAGEEVEEGHLGVIPGEALAVNFTLELHHIPDETVSTANHRDRILRLVKSLRPKVLTLVEQESNTNTAPFPQRFAETLEYYTAIFESIDLTLPRDDKERVNMEQHCLAREVVNLIACEGAERVERHEVFGKWKARLTMAGFRPSPLSSLVNATISTLLQSYSENYKLAERDGALYLGWKNKPLVVSSAWH

SEQ ID NO: 36810 - protein, 334 aa, Prochlorococcus marinus str. MIT 9312
MRTSFRHFEQNKIVDLVGLGNAIVDIIVNTEDEFLEINNLEKGSMNLINSDQSQTLLNNCKVIKQISGGSSANTVVCLAELGNDVQFIGRVKNDQFGNFFSSDIKKSKTTFNTPPTEEGAATAHSIILITPDAQRTMCTYLGASIEFEPKDIDFSVLKESKYLYLEGYLWDSELAKNAFLKAAQIAKLSNTKIILSLSDSFCVDRHRESFLELIDNYVDIVFCNESEVLSLFKKDKLANCQGDLSSLCELVVVTLGRNGSLIINKNDVEVIKSITTEKIIDTTGAGDIYAGGFIHGLINNYSLKKCGEIGSICAGQIITQLGSRSNIDLKKLIS

SEQ ID NO: 36811 - protein, 377 aa, Debaryomyces hansenii CBS767
MPSAVQLAEKNHEKDSKFAKALHGESYKQTGLKALMSKARDASEVANDGYFKHWDGGVTKEDEDKRLSDYSNLTAHYYNLVTDFYEYGWGSSFHFSRYYTGEAFRQATARHEHFLAHKMQINENMKVLDVGCGVGGPAREICRFTDCSIVGLNNNDYQIERANHYARKYKLDDKLSFVKGDFMQMDFEAESFDAVYAIEATVHAPVLEGVYSEIYKVLKPGGVFGVYEWVMTDKYDDENEEHRKIAYGIEVGDGIPKMYKREVAEKALKSVGFEIEYEADLADKEDDIPWYYPLSGEWKYVQTLSDYFTIFRTSKVGRTITTEAVGLMEKLGLAPKGSKQVTNALEDAAVNLVEGGRQKLFTPMMLYVCRKPANEDI

SEQ ID NO: 36812 - protein, 591 aa, GIBBERELLA ZEAE PH-1
MATAHMAVRTDTFPHSTSRSHSHSHQSMGARIIPIPTPTIKMSPPSNGDPMEITSPAPSSNGNHNSDSEANGNGQSNDRPKNSPAPDSNTVTSNSVNNSNSMPAPPPAAAAVHQPKIVQTAFIHKLYNMLEDPNIQHLISWSASAESFVMSPSADFSKVLSQYFKHTNISSFVRQLNMYGFHKERDVFHTGNPDTTLWEFKHGNGNFKRGDLVGLREIKRRASRHALVHRESNYTKPVTSQPGTPAEPVPLPPDSADARLLNIEHTLFDLSNRLQRSEENAHYMHVKNQAAMETMNRLLHFNQELSRTMLSIVPAESPISRDVIALQGEIQRQVDVLRTIEEPPQEPPYTGRQQYFAGVENAPVSPRQLAQDDQRRGPTLNVPSARSQNFYKPPVPSNLSAGTRRQYGSISGGSTTQSSPLRTAPPPPPPAPHPLSNVETVPGPGSLARRHTAADIRAHGWQPTPSPFASGAPSGAWPPSPSRAAPEEQRIRDSLSTYSLQNASQAHPHSRPTTPPPPFVNGLGGGSDTFGGWSWGSAGRENKNLSVKDHSAPTTRRGSMAHILNPSDTAERSDEDEDPRGDDDRKRKRMQ

SEQ ID NO: 36813 - protein, 299 aa, Triticum aestivum
MGNASGREEDAAAPGEADAADVDVEDGGDDSSARGFPPYGGGANHVRRACSVGVVGASGGPGSPPVSPGRSLSPRMFVPQTPVPPLQRPADVTPVFNEILMNEQEEEFDGPPQKEIPALIVWTLGGKNVSVEGSWDNWKSRKPMQKSGKDHSLLLILPSGVYRYRFVVDGERRCFPDLPCETDAMGNAVNLLDVHDFVPESVESVSEFEAPPSPESSYSFQAPEEKDFANEPPALPSQLHLGVLNSQNSEEICARPQHIVLNHLFIEKGWGAHPLVALGVTHRFESKYVTVVLYKPIER

SEQ ID NO: 36814 - protein, 379 aa, Streptococcus pneumoniae TIGR4
MKIDKYSAILGNTVGFHNMSTLTDHRPVASLPFGGKYRLIDFPLSSLANAGVRSVFGIFQQDNISSVFDHIRSGREWGLSTLLSHYYLGIYNTRVESSTVGKEYYQQLLTYLKRSGSNQTVALNCDVLINIDLNQVFHLHSTTKEPITVVYKKLAKKDISEVNAILDVDETDHVLSHKLFDSKSTAETFNMSTDIFVVDTPWLIEHLEEEAKKEHPEKLRYVLRDLAVKEGAFAYEYTGYLANIHSVKSYYQANIDMLESQKFYSLFSPNQKIYTKVKNEEPTYYANTSKVSTSQFASGSIIEGQVANSVLSRNIHVHKDSLVKDSLLFPRVVIGEGAQVEYAILDKGVEVEHGVVIRGTAEHPVVVKKGAKVTEDIHS

SEQ ID NO: 36815 - protein, 277 aa, Brassica napus
  misc_feature (72)..(72): Xaa can be any naturally occurring amino acid
  misc_feature (108)..(108): Xaa can be any naturally occurring amino acid
  unsure (1)..(277): unsure at all Xaa locations
MSLFLKDDSIQIREVWSDNLQEEMDLIREVVDDFPYVAMDTEFPGIVVRPVGTFKSNADYHYETLKLNVNIXLNIIQLGLTFSNEQGNLPHPAAPTGKYCIWQFNSRXFVLDSDFFPVDSIDLPKQSGIDFAKTTPQGIESSRFPELLMSSGIVLNGNVHWVTFHSGYDFGYLLKLLTCKNLPDSQTSFFELINVYFPTVYDIKHLMKFCNSLHGGLNKLAELLEVERVGICHQPGLDSLLTSCTFRKLKENFFVGPLQKYAGVLYGLGVENGQVAL

SEQ ID NO: 36816 - protein, 209 aa, Arabidopsis thaliana
MVSLKIQKRLAASVMKCGKGKVWLDPNESGDISMANSRQNIRKLVKDGFIIRKPTKIHSRSRARALNEAKRKGRHSGYGKRKGTREARLPTKILWMRRMRVLRRFLSKYRESKKIDRHMYHDMYMKVKGNVFKNKRVLMESIHKMKAEKAREKTLADQFEAKRIKNKASRERKFARREERLAQGPGGGETTTPAGAPQQPEVTKKKSKK

SEQ ID NO: 36817 - protein, 462 aa, Synechococcus elongatus PCC 7942
MRTIRAELQQFLQLAIPLAAAQVAQAAVGFVDTVMMGRLGPEPLAAGGLASALFQFILATASGVVMAVSPLVAEAQGAGKDYKIAAIARQGLWLSVLLGLPVMLIISQLARLMPVLGQSATTIALARDYWMAVLWGIIPGLGFAMLRGYVAALEQARIILPLVLFGTLVNGLGNYLLGYGQLGFPRLELTGLGLSSALGLWVMFLGLLAYTAWQPKLRRYPFWQDWRRLQPSICRQILQLGWAIAVTVAVEFGLFTIITILMGAIGVEALAAHQTVSQTIILIFMVPLGCSFAVTVRVGWWLGRQDGLGARRAGLVGVGAIALWMLLLAIPLALFPRAIVGIYVDLNNPVNAGLLNLALPMLRVASLALVLDGVQRVAMGALHGLQDTRIPLLLSLLAFWMVGVGSSAMLGFQLGWGSTGLWIGQSLGVAIAGGLFLQRFLKLTQNRTFKQRLQPQPLATHP

SEQ ID NO: 36818 - protein, 179 aa, Fritillaria agrestis
MASSATMLSSVATAACVAPAQASMVAPFVGLKSASAFPVTQKTVTGLSTLPSNGGRVQCMKVWPIVGLKKFETLSYLPTLSVESLLKQIEYLIRNGWVPCLEFSLEGFVSRDNNKSPGYYDGRYWTMWKLPMFGCTDAAQVVKEAAECKKEYPAAFIRVIGFDNVRQVQCVSFIVEKPE

SEQ ID NO: 36819 - protein, 334 aa, Agrobacterium tumefaciens str. C58
MPLRLFLLKTCKVTLYPMKHSNGSLSMSATKLAIVGVGKIVRDQHLPAIAGNPDFELICTASRHGTVDGVSSYGTIEAMLEAEPAINAVSLCMPPQYRYEAAYAALNAGKHVFLEKPPGATLSEVQDLARLADSKGLSLFASWHSRYAPAVEAAKAFLASTTIDSVHVIWKEDVRHWHPNQAWIWQAGGLGVFDPGINALSIITHILPRALFLTKATLEFPENRDAPIAADLHFSDVEKTPVHAEFDWRQTGKQSWDIVAETAAGRMVLSEGGAKLSINGEEKLSQPEREYPALYERFAEIIKAGRSDVDLAPLTHVADAFLLGRHKFVDSFYD

SEQ ID NO: 36820 - protein, 500 aa, Arabidopsis thaliana
MEGQTLIFTFLFISLSLTFIIGRIKRRPNLPPSPSWALPVIGHLRLLKPPLHRVFLSVSESLGDAPIISLRLGNRLVFVVSSHSLAEECFTKNDVVLANRFNSLASKHISYGCTTVVTASYGDHWRNLRRIGAVEIFSAHRLNSFSSIRRDEIHRLIACLSRNSSLEFTKVEMKSMFSNLTFNNIIRMLAGKCYYGDGAEDDPEAKRVRELIAEGMGCFGAGNTADYLPILTWITGSEKRIKKIASRLDEFLQGLVDERREGKEKRQNTMVDHLLCLQETQPEYYTDNIIKGIMLSLILAGTDTSAVTLEWTLSALLNHPQILSKARDEIDNKVGLNRLVEESDLSHLPYLQNIVSESLRLYPASPLLVPHVASEDCKVGGYHMPRGTMLLTNAWAIHRDPKIWDDPTSFKPERFEKEGEAQKLLGFGLGRRACPGSGLAQRLASLTIGSLIQCFEWERIGEEEVDMTEGGGGVIMPKAIPLVAMCKARPVVGKILNESA

SEQ ID NO: 36821 - protein, 179 aa, Fritillaria agrestis
MAASSTMLSSVATAACAAPAQASMVAPFVGLKSTSAFPVTQKPATGLSTLPSNGGRVQCMKVWPIVGLKKFETLSYLPTLSVESLLKQIEYLIRNGWVPCLEFSLEGFVSRDNNKSPGYYDGRYWTMWKLPMFGCTDAAQVVKEAAECKKEYPAAFIRVIGFDNVRQVQCVSFIVERPE

SEQ ID NO: 36822 - protein, 173 aa, Flaveria pringlei
MASIPATVATVAQANMVAPFTGLKANAAFPVTKKVNDFSTLPSNGGRVQCMKVWPPLGKKKYETLSYLPDLTEVQLAKEVDYLLRNKWVPCLEFELEHGFVYRENARSPGYYDGRYWTMWKLPMFGCTDSAQVMKELQECKKEYPQAWIRIIGFDNVRQVQCISFIASKPGGF

SEQ ID NO: 36823 - protein, 259 aa, Bacillus cereus ATCC 14579
MTRNKVEICGVDTAKLPVLKNEEMRKLFREMQSGEISAREKLVNGNLRLVLSVIQRFNNRGEYVDDLFQVGCIGLMKSIDNFDLGQNVKFSTYAVPMIIGEIRRYLRDNNPIRVSRSLRDIAYKALQVREKLIAENSKEPTAMDIAKVLEVTHEEIVFALDAIQDPVSLFEPIYNDGGDPIFVMDQLSDEKQKDEQWVEELALKEGMKRLNDREKMIIRKRFFQGKTQMEVAEEIGISQAQVSRLEKSAIKQMNKTIQG

SEQ ID NO: 36824 - protein, 394 aa, Prochlorococcus marinus str. MIT 9312
MNRDECFQKIDSFNDELINLRRHIHAHPELSGLENQTAILISGYLKNIGWNVRESIGRTGVIADFGPLDKGIIGLRVDMDALPIFEETKLSFCSKVDGVMHACGHDLHISIGLGVAKIVRDLKLNFRTRIIFQPAEEIASGARWMIKDGATDGLTHILGVHVYPNLSVGTIGIKEGSLTAAAGELKVEIKGKSGHGARPHEGIDAIWVASKVISGIQELITRKLDPLDPVVITFGKINGGNAFNVLAENVNLIGTVRCTNLKLFKNIGNWLNENISSIANSCGAEAKVFFREITPPVNNNFEINRVLRDSGINVLGQENVIELQKPSLGAEDFAEFLNEIPGAMFRLGVSSSNGCAPLHSSKFDPDERAIAIGIKVITEAIVKLNSEIINTVDK

SEQ ID NO: 36825 - protein, 178 aa, Flaveria pringlei
MASISSTVATVSRAAPAQANMVAPFTGLKSNVAFPATKKANDFSTLPSNGGRVQCMKVWPPLGKKRYETLSYLPNLTEAQLAKEVDYLLRNKWVPCLEFELEHGFVYRENARSPGYYDGRYWTMWKLPMFGCTDSAQVMKELQECKKEYPQAWIRIIGFDNVRQVQCISFIASKPEGF

SEQ ID NO: 36826 - protein, 346 aa, Magnaporthe grisea 70-15
MAKYMSLDQKGSIMAEYVWIDSEGGVRSKSRTLKEQKYEPKDLPTWNFDGSSTGQAGGDNSDVFLKPVAVYPDPFRGEPNIIVLAECWDSDGTPNKFNHRHEAAKLMEAHAEHEPWFGLEQEYTLLNLEDRPFGWPKNGFPAPQGPYYCGVGAGKVVQRDIVEAHYKACLYAGVKISGTNAEVMPAQWEFQVGPCEGIEMGDHLSIARFLLHRVAEEFGAKVSFDPKPIPGDWNGAGLHSNFSTKEMRVDGGMKHIEAAIKKLEGRHKEHIAVYGEGNEKRLTGSHETGSIEEFSYGIANRGASIRIPRECAAKGYGYFEDRRPASNADPYQITGIIMETCFGAVN

SEQ ID NO: 36827 - protein, 179 aa, Fritillaria agrestis
MASSATMLSSVATAARAAPAQASMVAPFVGLKSASAFPVTQKPATGLSTLPSNGGRVQCMKVWPIVGLKKFETLSYLPTLSVESLLKQIEYLIRNGWVPCLEFSLEGFVSRDNNKSPGYYDGRYWTMWKLPMFGCTDAAQVVKEAAECKKEYPAAFIRVIGFDNVRQVQCVSFIVEKPE

SEQ ID NO: 36828 - protein, 319 aa, Nicotiana benthamiana
FYPMAGRLCRDEDGRIEIDCKGQGVLFVEAESDGVVDDFGDFAPTLELRQLIPAVDYSQGIQSYALLVLQITHFKCGGVSLGVGMQHHAADGASGLHFINTWSDMARGLDLTIPPFIDRTLLRARDPPQPQFPHVEYQPPPTLKVTPENTTNPEIVPETSVSIFKLTRDQINTLKAKSKEDGNTVNYSSYEMLAGHVWRSTCMARGLAHDQETKLYIATDGRSRLRPSLPPGYFGNVIFTTTPIAVAGDIQSKPIWYAASKLHDALARMDNDYLRSALDYLELQPDLKALVRGAHTFKCPNLGITSWSRLPIHDADFGW

SEQ ID NO: 36829 - protein, 179 aa, Fritillaria agrestis
MASSATMLSSVATAACAAPAQASMVAPFVGLKSASAFPVTQKTATGLSTLPSNGGRVQCMKVWPIVGLKKFETLSYLPTLSVESLLKQIEYLIRNGWVPCLEFSLEGFVSRDNNKSPGYYDGRYWTMWKLPMFGCTGAAQVVKEAAECKKEYPAAFIRVIGFDNVRQVQCVSFIVEKPE

SEQ ID NO: 36830 - protein, 611 aa, Campylobacter coli RM2228
MMNYGIDIWGNDNFIIKNGKVCINHEKKPAIIDIVKELRDDGYKGPLLLRFPHLIQKQIESIYGSFNKARKEFNYKGKFNAVYPLKVNQYPGFVKNLVRLGKDYNYGLEAGSKAELLLAMAYNNEDAPITVNGFKDRELINIGFIAAEMGHNITLTIEGLNELEAIVDIAKERFKPKPNIGLRVRLHSAGVGIWAKSGGINSKFGLTSTELIEAVNLLKENKLLEQFTMIHFHLGSQITEIHPLKKALNEAGNIYTELRKMGAKNLKAINLGGGLAVEYSQFKNEKSRNYTLREYANDVVFILKNIAEQKKDLEPDIFIESGRFVAANHAVLVAPVLELFSQEYTESKLILKKQNPKLIDELYDLYKSIKPSNALEYLHDSIDHLESILTLFDLGYVDLQDRSNAEILTHLITKKAILLLGDKQNPADLLAIQDEVQERYLVNFSLFQSIPDFWGLEQNFPIMPLDRLDEEPTRSASIWDITCDSDGEISYSKNNPLFLHDVDVEKENYFLGFFLVGAYQEVLGMKHNLFTHPTEATISVNEKGYEIEGIIEAQSILDALEDLDYDIHTIMDILNERISNSKLVNEKQKKHILGELYLFLNDNGYLKSIGV

SEQ ID NO: 36831 - protein, 512 aa, Arabidopsis thaliana
  misc_feature (236)..(236): Xaa can be any naturally occurring amino acid
  misc_feature (308)..(308): Xaa can be any naturally occurring amino acid
  misc_feature (327)..(327): Xaa can be any naturally occurring amino acid
  misc_feature (392)..(392): Xaa can be any naturally occurring amino acid
  misc_feature (442)..(442): Xaa can be any naturally occurring amino acid
  unsure (1)..(512): unsure at all Xaa locations
FKLPNPFSNEYGNHHDGLKLIVLKEPTGHEIKQKYKLGRELGRGEFGVTYLCTEIETGEIFSCKSILKKKLKTSIDIEDVKREVEIMRQMPEHPNIVTLKETYEDDKAVHLVMELCEGGELFDRIVARGHYTERAAASVIKTIIEVVQMCHKHGVMHRDLKPENFLFANKKETASLKAIKLSLSVYIKPGEKFNEILGSPYYMAPEVLRRSHGQDIHIWSAGVILYILLCGVPPFXAETEHGVAKAILKSVINFKRDPWPKVSDNAKDLIKKMLHPDPRRRLTAQQVLDHPWIQNGKNASNVSLGETXRARLKQFSVMNKLKKRALXRVSAEHLSVEETSCIKERCQVMDTSNRGKITITELGIGLQKLGIVVPQDDSQILMEAGDVDKDGXLDVNEFVAISVHNRKLGNDEHLMNVFTFFDKYKSGYIEIEELRDALADDXDTTSEEVVEAIILDVDTNKDGKISYDEFATMMKTGTDWRKASRQYSRDLFKCLSLKLMQDGSLQSNGDTK

SEQ ID NO: 36832 - protein, 602 aa, Shigella flexneri 2a str. 301
MQTFQADLAIVGAGGAGLRAAIAAAQANPNAKIALISKVYPMRSHTVAAEGGSAAVAQDHDSFEYHFHDTVAGGDWLCEQDVVDYFVHHCPTEMTQLELWGCPWSRRPDGSVNVRRFGGMKIERTWFAADKTGFHMLHTLFQTSLQFPQIQRFDEHFVLDILVDDGHVRGLVAINMMEGTLVQIRANAVVMATGGAGRVYRYNTNGGIVTGDGMGMALSHGVPLRDMEFVQYHPTGLPGSGILMTEGCRGEGGILVNKNGYRYLQDYGMGPETPLGEPKNKYMELGPRDKVSQAFWHEWRKGNTISTPRGDVVYLDLRHLGEKKLHERLPFICELAKAYVGVDPVKEPIPVRPTAHYTMGGIETDQNCETRIKGLFAVGECSSVGLHGANRLGSNSLAELVVFGRLAGEQATERAATAGNGNEAAIEAQAAGVEQRLKDLVNQDGGENWAKIRDEMGLAMEEGCGIYRTPELMQKTIDKLAELQERFKRVRITDTSSVFNTDLLYTIELSHGLNVAECMAHSAMARKESRGAHQRLDEGCTERDDVNFLKHTLAFRDADGTTRLEYSDVKITTLPPAKRVYGGEADAADKAEAANNKEKANG

SEQ ID NO: 36833 - protein, 149 aa, Geobacter sulfurreducens PCA
MAASPKDPLDWAALLQLQMDEAFDFILRSEAGSVAECDLSPPVDIFETPDAFSVEFDLPGTDPADLSLKLCCNMLILEGVKRDDSREGGSYLCLERRFGRFCRTVEIPPTVDVSAVRADYRRGVLTVTFPRLSDRRKVMRDIPIIQGDN

SEQ ID NO: 36834 - protein, 94 aa, Alkaliphilus metalliredigenes QYMF
MNIKPLGDKVVIKKVEAEDKTKSGIVLPGSAKEQPQMAEVVAVGPGGVVEGKEIIMELKVGDKVIFSKYAGTEVKLDGEEYTILRQNDILAVVE

SEQ ID NO: 36835 - protein, 547 aa, Alkaliphilus metalliredigenes QYMF
MAKEIRFGEKARRSLEAGVNKLADTVKVTLGPKGRNVVIDKKFGSPLITNDGVTIAREIELEDAYENMGAQLVKEVATKTNDVAGDGTTTATLLAQAIIREGLKNVAAGANPMIIKKGIHKAVDAAVAELKAVSKSIESKEAIAQVGAISAADEEIGQLIADAMDKVGKDGVITVEESKSMGTTLDVVEGMQFDRGYLSPYMVTDTEKMEAVFNDAYILVTDKKISNIQEILPILEQIVQQGKKLVIIAEDIEGEALATLVVNKLRGTFECVAVKAPGFGDRRKSMLDDIAVLTGATVISEELGYDLKTATVDMLGTARTVKVDKENTTIVEGAGNQQLIKDRVSQIKKQIEETTSDFDKEKLQERLAKLSGGVAVIQVGAATETELKERKLRIEDALNATRAAVEEGIVAGGGTALVNVIPAVEALLEGSQGDEKTGIQIIRRALEEPLRQIAENAGLEGSVIVNKVMSSDKGIGYDVLNNKYVNMIEAGIVDPTKVTRSALQNAASISAMLLTTESAVVDIASEEPGMPGGMGGMGGMGGGMPMM

SEQ ID NO: 36836 - protein, 379 aa, Methanococcoides burtonii DSM 6242
MEENGKTKEEILLFLKKAKSADASYERVLSSMCTYPHEIAVLAHTQFIESNMGDPGLFPGTFNLEKQVLAMFGKMLHHKNSPEKAGYLTTGGTESNIQAIRSMHNFRHDISRPNIVMPESAHFSFDKVANLSGIEIRKASLDKLLKVDLDSVRSLIDKNTIGLVGIAGTTEFGQLDPINELSKIAIEKGIFLHIDAAFGGFVIPFMDIDYTYDFRLEGVTSMTIDPHKMALSTIPSGGLLFKEPEYFECLEIHTPYLSVNKQYSLTGTRSGAGVASTYAVMKHLGRKGYKKVVSDCMSVTKKLVDGAEKLGINTVIDPVLNIVALDVPEADLVRKKLLDEYGWHVSITRNPRALRIVIMPHIKNETIELFLKDLAKVIK

SEQ ID NO: 36837 - protein, 271 aa, Glycine max
MALIAARILGSNSRPAVALHRWQWLAYSSASAAVAEPETTEVKDYADYRRSLYGQITHKALLVDAVGTLVLPSQPMAQIYRKIGEKYGVEYSEDEILFRYRRAYGQPWGKSRLRYVNDGRPFWQYIVSYSTGCSDPQYFEELYNYYTTDKAWHLNDTGAEEVFRALRKSGVKLAVVSNFDTRLRPLLRALNCDNWFDAVAVSAEVAAEKPNPTIFLKACELLDVKPEDAVHVGDDRRNDIWGARDAGCDAWLWGSDVHSFKEVAQRIGVQV

SEQ ID NO: 36838 - protein, 426 aa, Leptospira interrogans serovar Copenhageni str. Fiocruz L1-130
MSEFIEIKVGEKSYQFPLISGTDGKKGIDIRELHQKTGLISYDPGFFNTAYAVSRISRRDPNSGELNYRGYDIADLVQHSTFVETSYLLIYGKLPTEQQLKDFSLKLSKHSLIHEDMINLFDGFPGKGHPLAVLSVMVTSLSSYYPEEYEESLDKGIDHSARLLAKIRTIAAFSYKKIVGQPFVYPLDKHPYCTNFLYMLFSIPSKDYIPTEDIDRILNQLWILYADHEQNVSNTTVQVIGSTQANLFASISSAINALWGSREGGRQVAAVGLIEDILKSRKSVPEYFEKFKGDSEKLFGNGFGHKAYEAKSRRAIIASKLFHDFYKKNPIGPIAEVALKIEEYMQNDEYYINQNLYPNLEFYSAVIFNSLGIPKELFTAMQVIGKLPGWLAHWREQRVSGNYSKARPKQIYSGEMGRKYIPLSER

SEQ ID NO: 36839 - protein, 220 aa, Zea mays
MGRRPARCYRQIKNKPYPKSRYCRGVPDPKIRIYDVGMKRKGVDEFPYCVHLVSWEKENVSSEALEAARIACNKYMTKSAGKDAFHLRVRVHPFHVLRINKMLSCAGADRLQTGMRGAFGKPQGTCARVDIGQVLLSVRCKDNNAAHASEALRRAKFKFPGRQKIIESRKWGFTKFSRADYLKYKSEGRIVPDGVNAKLLGNHGRLEKRAPGKAFLDAVA

SEQ ID NO: 36840 - protein, 456 aa, Oryza sativa (japonica cultivar-group)
MQGAMARVRGPFTPSQWIELEHQALIYKYLAANSPVPHSLLIPIRRSLTSPYSPAYFGSSTLGWGSFQLGYSGSADPEPGRCRRTDGKKWRCSRDAVADQKYCERHMNRGRHRSRKHVEGQPGHAAKAMPAAVAAAAASATQPSAPAAHSGGAVAGLAINHQHQQMKNYAANTANPCSLQYSRDLANKHNESEQVQDSDSLSMLTSISTRNTGSLFPFSKQHNPFEVSNSRPDFGLVSPDSLMSSPHSSLENVNLLTSQSLNEQQSSVSLQHFVDWPRTPAQGALAWPDAEDMQAQRSQLSISAPMASSDLSSASTSPIHEKLMLSPLKLSREYSPIGLGFAANRDEVNQGEANWMPMFRDSLMGGPLGEVLTKNNNMEARNCLSESLNLLNDGWDSSSGFDSSPVGVLQKTTFGSVSSSTGSSPRLENHSVYDGNSNLRDDLGSVVVNHPSIRLV

SEQ ID NO: 36841 - protein, 479 aa, Thiomicrospira crunogena XCL-2
MKTLVWLQRELRINHHPALEAAMAASDDIIVAYFHDPEQTIGAANTVWLANSLQQLQQDFKTRHGRLWCLEGIFEQQLEQVIQTHQIEQVFYTFQLGHPFKAMQQQALNVCQRCQVPLRAFETENWLHYNQLLNQSGQPYKVFTPFYNTLSRKLSELEPFSDPIDTLEKTARTVCQSGQDQNLPQSLNQILARPWARKIMQHWQVGEHKAWSKFETFITEGLANYEQDRDFPAIDGTSQLSPHLHFGELHSRAIVFELLSLETEPTIANQAIRVWLRQLAWREFARAILWHFPHTETHPFQAKFETFYRPLAEDDSESSKNYQAWCEGRTGVPIIDAGMKQLWETGWMHNRVRMLVASWLTKNADIDWRAGAQWFNDTLVDADPANNTLGWQWVAGCGVDAAPYYRLFNPVRQSEKFDANGQYLRQWLPELKTYSNKHIHAPWLIAPNEKHFCPIIDLTESRQHHLDKVATLKSLNQIH

SEQ ID NO: 36842 - protein, 439 aa, Xanthomonas campestris pv. campestris str. ATCC 33913
MSSTAPPLSFARILALNAGFFGVQYSFGLQQSNMSPIYNYLGADHASLPYLWLAGPITGLVLQPFVGALSDRSVTRWGRRMPYMVLGALVCSLCLLAMPFSTALWMAVCLLWVLDAANNVAMEPYRALVSDVLAPPQRPLGYLTQSAFTGLAQTLAYLTPPLLVWFGMSQDAANAHHIPYVTIAAFVIGAGFSAASILLTARSVREPVVPAAEIARMRKAGTGLGATLREIGSALRDMPPTMRQLAPVMLFQWYAIFSYWQYIVLSLSTTLFGTTEANSHGFREAGLVNGQIGGFYNFIAFLAAFAMVPVVRRVGPKYTHAACLLAAGVGMWVLPGIENRWLLLLPMIGIGLAWASMMGNPYLMLADSIPPERTGVYMGLFNLFIVLPMLIQIVTLPLYYEPLLHGDPRNVIRLAGALMLAAAVAMLCVRIRKPKAVAA

SEQ ID NO: 36843 - protein, 637 aa, Xanthomonas campestris pv. campestris str. ATCC 33913
MIASSPIDAAALRASVAAALDPSTAVATLARFDTHAPRLLDALSTLYGDHADYVTWLPQWLSALGVVAQARPAALRHLDDSRAPGWFGQQDMLGYSAYVDRFAGTLRGVAERVPYLQELGVRYLHLLPFLRARAGDNDGGFAVSDYGQVEPALGSNDDLVALTARLRAANISLCADFVLNHTADDHAWAQAARAGDTRYLDYYHHFADRNAPDQYDTTLVQVFPQTAPGNFTWVDETRQWMWTTFYPYQWDLNWSNPAVFGEMALAMLELANLGVEAFRLDSTAYLWKRPGTNCMNQPEAHTILVALRAVADIVAPSVVMKAEAIVPMAELPPYFGSGVQRGHECHLAYHSTLMAAGWSALALQRGDILQDVIAHSPPLPPNCAWLSYVRCHDDIGWNVLQHEAAGTAAQPPFSLREVAQFYANAVPGSYARGESFQSSGDGVHGTNGMSAALVGVQAAHEHADAAAAARAVDRLVLLYAVSLAMPGVPLIYMGDELALPNDTAYLDDAQRRHEGRWLHRPAMAWELAAQRHDASTLAGTVYTRLRALIRLRAGLPALAATQSLGSVALGDARLFALTRGDSFLAVHNFSDVPLPVDLTQTGHALWAVLDTDGTGDAPEPHTELLLPAYGVRWLQRR

SEQ ID NO: 36844 - protein, 222 aa, Vibrio cholerae O1 biovar eltor str. N16961
MIDFYTAATPNGHKIAIALEEMGLEYTTHALNLSNNDQKQPAFTAINPNGRIPAIVDRDNEDFAVFESGAILLYLAEKTGKFLPQESKARSKVIQWLMFQMSGVGPMMGQANVFYRYFPEKIQPAIDRYQKEGRRLFEVMDGQLAQNPYLAGDEYTIADIATFPWVRIHEWSGISIDGLTHLQRWMNEIAARPAVVKGLTVPPPSNVSDDERAKQIRNMVTR

SEQ ID NO: 36845 - protein, 1299 aa, Nostoc sp. PCC 7120
MTTDRDSSSKKFGLSPEQFAALFPFHLVIDRELKIVQAGEVIQRILEPMVLLDSYLGEHFQISRPKCLTSFEGICQQTRSLFILQAHYQEIQLKGQMLNLESRDHLLFLGSPWITDIADLKNLGLKINDFPLHDSVSDYLFLLQAKNSALADAQKLTTKLKDQKTELQTTALRLRTLIESLQSGILLEDANQHIILVNQEFCDYFRIPLPPQALQGMDCQQALEASKHLFTEPERFICTTDEIIRQGKMFLHQEWELQDGRTLEQNYIPIVVDHKLYGHLWKYRDITQYKKSEVALRLSEERLKLAVDAVEEGLWDWNLVTGEVYRSARWFTMLGYTPMEIGNDIKFRDKLIHPDDIPLMQQRLISHLKGDTPFYEVEIRLLAKSGEWRWILDRGKLVSRDSQGRAIRMVGTHLDITQRKQAEQDLQQQYQHTLLLKQITEEIRQSLQWEKILKTTVTEVQRILQVDRALIFQINSDGSGKVVQEAVMPGWSVTLDQDIYDPCLKDGYLNMYRDGRITAIADVYQGGLKPCYVEFLQQFQVKANLVVPIRVRRNLWGLLIVHQCDRPRQWTELELDLLKHLADQMGIALTQSQLLAQETRQAQLLALQNEELNVAKQVAEKANMAKSNFLATMSHEIRTPMNAIIGMSGLLLDTTLKPEQFDYVETIRNSSHTLLTIINDILDFSKIESGKLELEEQPFDLRLCVEEALDLLAPQAASKGIELMYQLEPDTPTLVVGDITRIRQILWNLVSNAVKFTKIGEICITIGAKQKIYKQTDPTRYEFQFAVQDTGIGIERDRLHRLFKPFSQVDASMTRRYGGTGLGLAISKRLSEIMGGKMWVESQSHQGSIFYFTATLQVNSSAINSAAKVDPELVGKRLLLAVGNANLRKCLTRQLQSLGLDVQAVDSNATALHCLWQHTSLALAVLDVDSPQINGLHLSTKIRAIPQHQNLPLVMLSAKGKQTLEVKQVASEFTAFLHKPLRHYQLHNTLLQIVRGKWLSKSTPQGIIPSYSRLPKPNLPAIDTHLAENLPLKILLVEDVLVNQKIAMNMLHLLGYRTDVANNGLEALEALQRQLYDVVFMDIQMPEMDGWETTHKIRQEFSPTLQPWIIAMTAHARPEDRQQCLAAGMDDYISKPISLEDITTALKKFGSQRQPALESPASVSISAPPAPTPQPKIEEVIDQQTLEYLRNLGGSDEADEDGGGSSIITELIQLYLEDTPAKIQAIQDAATLEDRSQLARIAHALRSPSVSIGAINLGKICETVEDEAKEQSMDQLTALVNQLNNEYQNVVAALKTLIF

SEQ ID NO: 36846 - protein, 363 aa, Arabidopsis thaliana
MVQTETDQRMGLNLNLSIYSLPKPLSQFLDEVSRIKDNHSKLSEIDGYVGKLEEERNKIDVFKRELPLCMLLLNEEIVFLCVAIGALKDEARKGLSLMASNGKFDDVERAKPETDKKSWMSSAQLWISNPNSQFRSTNEEEEDRCVSQNPFQTCNYPNQGGVFMPFNRPPPPPPPAPLSLMTPTSEMMMDYSRIEQSHHHHQFNKPSSQSHHIQKKEQRRRWSQELHRKFVDALHRLGGPQVATPKQIRDLMKVDGLTNDEVKSHLQKYRMHIRKHPLHPTKTLSSSDQPGVLERESQSLISLSRSDSPQSPLVARGLFSSNVGHSSEEDEEEEDEEEEKSDGRSSCRNDETKKKRQVLDLEL

SEQ ID NO: 36847 - protein, 164 aa, GIBBERELLA ZEAE PH-1
MSSSASGDSGGGRSMESRVGRSKQRYNTKGERLVAGIVPLTSDQNYVLLIQSTRRKGWVLPKGGWESDETCQEAAEREAWEEAGITVQISYDLGDIDEKRAPKSSSKDRSRYHFFEGTVTGEFDEWPESHKRERQWFTFTQAWEALSTRPELQEALQRSTVKRQ

SEQ ID NO: 36848 - protein, 234 aa, Oryza sativa (japonica cultivar-group); identical to SEQ ID NO: 1213

SEQ ID NO: 36849 - protein, 1025 aa, Synechococcus elongatus PCC 7942
MRRRPDSIPLVKADTAAIAALVTLLRRQTEVDLQPHWRLAPATVQAEGCLIAQGFETWSIAERNEKQHIAWPRGQKTLWLACCWTIPDRCDRWPVADMALRLALTWWAEAAEVYVDGQLVQTGDLFDCSSRVLLRDMAQPGDRLQLLLRLVSPGHDDGALVRSQLIFESSTDLPELSFLGQELAVVNSFAEQLQPELLPKLEAIAQSFADLDCSQADTADRLARLRDQLAAIAAPIRQRRVSLLGHAHLDLAWLWPVAETWEAAQRTFESVLQLQAAFPELTFGHSTPALYEWIERNRPDLFVAIQAQIAAGRWEVNAGPWVEPELNLVSAESLVRQLLYGQRYSTETLGVQNRVAWLPDSFGFCWQLPQLLQQAGIDTFVTQKLRWNDSTQFPHGLFRWRSPDGSEVLALMSAPIGTGIDPEAIANYSWEWEQQTGSQESLWLPGVGDHGGGPTRDMLEQARRWQQSPCFPQLQFETLTAYLERLGDRDRLPVWNNELYLEFHRGCYTSHADQKAYNRQAETALYSAEVWASFASLLTGADYPKVNLEAAWKATLFNQFHDILPGSAIPEVYADADPEWQQAIATAHQVKSEALTAIAAHIAWTAPPSSTAQPWLIFNDLPGDRSTVIAIDGHWRIFDLSGQELPSQFTPTETLVAVTVSGMGWLGLWREAAIATIQAIDPTAPLHLSNDWLSAEIDPETGDLLQLRDRQGRELLDGQGNQFQRFQDQGQYWDAWNIDPAYEQHPLPSPELQSLTWLEQGPLRWRLRRILSCDRSTITQDYVLTVADPWLKLETTIDWQQRHELLKVAFPTTVSAPVATYEMAAGAIARPTQPQTPAEAAQWEVPALRWADLSDLQGGLAILNDCKYGYDCRDRQLRLTLLRGSTWPDPQADLGQHQFAYAIYPHPDSWQAAGVAPLARRLNQPLTGQPAPFAQGALQPSQTLLNWNADQLLPLALKRSETGDRWLLRCYEAIGQTAELVLTGDRTWQIGARLDGLEQPLSSSSTEVQPWQIASFELLQPTQEN

SEQ ID NO: 36850 - protein, 173 aa, Flaveria pringlei
MASIPATVATVAQANMVAPFTGLKSNAAFPVTKKVNDFSTLPSNGGRVQCMKVWPPLGKKRYETLSYLPNLTESQLAKEVDYLLRNKWVPCLEFELEHGFVYRENARSPGYYDGRYWTMWKLPMFGCTDSAQVMKELQECKKEYPQAWIRIIGFDNVRQVQCISFIASKPDGF

SEQ ID NO: 36851 - protein, 178 aa, Flaveria pringlei
MASISSTVATVSRAAPAQANMVAPFTGLKSNAAFPATKKANDFSTLPSNGGRVQCMKVWPPLGKKKYETLSYLPNLTEAQLAKEVDYLLRNKWVPCLEFELEHGFVYRENARSPGYYDGRYWTMWKLPMFGCTDSAQVMKELQECKKEYPQAWIRIIGFDNVRQVQCISFIASKPDGF

SEQ ID NO: 36852 - protein, 319 aa, Debaryomyces hansenii CBS767
MTKVFVTGSSSFIGQHILNELLQNGYEVRAGVRSQEQITSFEKFFKYDRKYDNVEFVLIRELDNSSVLIPYLQDVELIVHVASPTPHPGIENVTRDILEPAIKITNSVLFAAKKIPTIRRVIITSSLSNVIRTEDNSTVVNEDRWSDAESTHDYSGCNPYEAYIASKAIVEKKAWEFVETEKPSFDIITLLIAYVLGDVLVKKDNKPSGTNALLWGILKNGAQGGMMEQTVHVRDVADAHVRALNASVKGNQRFIIANDPMKFNNAFEFVNKEFPNETWNFGSTVSTNVTYDNRRAKDVLGIKLRSFKSTILDTVRQYV

SEQ ID NO: 36853 - protein, 173 aa, Flaveria pringlei
MASIPATVATVAQANMVAPFTGLKSNAAFPVTKKVNDFSTLPSNGGRVQCMKVWPPLGKKRYETLSYLPNLTEVQLAKEVDYLLRNKWVPCLEFELEHGFVYRENARSPGYYDGRYWTMWKLPMFGCTDSAQVMKELQECKKEYPQAWIRIIGFDNVRQVQCISFIASKPDGF

SEQ ID NO: 36854 - protein, 488 aa, Nocardia farcinica IFM 10152
MNQTADVLTRGLTARHIRFIALGSAIGTGLFYGSAEAIHRAGPAVLLAYLIGGAAIYIVLRSLGEMAVSNPVSGSFGEYASKHLGPLAGFMTGWTYTFEMVIVCLADVTAFGVYMGFWFPDVPRWIWVLSIILFIGAVNLLHVKVFGEVEFWFSLVKIVAILAMIVGGVAILIFGFGMHDTDAGLTHLWAEGGFFATGIGGFLTCFAIVMFAFGGTEIIGITAGEAERPERTIPRAINTVPVRIMLFYVLTLAVIMAINPWQSIGSEGSPFVQIFQALGIGPAATVLNIVVITAALSAINSDIFGAGRMMYGMAQRGQAPAVMRQVSRNGVPWMTVVIMTVTLLVGVLLNYLIPDKVFLIIASIATFATIFVWLMILLAHYRSRRRMSAEETAALRFPVPFWPYGQLITIAFLVFVVAMIAFDADSRVALVVGAVWLALLWLAYRRWVRPTPAATDAAPVAGPGTDPADPADPALTTPTPRIEMEKNL

SEQ ID NO: 36855 - protein, 168 aa, Xylella fastidiosa Ann-1
MTSIYTFTFTRLDGRPQALADWRGQVLLLVNVASHCGFTPQYAGLEMLWQRYRDAGLIVIGFPCDQFAGQEPGDEAKIAEFCTLTYGVDFPMAAKIKVNGADAHPLWQWLKHRRRGLFGVAAIKWNFTKFLIGRNGQPIARYSPIKSPEQLEVHIVRALGEEGGGNTH

SEQ ID NO: 36856 - protein, 182 aa, Fagus crenata
MASSMISSATVATVSRATPAQATMVAPFTGLKSTAAFPATRKSNNDITSLASNGGRVQCMKVWPPLGLQKFETLSYLPPLSIESLAKQIEYLILKGWIPCLEFELEHPFVYRENNRSPGYYDGRYWVMWKLPMFGCTDATQVLAELQEASKTYPTSHIRIIGFDNKRQVQCISFIAYKPPAK

SEQ ID NO: 36857 - protein, 1578 aa, Arabidopsis thaliana
  misc_feature (1023)..(1023): Xaa can be any naturally occurring amino acid
  unsure (1)..(1578): unsure at all Xaa locations
MEKDQEKAFDYSKRAQWLRAAVLGANDGLVSTASLMMGVGAVKQNVKIMILTGFAGLVAGACSMAIGEFVSVYSQYDIEVAQMKRETGGEIEKEKLPSPTQAAAASALAFSLGAMVPLLAAAFVKEYKVRIGAIVAAVTLALVMFGWLGAVLGKAPVVKSSLRVLVGGWLAMAITYGVYETTQSRTEEQRKRKSSSCFCERGMLIGVKERRITLDKGDECVRHRTAGNQSEISISEQVLLLDTKRYGYWKVRMTQIIRGQGEDAWTAVEEGWEPPFDLTEDGFKITKPKANRTTEEKLQSKFNARAMNAIFNGVDEDEFKLIQGCKSAKQAWDTLQKSHEGTSSVKRTRLDHIATQFEYLKMESDETIVKFSSKISALANEAEVLGKTYKDQKLVKKLLRCLPPKFAAHKAVMRVAGNTDKISFVDLVGMLKSEEMEADQDKVKPSKNIAFNDGMALLARNFGKALKCVERGQNRDSTPWSNKDGERSRGRFSRSKNDDSGKKKEIQCYECGGFGHIKPECPVTKREEMKCLEYKGVGHTKFECPNKSKLKEKSLISFSDSESNDEADKQKLSGITVDGNSQDYYQKKFDCLQEECHRERDRAKLLERELNDKHKQIRMLNKGSESLDKILAMGRTNSQPRGLGYQGYTGKINKEEGRVINFVCPFKAKIRTLWNLAKCYIEPSRFCTVWIKKKDLYGDMEAESGCSRHMTGVQSVLNDFSVINNGKVTFGDGGKGSIKGKGKIEIYDQPHLSNVYFVEGLTANLISISQLCDDDLTVTFTKTGCVALDIAGNNVLSGVGSGNNCYMWKDSEVCLFAITSKLDLWHQRLGHMNTQSLVKIVHADVVRGIPKLEACTSVVCKACSQGKQVKVQHKRATHIGTTSVLELVHMDLMGPVQTESLSGKKYILVLVDDYSRFTWVRFLREKSEAAESFKILALQLQTEKGNLVQIRSDHGGEFQNEEFEKFCRIQGIRHQFSAPRTPQQNGVVERKNRTLQEMARAMIHGNNGRSPNLIILESLMQEXDEGIFLGYATNSMAYRVYNKRLKRVEESVKVVFDDKHPTRLFTVEQDDDEQVEETRHSTSLVESRTSKDVEQTTEPRTSSSSLTVPKSHSETDVIGELDGDRYQACHEELNQFSRHEVWDLVPRPVHVNVVGTKWIFKNKTDEEGNVTRNRARLVAQGYSQVEGIDIDETFAPVARLESIRLLLGISCLLKIKLFQMDVKSAFLNGVIQEEVFVSQPKGFEDSNFPDHVYKLKKALYGLKQAPRACTKQKLVSDFVESMTKEFEMSMVGEMNYFLGLQIKQTDEGVHISQSTYAKGLIQRFGMQTAKTSKTPMSATAKLSADEAGLSVDEKLYRGMIGSLLYLTTSRPDLCFSVGVCARYQANPKQSHLNAVKRILKYVKGTTDVGLFYSKQTNQNLVGFCDADWAGNLDDRRSTTGGCFFLGNNLVSWHSKKQSCVSLSTAEAEYISLGSCCTHLLWMKQMLLDYGMTSNTLLVYCDNMSAINISKNLVQHSRIKHIDIRHHFIRELVENKIVENKIVEISHVSSEKQLADIFTKPLDLNSFLNLKKSIGLSEY

SEQ ID NO: 36858 - protein, 187 aa, Capsicum annuum
MASSVMSTATVATGANAAQASMIASFNGLKSAASFPVTRKQDLDITSIASNGGRVECMLVWPPINKKKYETLSYLPDLSDEQLLKEIEYLLQKGWVPCLEFETEHGFVYREHHRSPGYYDGRYWTMWKLPMFGCTDATQVLNEVQEAKKAYPQAWIRIIGFDNVRQVQCISFIAYKPEATKFSMFNV

SEQ ID NO: 36859 - protein, 114 aa, Filobasidiella neoformans
IVHVNNHLEEGQSIHWHGLRQLGTAFMDGVPGITQCPIPPGSSFTYQFTVSHQSGTFWWHSHYSNSMADGIWGPLIIHSPNEPLQRGRDYDEDRIVFITDWVHDNSEVVIAALP

SEQ ID NO: 36860 - protein, 321 aa, Haemophilus somnus 129PT
MNFVRIITFITEKNIMDIAVIGSNMVDLISYINDMPKMGETLEAHDFKMGCGGKGANQAIAAAKLGASVMMMTKVGDDVFADNTINNFKQYGVNTDFVEKVVGVSSGVAPIFVDRSSQNRILIIKGANSYLKPADIDHAEVQLKNCKLLILQLEIPLETVYYAIDFANKHQIPVILNPAPASKELDISYACKCDFFMPNETELEILTGMPVDNMEQIQAAANSLFLKGLKNLIVTLGEKGSVWFHRDQVTHVSSHKVNAIDTSGAGDAFIGCFAHFYIQTNDVKQAMQMASAYSAYSVTGQGTQSSYPDKAQFEQFLQSLK

SEQ ID NO: 36861 - protein, 514 aa, Oryza sativa (japonica cultivar-group)
MPLDTNACAQPMRRAGEGAGTERLMERLNIGGMTQEKALRKRCFGDGVTGTARCVFTSDADRDTPHLRTQSSRKNYADASHVSAVILGGGTGVQLFPLTSTRATPAVPVGGCYRLIDIPMSNCFNSGINKIFVMTQFNSASLNRHIHHTYLGGGINFTDGSVQVLAATQMPDEPAGWFQGTADAIRKFMWILEDHYNQNNIEHVVILCGDQLYRMNYMELVQKHVDDNADITISCAPIDGSRASDYGLVKFDDSGRVIQFLEKPEGADLESMKVDTSFLSYAIDDKQKYPYIASMGIYVLKKDVLLDILKSKYAHLQDFGSEILPRAVLEHNVKACVFTEYWEDIGTIKSFFDANLALTEQPPKFEFYDPKTPFFTSPRYLPPARLEKCKIKDAIISDGCSFSECTIEHSVIGISSRVSIGCELKDTMMMGADQYETEEETSKLLFEGKVPIGIGENTKIRNCIIDMNARIGRNVIIANTQGVQESDHPEEGYYIRSGIVVILKNATIKDGTVI

SEQ ID NO: 36862 - protein, 112 aa, Filobasidiella neoformans
IVHVNNHLDEGQSLHWHGLRQLGTAFMDGVPGITQCPIPPGGSFTYNFTVSHQSGTYWWHSYYSNSMADGIWGPLIVHSPNEPLQRGRDYDEDRIVFITDWMHDNSEIIIAA

SEQ ID NO: 36863 - protein, 454 aa, Yarrowia lipolytica CLIB122
MSIFQNAVNADLPRAIAGKGSYLTLENPKTGAQYDILDGSSGAAVAAVGHNHPRIVQAMQHCAGLPYIFTHAVGSKQADDLAELILSKSNGAFSRALFLNSGSEANETAMKIATQFFYEQGQTQRCNFISRDFSYHGNTLGSLSLGGFKSRQVPYKEILNSKAFHKVSTCFPYRHQKDGQTEEQYTQMLLDELDAKFQELGPDTVIAFVCETVIGATLGAVPPSKGYISGCRDICHKYGALFLLDEVMCGMGRTGTYHAWEPEFEAGTGGPDIQTVAKVLGGGYVPLAGVLLSPKVFDVFQKGSGIVYGHQTYQDHVFATGVALEIQRLIFDQNLIEECFEMGKYLGMALKRKFADNPYVGDVRGRGLFWDVEFVADKATKEVFPASMNLAGIMHVRCIENGAHFLKGKGTIDSVLGDHMMVSPAYTVTRVEIDRMIDVLANTLAEVLAENGYN

SEQ ID NO: 36864 - protein, 365 aa, Rosa chinensis
MGSTGETQMTPTQVSDEEANLFAMQLASASVLPMVLKAAIELDLLEIMAKAGPGAFLSPNDLASQLPTKNPEAPVMLDRMLRLLASYSILTYSLRTLPDGKVERLYGLGPVCKFLTKNEDGVSIAALCLMNQDKVLVESWYHLKDAVLDGGIPFNKAYGMTAFDYHGTDPRFNKVFNKGMADHSTITMKKILETYKGFEGLTSIVDVGGGTGAVVNMIVSKYPSIKGINFDLPHVIEDAPQYPGVQHVGGDMFVSVPKGDAIFMKWICHDWSDEHCLKFLKNCYAALPDNGKVILGECILPVAPDTSLATKGVVHIDVVMLAHNPGGKERTEQEFEALAKGSGFQGIRVACNAFNTYVIEFLKKI

SEQ ID NO: 36865 - protein, 423 aa, Xanthomonas campestris pv. campestris str. ATCC 33913
MSTAPQKPLAIRERLSEVRYEIRGELARRARELEAQGRKLIKLNIGNPGAFGFRAPEHLQRAIADDMGRTDPYTHQQGLPEAREAIAAAYARRQHPDAHPDRIFIGNGVSELIDLSLRALLNPGDEVLVPSPDYPLWSAATILNDGRPVYYRCAPENGFQPDPVEIETLVSSRTRAIVLINPNNPSGASYSRELLERIVAIAVKHNLLLMVDEIYDQVLYDGAAFVPVAPLAGEHPCITFSGLSKVHRACGWRVGWALLSGEQSRINDLRNAMDLLGALRLCANVPGQYAIDAAVNGPDTISALCAPGGRLYETRRAVIEACAASSHLSLVAPAGALYAFPAVVGPAARAFDDHTFALDLMNDEGVLVVPGSSFNVPYRHHFRVTLMPEAAVMRDVFARIDRALTRRAEAVTKVVPLKSRSVA

SEQ ID NO: 36866 - protein, 654 aa, Zea mays
MDGCDCIEPLWPTDDLLVKYQYISDFFIALAYFSIPLELIYFVKKSSFFPYRWVLIQFGAFIVLCGATHLINLWTFTTHTKTVAMVMTIAKISTAVVSCATALMLVHIIPDLLSVKTRELFLKNKAEELDREMGLIRTQEETGRHVRMLTHEIRSTLDRHTILKTTLVELGRTLGLEECALWMPSRSGSSLQLFHTLRHQITVGSSVPMNLPVVNQVFSSNRAIIIPHTSSLARVRPLAGRYVPPEVAAVRVPLLHLSNFQINDWPELSAKSFAIMVLMLPSDSARKWHVHELELVEVVADQVRAVSFAMVTITYYFHPEKDVAVALSHAAILEESMRARDLLMEQNVALDLARREAEMAIRARNDFLAVMNHEMRTPMNAIIALSSLLLETELTPEQRLMVETVLKSSNLLATLINDVLDLSKLEDGSLELEIKAFNLHAVFKEVMGFIKPIASIKRLSVSVMLAPDLPLCAIGDEKRLMQTILNISGNAVKFTKEGHITLVASIVKADSLREFRTPEFHPTASDEHFYLKVQVKDTGCGVSPQDLPHVFTKFAHPQSGGNRGFNGSGLGLAICKRFVSLMGGHIWIDSEGTGRGCTATFVIKLGVCDNTNTYQQQLVPLVWPSSADSNLSAPKVLPDGRGSVSLKSRYQRSV

SEQ ID NO: 36867 - protein, 235 aa, Triticum aestivum
  misc_feature (227)..(227): Xaa can be any naturally occurring amino acid
  unsure (1)..(235): unsure at all Xaa locations
AIHNQKYRSHRKHMIAREAEAASWTQRRQMYAAGGPAAAVKRQDSNMWTGGTIGFSTPHPPPPPAGGTMQHYARPLHVWGHPTMDSPRMPMWPRHPMPRAPMPAWAPPPPPPSDPAFWHHPYMRGPAAYMPTHGTPCMAMPMTPKFPAAPVPVAMPCPVYASPSPAPALASKSQQDSQLQLQAQPSNESIDAAIGDVLSKPWLPLPLGLKPPSLGSVMGELERQGVXANVPQACG

SEQ ID NO: 36868 - protein, 348 aa, Rosa hybrid cultivar
NQKWSNGEHSNELLHAQAHIWNHIFSFINSMSLKSAIQLGIPDIINKYGYPMTLSELTSALPIHPTKSHSVYRLMRILVHSGFFAKKKLSKTDEEGYTLTDASQLLLKDHPLSLTPYLTAMLDPVLTNPWNYLSTWFQNDDPTPFDTAHGMTFWDYGNHQPSIAHLFNDAMASDARLVTSVIIDDCKGVFEGLESLVDVGGGTGTMAKAIADAFPHIECTVLDLPHVVADLQGSKNLKYTGGDMFEAVPPADTVLLKWILHDWNDQECIKILKRSRVAITSKDKKGKVIIIDMMMENQKGDEESIETQLFFDMLMMALVGGKERNEKEWAKLFTDAGFSDYKITPILG

SEQ ID NO: 36869 - protein, 430 aa, Streptococcus pneumoniae
GSSHHHHHHSSGLVPRGSHMKLNRVVVTGYGVTSPIGNTPEEFWNSLATGKIGIGGITKFDHSDFDVHNAAEIQDFPFDKYFVKKDTNRFDNYSLYALYAAQEAVNHANLDVEALNRDRFGVIVASGIGGIKEIEDQVLRLHEKGPKRVKPMTLPKALPNMASGNVAMRFGANGVCKSINTACSSSNDAIGDAFRSIKFGFQDVMLVGGTEASITPFAIAGFQALTALSTTEDPTRASIPFDKDRNGFVMGEGSGMLVLESLEHAEKRGATILAEVVGYGNTCDAYHMTSPHPEGQGAIKAIKLALEEAEISPEQVAYVNAHGTSTPANEKGESGAIVAVLGKEVPVSSTKSFTGHLLGAAGAVEAIVTIEAMRHNFVPMTAGTSEVSDYIEANVVYGQGLEKEIPYAISNTFGFGGHNAVLAFKRWENR

SEQ ID NO: 36870 - protein, 348 aa, Rosa hybrid cultivar
NQKWSNGEHSNELLHAQAHIWNHIFSFINSMSLKSAIQLGIPDIINKHGYPMTLSELSSALPIHPTKSHSVYRLMRILVHSGFFAKKKLSKIDEEGYTLTDASQLLLKDHPLSLTPFLTAMLDPVLTKPWNYLSTWFQNDDPTPFDTTHGMTFWDYGNHQPNIAHLFNDAMASDARLVTSVIIDDCKGVFEGLESLVDVGGGTGTVAKAIADAFPHIECTVLDLPHVVGDLQGSKNLKYTGGDMFEAVPPADTVLLKWILHDWNDEECIKILKRSRVAITSKDKKGKVIIIDMMMENQKGDEESIETQLFLDMLMMALVGGKERNEKEWAKLFTDAGFSDYKITPILG

SEQ ID NO: 36871 - protein, 261 aa, Triticum aestivum
  misc_feature (51)..(51): Xaa can be any naturally occurring amino acid
  unsure (1)..(261): unsure at all Xaa locations
MKIQCDSCGVAAATVVCCADEAALCARCDVEIHAANKLASKHQRLPLDALXAPSSPRCDICQEKAAFIFCVEDRALFCRDCDEPIHVPGTLSGNHQRYLATGIRVGLGPVSACAAGDHGAGHDADHHAPPKVACEPYPPAQPAARAQQVPSPPQFLPQDWAVDELLQFSDYESNDKLHKDSPLAFKELEWFTADMELFHDHAPKGGRATMEVPEFFASQAADDAAYYRPSRVAATAGLRQSKKARVEIPDDEDFFIVPDLG

SEQ ID NO: 36872 - protein, 630 aa, GIBBERELLA ZEAE PH-1
MSWKLTKKLKETHLGQSLSPFSRSPSTSTITDKEKEAQASGAVTPTTESAIAASEAMTQSPVVKPPKPGILVVTLHEGQGFSLPEQHRSAFASSHQGSMSSGSAISGSVRPGSSQRTAGFSNGRPQSSAGGFNGIPTNHGRISGKYMPYALLDFDKVQVFVNSVDGNPENPLWAGGNTQYKFDVSRVTELVIHLYMRNPTAPPGSGRSQDIFLGVVRINPRFEERQQYVEDPKASKKDREKAAAEFAARHGHQGAEWVDVQYGTGKIKVGVDYVETRAGKLKIEDFELLKLVGKGSFGKVMQVRKKDTNRIYALKTIRKAHIISRSEVAHTLAERSVLAQINNPFIVPLKFSFQSPEKLYFVLAFVNGGELFHHLQKEHRFDVNRSRFYTAELLCALECLHGFSVIYRDLKPENILLDYQGHIALCDFGLCKLDMKDEDRTNTFCGTPEYLAPELLMGQGYNKTVDWWTLGVLLYEMLTGLPPFYDENTNEMYRKILSEPLHFSDVVPPAAKDLLTKLLNRNPEERLGANGSAEIKAHPFFHAIDWRKLLQRKYEPTFKPSVADALDTTNFDPEFTSEAPQDSFVDGPMLSQTMQNQFQGFSYNRPIAGLGDAGGSVKDPSFVGSLTDNR

SEQ ID NO: 36873 - protein, 519 aa, Panus rudis
MAFSTAFTSLITLAWAVGTFAAIGPVTDLHIVNDNIAPDGFTRAAVLAGGTFPGPLITGNKGDNFRINVIDDLTEESMLKSTSIHWHGFFQKGTNWADGPAFVNQCPITTGHSFLYNFNVPDQAGTFWYHSHLSTQYCDGLRGAFVVYDPNDPHADLYDVDDDSTVITLADWYHTLARQITGVPTPDATLINGLGRSASGPQDSELAVITVEQNKRYRLRLVSISCDPNYIFSIDSHNFTIIEVDGVNSKPLTVDSAQIFAAQRYSVVLNANQPVGNYRIRARPNNGDTTFTNGRNSAILRYKGATVEEPATITPPVSQTPLIEANLKPLASMPVPGTHTPGVADVVKPLQFGFNPPAFTINGASFVPPTVPVLLQILSGAKTAQEIVPSGSIIELPLNSVVELSFPNPTGAPGGPHPFHLHGHTFFVVRSAGQTTYNYDDPIARDVVSTGTAGDNVTIRFATDNAGPWFLHCHIDWHLDAGFAVVMAEGINQTQAANPTPDAWNQLCPIYNATDPSDL

SEQ ID NO: 36874 - protein, 486 aa, Bacteroides fragilis NCTC 9343
MENKKLTAANGRPIADNQNSQTAGPRGPIMLQDPWLIEKLAHFDREVIPERRMHAKGSGAYGTFTVTHDITKYTRAAIFSQVGKQTECFVRFSTVAGERGAADAERDIRGFAMKFYTEEGNWDLVGNNTPVFFLRDPLKFPDLNHAVKRDPRNNMRSANNNWDFWTLLPEALHQVTITMSPRGIPASYRHMHGFGSHTYSFLNAENKRIWVKFHLKTMQGIKNLTDQEAEAIIAKDRESHQRDLYESIERGDFPKWKFQIQLMTEEEADNYRINPFDLTKVWPHKDFPLQDVGILELNRNPENYFAEVEQSAFNPMNIVEGIGFSPDKMLQGRLFSYGDAQRYRLGVNSEQIPVNKPRCPFHAFHRDGAMRVDGNYGSAKGYEPNSYGEWQDSPEKKEPPLKVHGDVFNYNEREYDDDYYSQPGDLFRLMPADEQQLLFENTARAMGDAELFIKQRHVRNCYKADPAYGTGVAQALGIDLEEALKE

SEQ ID NO: 36875 - protein, 86 aa, Arabidopsis thaliana
  misc_feature (45)..(45): Xaa can be any naturally occurring amino acid
  unsure (1)..(86): unsure at all Xaa locations
PVNCNTTHYRANWVPGPPGSVPIGIGKNSHIKRAIIDKNARIGDXMSRSINSDNVQEAARETDGYFIKSGIVTVIKDALIPTGTVI

SEQ ID NO: 36876 - protein, 520 aa, Trametes sp. AH28-2
MSRFQSLLAFVVASLAAVAHAAIGPTADLTISNAEVSPDGFARQAVVVNNVTPGPLVAGNKGDRFQLNVIDNLTNHTMLKSTSIHWHGFFQKGTNWADGPAFVNQCPISSGHSFLYDFQVPDQAGTFWYHSHLSTQYCDGLRGPFVVYDPNDTHASLYDVDNDDTVITLADWYHTAAKLGPTFPLGADATLINGLGRSPSTTAADLAVINVTKGKRYRFRLVSLSCDPNHTFSIDGHDLTIIEVDSINSQPLVVDSIQIFAAQRYSFVLNADQDVGNYWIRANPSFGNVGFAGGINSAILRYDGADPVEPTTTQTTPTKPLNEVDLHPLDTMAVPGSPVAGGVDKAINMAFNFNGTNFFINGASFVPPTVPVLLQIISGAQNAQDLLPSGSVYSLPANADIEISFPATAAAPGAPHPFHLHGHAFAVVRSAGSTVYNYDNPIFRDVVSTGTPAAGDNVTIRFRTDNPGPWFLHCHIDFHLEAGFAVVMAEDIPDVASANPVPQAWSDLCPIYDALDVNDQ

SEQ ID NO: 36877 - protein, 263 aa, Oryza sativa
MAVLVARQGRELQRYTSAGGRIVVGCIPYRVRSGGEMEVLVITSQKGHGMMFPKGGWELDESMDEAARREALEEAGVRGDTETSLGCWYYKSRRYDTTYEGFMFPLRVTDELLQWPEMSSRKRTWATVQQAMDGCQHGWMREALERLVSRHATNKLQSALPAGLDHISIEHHIFWPPSPESETTADECPARRSEHADDDDSSFGVAGVVVVRQQRLASPGVVAMHGEKKESGDGRGRCDAKMPTASREKDAKPCECDEVQGRD

SEQ ID NO: 36878 - protein, 466 aa, Kluyveromyces lactis NRRL Y-1140
MKLTYTLSALGLGASVAYAQSTACNPLTASTCSPDPALGKSISVPFDEESSYFERYATNGNVSYGDDGVEMTINKRLDNPSLVSEFYIMFGKVQAIAKAAGGQGIISSFYLQSDDLDEIDIEWTGTDTTQVQSNFFSKGETTTFDRGAFHSVDDPQGSYHNYTIDWTKDEINIYVDSALVRTITSDNGQGYPESPMRIFTGIWAGGDSQNEPGTIEWAGGLTDYTKAPFSMYLKDVIVVDYSTGTEYSYSGTDGTWESIEANDGEVYGRYDQGVADFDKLASGGSVSDDTSSSSSSSSTSSSSTKTSASPSTSKSSSTSSSSSSSSSSSASSSSSSLSSSSPTTTSKSSTTIPTTSTESTLNTTSASSTSASSSSITALNTTSSSTSLSSSSTQLNTTESLITSTEELVTTGFSSLVTTTAADEEITSYATGETSSSAALTSTQSENAAAFNLPQLLAIIPALLLL

SEQ ID NO: 36879 - protein, 1238 aa, Synechococcus elongatus PCC 7942
MRWIRPRFSLWQHPQRALIIAVLYGAAGLLWILSTDSLLQTWLRTEVSVWQWSTLKEIFYFFLSAVVLYVLLRQWQILQTLRHANQEQRLQQLLHLLDGNPWPLWLVEPQTLRILDRNAAATAWGNVAYLQELAPRSQLLKQWAENPDALRLSLDLKIPNGQLRSVELQRCAYPDPGAWLIAARDCGDLQSWQQLTQVGYWELDVQSQLVQTSPLVNRLLGKPSDQCLFSWQQWLEHFQLSDRLRLEQAIDTGMQTGRPIQATYALASDSQDRQLVELRAVIVRDLAGNVRSLRGVLEPKHQAPLTSLEPLPLSLDHPAVLRRILEAIPDPIYIKDYRGEILLQNRACLDLQPFVMPEVIKQEDINDLATIASGLPIINEEWTINPENWPSQHFLISKVPLRNELGQILGLLGIRRNVTRWRRAEQARNALSDQLEQTLAAVSDGVVVLDQNFVVRALNSQAAQQLKKTSEQIIGRVFWDLFPVELGATLQSELQPLQHQSSTRTFELWIDPLSTCWEVNVHRSTAEISLYFRDISDRVMSRQLLEEMAERFQLVTRATNDAVWDRNLLTNEIWYSANYSRLFGGEEKEITQKLVQTVDLQWRDRLDPDQRERIMASLSGAIANGFSTWSEQYRFLRQDGTYAHVLDRGYIVRDENGRAIRAVGAMQDISAIVAANEQLRLWLRAIESTGNSIIIADAQQPDMPIIYVNPAFEKITGFSAAEVIGRNFRFLQGLETQQAELEEMRRALEEGTYCEVTLRSYRKDGSLFWNQISLAPVRDQKGHLTHMVASQTDVSESKAFEEMLLQQATHDALTGLPNRLLFLDRLDQAAARARGGGSPIAVLFIDLDNFKAINDGFSHSEGDAVLQIAAGRLQQCIQEHETVARLSSDEFVILLIDLDVQSKARVKAAMIQSLMAKPFEVMGNPIELTASIGVATFPHDGQSGSELLQAADLAVCAAKQQGKNLWCSFSEAMREQLRSRIDIEKDLRQALIDNSLELYFQPQVDLVTHRLLGFETLVRWNHPERGLVAPGEFIPIAEESDLIDAIGLWVMRAAGLTLRRWIDHEGFTGSLSFNISARQFIRQNIFLKLFDVLQEFQIPPHQLEIELTESSLIESPERFVQWLQEARSMGFQVALDDFGTGYSSLGYLKRLPINALKIDRSFIRDLPHDHDDQAIVQAIVAMAKVLKLRTIAEGVERLEQAAFLEAIGCDAVQGFFYGPPLPEAEALAFLHRSASPGV

SEQ ID NO: 36880 - protein, 249 aa, Xylella fastidiosa Ann-1
MTRKLVLLRHGQSQWNSMNRFTGWVDIGLTEQGHQEATMAGHLMKEEGLEFDVAHTSLLKRAIHTLQDALKALDQDWLPIYKSWRLNERHYGALQGLDKIDTAAKHGEEQVNIWRRSYDIQPPPIDLDDPSHPMRDRRYAALDRKVLPVTESLKNTLERVLPYWNDAIAPQLNDNKTVLISAHGNSLRALYKYLNQESDEKILNVNIPTGIPLLFELSDTLQVVSYRYLGDPDAAQRAAEMVANQGKAK

SEQ ID NO: 36881 - protein, 501 aa, Trametes sp. AH28-2
MNGLRLLPSFASLAVVVSLALNTLAGIGPVTDLTISNENVSPDGFTRAAVVANGKAPGPLITGQKGDRFQINVVNKLSNHTMLKSTSIHWHGFFQKGTNWADGPAFVNQCPIATGHSFLYDFQVPDQAGTFWYHSHLSTQYCDGLRGPFVVYDPNDPNASLYDVDNDDTVITLADWYHVAAKLGPAFPPRSDATLINGLGRTSDTPNADLAVITVTTGKRYRFRLISLSCDPAYTFSIDNHDMTIIEADGVNTQQLTVDSLQIFAGQRYSFVLEANQKSGNYWVRANPLFGTTGFAGGINSAILRYDDAVPAEPTSEQGTSTKPLKETDLHPLTAMPVPGSAVSGGVDKAINFAFTFNGTNFFINGATFQPPTTPVLLQILSGAQDAKDLLPSGDVYALPSDATIELSFPASTGAPGAPHPFHLHGHTFAVVRSAGSTEYNYDNPIWRDVVSTGTPQAGDNVTIRFRTDNPGPWFLHCHIDFHLEAGFAVVMAEDIPDTKL

SEQ ID NO: 36882 - protein, 629 aa, Cytophaga hutchinsonii
MCGITGIFAFNQIGAFYMINLGKSIELLAHRGPDGRGTFVEELIALGHRRLSVIDTINGRQPMHDSTDRYVLTFNGEIFNYKILREQLIQEAGYTFTTDSDTEVLLNAYIHWGEACLLKLNGFFAFAIYDKQKHEIFVARDRMGVKPLLYYKDEDKFIFASEMKAVLAYNVPKEIDWVSVQQYFTLGYIPEPDSIFKDVKKLEAGSYLLINKAGVISKKYYEIPSSTQTKHQHSFEQAAAHVKELVDASVKDRLVADVPVGAFLSGGLDSSIVVASASKHVENLHTFSVGFKGADFYDETKSAELVAKTFNTSHTTFSLSQTELADNILPCLESMSEPFGDTSSLPLFVLSKKVAPSMKVILSGDGADELFGGYNKHRAEWLIKNPNWQIRFAQLIQPVVKILPGNRNTPMGDKIRQAQKLIEGLTLTDAERYYRWCSVFSEEAHKEMFQENIADNEEYKIRKGGILHAFKKNPYDLNRILYTDLNLVLGSDMLHKVDSMSMANGLEVREPMIDYRLVEYVSTLPSSYKINKNGGKQVLKHAYKDELPAEILSKAKHGFDVPLTKIFSKELKAWILDELLSQKFIEQQHVFKWSYIKNIRNAIDKNSNLDESKIWPLITFQFWWKKFMN

SEQ ID NO: 36883 - protein, 178 aa, Glycine tomentella
MASSMISSPAVTTVNRAGAGTVAPFTGLKSMAGFPTRKTNNDIASIASNGGRVQCMQVWPTTGKKKFETLSYLPDLDDAQLAKEVEYLLRKGWIPCLEFELEHGFVYRENHRSPGYYDGRYWTMWKLPVFGCTDASQVLKELQEAKTAYPNGFIRIIGFDNVRQVQCISFIAYKPPSF

SEQ ID NO: 36884 - protein, 291 aa, Brassica napus
MATVADQSADMLQNLTLDSQTKASEIPEPNKKTAVYQYGGVDSHGQVPTYDRSLTPLLPTDAVDPSVCYVPNAYPHFYYGGYGNGDWGEYTGYQNPEGVDMSSGIYGENGSIVYPQSYGYAAYPYSPATSPGPQVGGDGQLYGAQQQYQYPAFFPTGAFASSVATPNQGDLSANKAGGVKTAETKNVASATGMAKGSNGTVTGKPNNQTTHNTASNLYGTGAPGGGFAGGYGYDGFYAPVPCYDGSKYSDVQRSGSGVASSYSKSTTVPSSRNQNYRSNSHYTPASMTGYG

SEQ ID NO: 36885 - protein, 178 aa, Glycine tabacina
MASSMISSPAVTTVNRAGAGTVAPFTGLKSMAGFPTRKTNNDIASIASNGGRVQCMQVWPTTGKKKFETLSYLPDLDDAQLAKEVEYLLRKGWIPCLEFELEHGFVYREHHRSPGYYDGRYWTMWKLPMFGCTDASQVLKELQEAKTAYPNAFIRIIGFDNVRQVQCISFIAYKPPSF

SEQ ID NO: 36886 - protein, 182 aa, Betula pendula
MACSMISSATVAAVSRASPAQSSMVAPFTCLKSTSAFPVTQKTNNDITSIASNGGRVQCMQVWPPLGLKKFETLSYLPPLSSEQLAKEVDYLLRKNLIPCLEFELEHGFVYREHNRSPGYYDGRYWTMWKLPMFGCNDSSQVLKELEECKKAYPSAFIRIIGFDNKRQVQIISFIAYKPPGV

SEQ ID NO: 36887 - protein, 513 aa, Arabidopsis thaliana
MGAYETEKPTKDAAALETQSPEDFDQPSPLRKIISVASIAAGVQFGWALQLSLLTPYVQLLGIPHKWSSLIWLCGPVSGMIVQPIVGFHSDRCRSKFGRRRPFIATGAALVAVAVFLIGYAADFGYKMGDKLEEKVKVRAIGIFALGFWILDVANNTLQGPCRAFLADLAAGDAKRTRVANAFFSFFMAVGNVLGYAAGSYTNLHKMFPFTMTKACDIYCANLKTCFFLSITLLLIVTVTSLWYVNDKQWSPPPRNADDDEKTSSVPLFGEIFGAFKVMKRPMWMLLIVTALNWIAWFPFLLFDTDWMGREVFGGDSDGNERSKKLYSLGVQSGAMGLMFNSIVLGFMSLGVEWIGRKLGGAKRLWGIVNFILAAGLAMTVLVTKFAEDHRKTAGDLAGPSASVKAGALSLFAVLGIPLAITFSTPFALASIFSSCSGAGQGLSLGVLNLAIVIPQMIVSLGGGPFDALFGGGNLPAFIVAAIAAAISGVLALTVLPSPPPDAPKATTMGGFH

SEQ ID NO: 36888 - protein, 1296 aa, Debaryomyces hansenii CBS767
MDPLVNYEYPVPPQEYQQKRYQNPNQVPEITNKEQVVPQSALPATPRMLRSVSGNQKNSGSDSYSQEDQPAEENDRSMTPQQLDKYQQYVSSANYQMDASHSKNSSLNQPQHSKRGTSASHSRTPSVNRQPQPPPTPPTWNSQFPNQPNQQQPVTSPQRKQELLPPAAISSPSSKPPTVGNAASANKTRPMPQQHPGQNNEHGHHHHSHHHNQQQQALQQQQQQQFHRKSIGDWDFIKTIGAGSMGKVKLAQHNSTSEICAVKIVPRAAKLFQRAHANDPPILNAQAAAQRQKEFEKEVTRDKRTIREGALGRLLFHPFICRLYEMVPMTNHYYMLFEYVEGGQMLDYIVSHGSLKEKNARKFARGIALALEYCHSNNVVHRDLKIENIMINSKGDIKIIDFGLSNLYSPKSLLKTYCGSLYFAAPELLSAKPYTGPEVDVWSFGVVLYVLVCGKVPFDDQSVSILHEKIKRGNVEYPSFLSKECVSLLSRMLVVDPTKRASLFEVVQHPWMNRGYEAPQSCYLPKRKPLELPLDPEIVKSIASFDIGTVQSVTEEMTSILTSVEYQMSCENWYKITEKGRKYASAPNAHILPDPTGGFHPLISIYYLVHEMKMRKKAKEHSAKAQLEQANSKQASQQGNLQAPRQDETLQYEPEQQKREERLPGLSFPEQAHTSASPATFQKSSPSPPRDQKEESIPEQQPHSPRESMANTDTLDPNGGKPGGFNSLFRRLSSKKYKNSPSSPNRNQTSPDASDHNIAPPPIPRVSIVPDSQEHIPSPSSNKSHKNDPMVRRGVSMKVTAKEKSSSSKVDLHSSTSNTPKPQPEVSTQPTKTSHNRSSSTSTNNAVNKYRGYVPEQYLPPLPNINPNTNTLVPPASGSNSPLKVAPGAEGRKLHPTARAKSVGGHVRKESYGRSNRAQKQPHPTLPNALASQNSDEIIDEGSTRDDGFFDDVTLDEVDYQEIPQLTEEQIIDQFNHAKQNSMPSIEYPKTLFLKGFFSVQTTSTKPLPVIRYNIINVLSKLGVKFQEVKGGFVCAHAPSLQIKPAQPDDISTNTSTMIDSQQEEKKSEETSEEQRLYGDAFKSTSSSIERNSDIPTRIKTPEQNPGESQMKSPTRQASLHLNTQNLSPPSANSGKTHRPSNSVGGHRRKFSIGNSLLGSYRKKNGSQIMMPPNTPATAKLNKLLYGMDGDELEDEDEDETSKQFTEDDSVDSLNGLMIGGGSDMLISSTLEHKAKHQHSPSSGNSHLAKRSPLKFEIHIVKVPLVGLYGVQFKKLLGNTWNYKTLAGQILNELNL

SEQ ID NO: 36889 - protein, 173 aa, Flaveria pringlei
  misc_feature (63)..(63): Xaa can be any naturally occurring amino acid
  misc_feature (172)..(172): Xaa can be any naturally occurring amino acid
  unsure (1)..(173): unsure at all Xaa locations
MASIPATVAAVAQANMVAPFTGLKANAAFPVTKKVNDFSTLPSNGGRVQCMKVWPPLGKKKYXTLSYLPNLTEAQLAKEVDYLLRNKWVPCLEFELEHGFVYRENARSPGYYDGRYWTMWKLPMFGCTDSVQVMKELQECKKEYPQAWIRIIGFDNVRQVQCISFIASKPDXF

SEQ ID NO: 36890 - protein, 173 aa, Flaveria pringlei
MASIPATVATVAQANMVAPFTGLKSNAAFPVTKKVNDFSTLASNGGRVQCMKVWPPLGKKRYETLSYLPNLTEVQLAKEVDYLLRNKWVPCLEFELEHGFVYRENARSPGYYDGRYWTMWKLPMFGCTDSAQVMKELQECKKEYPQAWIRIIGFDNVRQVQCISFIASKPDGF

SEQ ID NO: 36891 - protein, 180 aa, Musa acuminata
MVSSMMVSSAATFTRASPAQSSMVAPFTGLKSASAFPVTRKPNADLSHLPSNGGRVQCMKVWPIEGVKKFETLSYLPTMKDEALVKQIEYLLRSKWIPCLEFCPKGFVWRENHRSPGYYDGRYWTMWKLPMFGCTDAVQVAKEVEECKKEYPHAFIRIIGFDNNRQVQCISFIAYKPTGY

SEQ ID NO: 36892 - protein, 178 aa, Zantedeschia aethiopica
MASSMMVSTAAVSRTSPAQSNMVVPFAGLHSSAAFPVTRKFADSSKLPSNGLRVRCMQVWPPEGKKKFETLSYLPPLTREQLGQEVDYLIRNGWIPCIEFCKVGFVYREYHNSPGYYDGRYWTMWKLPMFGCTDSSQVLKEVDECSKAYPDYFNRIIGFDNTRQVQCISFLTYKPEGN

SEQ ID NO: 36893 - protein, 152 aa, Zea mays
  misc_feature (116)..(116): Xaa can be any naturally occurring amino acid
  unsure (1)..(152): unsure at all Xaa locations
MSSSSLSPTAGRTSGSDGDSAADTHRREKRRLSNRESARRSRLRKQQHLDELVQEVARLQADNARVGARAADIASQYTRVEQENTVLRARAAELGDRLRSVNEVLRLVEEFSGVAXMDIQEEMPADDPLLRPWQLPYPAAAMPIGAPHMLHY

SEQ ID NO: 36894 - protein, 566 aa, Schizosaccharomyces pombe
MNELHDGESSEEGRINVEDHLEEAKKDDTGHWKHSGTAKPSKFRAFIRLHFKDSRKFAFSRKKEKELTSEDSDAANQSPSGAPESQTEEESDRKIDGTGSSAEGGDGSGTDSISVIKKSFFKSGRKKKDVPKSRNVSRSNGADTSVQREKLKDIFSPHGKEKELAHIKKTVATRARTYSSNSIKICDVEVGPSSFEKVFLLGKGDVGRVYLVREKKSGKFYAMKVLSKQEMIKRNKSKRAFAEQHILATSNHPFIVTLYHSFQSDEYLYLCMEYCMGGEFFRALQRRPGRCLSENEAKFYIAEVTAALEYLHLMGFIYRDLKPENILLHESGHIMLSDFDLSKQSNSAGAPTVIQARNAPSAQNAYALDTKSCIADFRTNSFVGTEEYIAPEVIKGCGHTSAVDWWTLGILFYEMLYATTPFKGKNRNMTFSNILHKDVIFPEYADAPSISSLCKNLIRKLLVKDENDRLGSQAGAADVKLHPFFKNVQWALLRHTEPPIIPKLAPIDEKGNPNISHLKESKSLDITHSPQNTQTVEVPLSNLSGADHGDDPFESFNSVTVHHEWD

SEQ ID NO: 36895 - protein, 418 aa, Geobacter sulfurreducens PCA
MSIAEKIRNIAADARQAAIAMAKLSASAKNELLLAMAGSLVRNTVQLIEENRKDLEAGEAKGLSTAMLDRLMLNEARIKAMADGLREVAALSDPVGEVTRMWTRPNGLRVGKMRIPLGVIGIIYEARPNVTADAAALCLKSGNSVILRGGSEAIHSNLAIARILGEELKRAGIPAAALSVVPFPEREGVLEMLKQEEFIDLIIPRGGESLIRFVVENSRIPVIKHYKGVCHVFVDADADFDMAEKIIVNGKVQRPGVCNALETLLVHKDIAETFIPRIAETLIELKVELRGDDCVRQFVPQATKATEDDWHAEYLELILAVRVVDDLDEAVAHINRYGSLHTEAIVTRDYHNAQRFIREVNSSTVLVNASTRFADGNQLGLGAEIGISTTKLHSFGPMGLEDLTTTKFIVYGDGQVRP

SEQ ID NO: 36896 - protein, 411 aa, Xylella fastidiosa 9a5c
MNRRVVVTGMGMVSPLGNDLTTSWDGIVHGRSGIAPIVQIDASKLSTQIAGEIKGFDPMKFVSAKDAKKMDSFIYYGIGAAFMALDDAGLEINEINAERVGALIGSGIGGVFGIEEQTIKFYEGGVRKISPFYVPSTIINMLPGQLSVLKGLKGPTFSAVSACATSNHSIGMAMRMIQYGDADVMLAGGSERASSPTAIGGFCAMRAMSTRNDDPTGASRPWDKGRDGFVLGDGAGILVLEEYEYAKARGARIYAELAGFGATSDAFHMTMPVEDGEGAARCMRIALQDAKVTPEQIDYLNAHGTSTPLGDLCETNAIKTVLGDHAYKVMVSSTKSMTGHLLGAAGGVEAIFSVMALHTGIVPPTINLEEPDEGCDLDYVPHVAREAKLDVVVSNGFGFGGTNGTLVFKRI

SEQ ID NO: 36897 - protein, 394 aa, Rhodobacter sphaeroides 2.4.1
MRALTWHGKHDVRVETHPDPEIVNPRDAIIEVTATAICGSDLHLYDGVIPGLMSGDILGHEFMGRVVETGPKSTLKKGQRVVVPFTISCGQCFFCEHQLFSACDNSNPAEKQDLSEPLYGHAVSGLFGYSHLTGGYPGGQAEYVRVPYSDVGPIVIPDGLEDEQVLFLSDILPTGWMAAENAGIEEGDTVAVWGCGPVGLFAIQSALLMGAGKVIAIDEYPKRLALARRLGAEVIDFRRTKVLEALMEMSGGLGPDAVIDAVGMEAHGFMPDTLMDNMKQRVGIGADSGHALREAILAVRKGGRVSVPGVYGGFLDKFPLGALMEKGLTVKTGQTHVQRYTEELLRRIGEGEIDTTFLISHRLPLEEAARGYENFRFNQNEWTKVVLKPGLTGA

SEQ ID NO: 36898 - protein, 373 aa, Geobacter sulfurreducens PCA
MRSGILSKVKRIVIKIGSGVLTCGDNGLNKPLMGSIAAQVAELRASGRQVIIVSSGAVAAGRKELGIDGRPRSIPQKQAAAAIGQSRLMHAYEEAFEPFGHKVAQILLTRDDLAHRGRFLNARATLDTLLSFGVIPIINENDTVVFDEIKFGDNDSLSALVTNLAEANLLVILTDIDGFYEANPRTNPDARLIPLVRQITREMERAAGGSGSTVGTGGMVTKLAAAKKAGQFGVPTLMLNGRNPSLLAEAFAGREVGTLFLPGKESLNRRKHWIAHTLRPSGKIIVDDGARTVLARQGKSLLPSGVVRVEGKFDRGACVRVCGTDGTEIARGLVDYSHDEITRILGHRSGEIEAILGYKYGDEIIHRDNLVVL

SEQ ID NO: 36899 - protein, 145 aa, Brassica napus
MAKSTFKQEHDLEKRSAEAARIREKYPDRIPVIVEKAEKSDIPTIDKKKYLVPADLTVGQFVYVIRKRIKLSAEKAIFIFVDNVLPPTGALMSAVYEEKKEEDGFLYVTYSGENTFGYVIAIDLSLARYFISLFDYLSKQPMYFS

SEQ ID NO: 36900 - protein, 363 aa, Glycine max
MLSDRDGKEDMDRLSDLPDLVLLHIMKFMSMKHAVQTCVLSTRWKELWKRLSNLALHSSDFTNLAHFSKFLSWVLLNRDSSISLHSLDLRRKGCIDHELLDMIMGYAVSHDVQQLAIEVNLNAKFGFKLQPSIFSCKSLTFLKLSIWAVPWMTELPSSLQLPALKSLHLEHVTLTAGEGDCAEPFSACHMLNTLVIDRCNLHHGAKFLCICNSNLSTLTIGSTIQETPYKFILSTPNLRSLSVMRDPIHQLSACNLSLLEQVNIDVEAYFDAHFQRTHLALISLLQVLADYAKIMILSSSTLKILNGLSTSGSMITQIPCFVQLKSLKLKMKSSSNISDEGVSRIVEYLIIKCPVAKVDIINC

SEQ ID NO: 36901 - protein, 484 aa, Mesorhizobium sp. BNC1
MYLGLDLGTSGVKALLIDQAQRIVASATAELHVSRPHPGWSEQDPAQWIRATEEAITALKASHPAELSAVKGIGLSGQMHGATLLDKSDEPLRPSILWNDTRSYKEAAELDADPRFHRITGNIVFPGFTAPKLNWVRNNEPEIFAKIAKVLLPKDFLRLWLTGEHISEMSDASGTAWLDVENRRWSAELLATTSLDESHMPRLVEGTERAGTLRSGLAAHWGMSRGVVVAGGAGDNAASACGAGAVQSGAAFVSIGTSGVLFASNDAYLPNPASAVHTFCHALPEAWHQMGVILSATDSINWLAGITGREAADLTSELGETLKTPSGVIFLPYLSGERTPHNDAVIRGGFVGLAHQTDRAALTRAVMEGVAFAFRDSLEALRQAGTELSRVTGIGGGSRSIYWLKTIATALALPVDIPAEGDFGAAFGAARLGLIAAEEADPLAVCTPPRISSTIEPDAALLPAFEDTYQRYRGLYPAIRGVSS

SEQ ID NO: 36902 - protein, 274 aa, Rhodobacter sphaeroides 2.4.1
MMVIEIAAGTLYGSMALVADGWHMSTHAAALLITALAYLLARRHARDRRFTFGTGKFGDLAGFASAVVLAVVALLIGWESAMRLLDPVPIDFGQATVVAVIGLLVNLGSAALLHEGHDHGHGLDHGHGHGHGHHAQDNNLRAAYLHVLADALTSVLAIAALIGGRIGGWVWLDPLIGLLGALVIARWSLGLLRSAGGVLVDFIPEEEELPAEIRAALETGCDRITDLHVWQLGPGHHGAIVALRSGDPRPPDHYRGKLSHLHEISHLTLEVRPA

SEQ ID NO: 36903 - protein, 350 aa, Lupinus angustifolius
MALVTTTPTVNDEPLFAEVDMASYFTSTTVRATVVQASTIFYDTPATLDKAERLLVQAASYGAQIVVFPEAFIGGYPRGSNFGVSIGNRTAKGKEEFRKYHSAAIDVPGPEVDRLSAMAGKYKVYLVMGVIERDGYTLYCTVLFFDSQGRYLGKHRKVMPTALERIIWGFGDGSTIPVFQTPIGKIGAAICWENKMPLLRTAMYAKGVEIYCAPTADSRDLWQASTTHIALEGGCFVLSANQFCRRKDYPPPPEYVFSGTEEDLTPDSVVSAGGSVIISPSGAVLAGPNYEGEALISADLDLGEIARAKFDFDVVGHYSRSEVLSLIVKDHPTNPVTFTSTSTKIEDQTK

SEQ ID NO: 36904 - protein, 406 aa, Glycine max
  misc_feature (265)..(265): Xaa can be any naturally occurring amino acid
  unsure (1)..(406): unsure at all Xaa locations
MESRVLSRAGTLSSLPHLRKPPREAVSSASLVAVKAVGSVADGGNLIWGRQLRPELCSPVLKREAVLLRPCLAAASSPAEGSDSAGEAKVAPAGFFDKYPALVTGFFFFTWYFLNVIFNILNKKIYNYFPYPYFVSVIHLFVGVAYCLVSWAVGLPKRAPIDSNLLKLLIPVAVCHALGHVTSNVSFAAVAVSFTHTIKALEPFFNAAASQFILGQSIPITLWLSLAPVVIGVSMASLTELSFNWVGFISAMISNISFTYRSIYXKKAMTDMDSTNIYAYISIIALIVCIPPAVILEGPTLLKHGFNDAIAKVGLVKFVSDLFWVGMFYHLYNQVATNTLERVAPLTHAVGNVLKRVFVIGFSIIVFGNKISTQTGIGTAIAIAGVALYSFIKARMEEEKRQAKAA

SEQ ID NO: 36905 - protein, 393 aa, Arabidopsis thaliana
MTTICDLPRDLVARILSRVPLTSMRRVRFTCKRWNTISKDPSFAKTHFGKAARQFIMMSQSRVSLMSVKLHGDGKLTSLNNLDQVEISKVFHCNGLLLCLTKDKTRLTSLVVWNPYLGQTRWIKPRHAFHRLDVYALGYDKNLKNHKILRFVDSYEPAVKHSIIEHEIFDLKSNAWRVLDATPDWEIDSYQRGVSLKGNTYFFAKEKIVVEGDDVVVIEDFKDFLICFDFTSERFNLDHVCLYRFTLTMERPVREEQLAVLYQQDTCLMEIWVTNKIEPDVVSWSKVFLAVDMEPLTGSFIPFAFFAGSFFIDEEKKIAVVFDKDQEEINDRAYLIGENGYYKEVDLGYMNGYYQQQVDPRGPDPVFPLVCSYSPSLVTIPQGTRGKRKERDY

SEQ ID NO: 36906 - protein, 349 aa, Streptococcus pyogenes SSI-1
MKAATYLSTGNLQLIDKPKPVIIKPTDAIVQLVKTTICGTDLHILGGDVPACKEGTILGHEGIGIVKEVGDAVTNFKIGDKVIISCVTSCHTCYYCKRGLSSHCEDGGWILGHLINGTQAEYVHIPHADGSLYHAPDTIDDEALVMLSDILPTSYEIGVLPSHVKPGDNVCIVGAGPVGLAALLTVQFFSPANIIMVDLSQNRLEAAKTFGATHTICSGSSEEVKTIIDDITNGRGVDISMECVGYPATFDICQKIISVGGHIANVGVHGKPVDFNLDELWIKNITLNTGLVNANTTEMLLNVLKTGKIDATRLITHHFKLSEVEKAYETFKHAGANNALKVIIDNDIS

SEQ ID NO: 36907 - protein, 298 aa, Zea mays
GSRPPWCACDRAGNTAAMKKGPWMPEEDLVLVSYIHEHGPTKWRHVPASTGLMRCSKSCRLRWTNYLRPGIRRGNFTPREERVIVHLHSLLGNRWAAIASHLPQRTDNDIKNYWNTHLKKKLVVVEEQHRAAAAAAIVAAAARGHVDDDGVTTSSSPRLLAKDDSYGYGYDARPAAAYPCSMDNVSKLVKVKAGCMKSASSSSPPAQDGSSSIRRPFFSLDQTSGSTAPLPPISNVVPQPVLAGQGRHGGRFFHEPPQQQLSSIMENWLFLPKQQHQQQMTASSPTPTAAAHCPCCFS

SEQ ID NO: 36908 - protein, 386 aa, Triticum aestivum
  misc_feature (192)..(192): Xaa can be any naturally occurring amino acid
  misc_feature (202)..(202): Xaa can be any naturally occurring amino acid
  misc_feature (249)..(249): Xaa can be any naturally occurring amino acid
  misc_feature (272)..(272): Xaa can be any naturally occurring amino acid
  unsure (1)..(386): unsure at all Xaa locations
MQIFVKTLTGKTITLEVESSDTIDNVKAKIQDKEGIPPDQQRLIFAGKQLEDGRTLADYNIQKESTLHLVLRLRGGMQIFVKTLTGKTITLEVESSDTIDNVKAKIQDKEGIPPDQQRLIFAGKQLEDGRTLADYNIQKESTLHLVLRLRGGMQIFVKTLTGKTITLEVESSDTIDNVKAKIQDQREGIPPXDQQRLIFAGXKQLEDGPHPLPDYNIQKESTLHLVLRLRGGMQIFVKTLTGKTITLEXVESSDTIDNVKAKIQDKEGIPPXQQRLIFAGKQLEDGRTLADYNIQKESTLHLVLRLRGGMQIFVKTLTGKTITLEVESSDTIDNVKAKIQDKEGIPPDQQRLIFAGKQLEDGRTLADYNIQKESTLHLVLRLRGGQ

SEQ ID NO: 36909 - protein, 367 aa, Vibrio cholerae O1 biovar eltor str. N16961
MKNAYLLLTPGPLSTSESVREAMLKDWCTWDDDYNLEIVEVIRRKLVTLATTQSGYTSVLMQGSGTASVEATIGSVMLPTDKLLVIDNGAYGARIAQIAQYLNIACRVIAPGETAQPNLDEIADVLTHDPAITHVAIVHCETTTGMLNPIAEVAKIAKQHGKRVILDAMSSFGGIPMDIGALGIDFMISSANKCIQGVPGFGFVIAKRSELEQCQGRARSLTLDLFDQWQCMEKNHGKWRFTSPTHTVRAFYQALLELESEGGIAARYQRYQTNQTQLVKGMRELGFAPLLPEKLHSPIITSFYSPEHSDYQFAEFYQRLKQQGFVIYPGKVSHADCFRIGNIGEVYPQDIERLLSAMQHAIYWQQA

SEQ ID NO: 36910 - protein, 459 aa, Trametes sp. AH28-2
AIGPKANLVITDAAIAPDGFLRDAIVTNGVFPGPLIKGNKGDRFQLNVIDNLSNHTMLKSTSIHWHGFFQAGTNWADGPAFVNQCPIASGHSFLYDFHVPDQAGTFWYHSHLSTQYCDGLRGPFVVYDPKDPHASRYDVDNGQSSTVITLSDWYHTAARLRPRFPLGADSTLINGLGRSSSTPTADLAVINVQRGKRYRFRLVSLSCDPNHTFSIDGHNLTVIEVDGINSKPLTVDSIQIFAAQRYSFVLNANQPVGNYWVRANPNFGTTGFAGGINSAILRYQGAPNVEPTTTQTPSDIPLIETNLHPLSKMTPGKATIGGVDKALNLGFTFNGTNFFINDATFTPPTVPVLLQILSGAQTAQDLLPAGSVYPLPAHSSIEITLPASAAAPGFPHPFHLHGHAFAVVRSAGSPAYNYADPIWRDVVSTGVPGDNVTIRFRTDNPGPWFLHCHIDFHLE

SEQ ID NO: 36911 - protein, 611 aa, Thiomicrospira crunogena XCL-2
MSEQLIDILWVLISAVLVALMQPGFTALEAGATRTKNSISTAIKNVSDFLIAFMIFVVVGASIMLGTSHHGLFGWSPIFFYETSLSELVLTLFHAMFVSTAVTIISGSIAERTKYTSYLIIAVIVSLFIYPVQAHWIWNADGWLAQLGFIDFAGSTVVHSVGGWAALAAILIIGPRLGRFETKESPFEQANLAYSALGVFLIWLGWIGFNGGSVLALNFETGKVVLNTLIAGAIGGITGLIISRLYTGYYQVIDIINGILAGLVAITASAHLASPDAAILVGMLGYLAYLAGKILLVKWKIDDALEAVPVHLFAGVAGTLLVAFLADDVGFWQQLKIQLLGIIVVGLLTFLVSYTLLSIINRFYPLRVSESKEILGLNISEHQASTSMFDLAQAMNNQAQQQDFSKKIMVEPYSDASLIATYYNHVTQAFNQLNDEKEALIEESYQMANYDQLTGLAKRRLLVNELGRSIARLDRHTQSNAILFIDLDGFKSINDRYGHNAGDALLKESAARIQKIIRKTDLAARFGGDEFVVLLEDIQNESFAAQVADKIIAALRSPILLSNNSEGQISASIGLKIFSQSGKQHVDDILNQADKAMYEAKRRGKGQWVLA

SEQ ID NO: 36912 - protein, 377 aa, Bacillus sp.
MANDQHTELETEFTLDQVKDQLIEQGKKRSSLNYKDIMEKLSPFDQDPEQMDEFYEHLGDLGIEVVNENDEEVSNLRQGEDHDGNDNDDFNFDDDLSLPPGIKINDPVRMYLKEIGRVPLLSADDEVELAKRIMNGDEEAKRRLAEANLRLVVSIAKRYVGRGMLFLDLIQEGNMGLIKAVEKFDHNKGFKFSTYATWWIRQAITRAIADQARTIRIPVHMVETINKLIRVSRQLLQELGREPTPEEIAAEMELSVEKVREIMKIAQEPVSLETPIGEEDDSHLGDFIEDQEALTPADAAAYELLKEQLEDVLDTLTEREENVLRLRFGLDDGRTRTLEEVGKVFGVTRERIRQIEAKALRKLRHPSRSKRLKDFLE

SEQ ID NO: 36913 - protein, 514 aa, Trametes sp. 420
MSKFQSLVAFVALCLSHSRLVAGAIGPVADLTISNANISPDGFTRSAVVMNNQFPGPLVTGNKGANFQINVIDNLTNDTMLTATTIHWHGFFQKGTNWADGGAFVNQCPISKGNSFLYDFSAPDQAGTFWYHSHLSTQYCDGLRGPMVVYDPSDPHKSLYDVDDDSTIITLADWSHTAARLGPRFPFGGDSTLINGLGRFAGATTTADLAVITVTKGKRYRFRLVSLSCDPNFTFQIQGHSLSVIEADAVNVNPVTADSIQIFAGQRYSFVLNADQDVGNYWLWAVPNIGTVSVSGGVNSAILRYDGADPVEPDAADPSSSNLLQETSLVPLTDVAAPGTAVVGGVDYALNLDFSFDGTDFFVNGATFTSPTVPILLQIMSGAQSAADLLPSGSVFALPANSVVELSFPITATNAPGAPHPFHLHGHTFYVVRSAGSTDYNYVNPPQRDVVSTGTAGDNVTIRFRTDNPGPWFLHCHIDFHLEAGFAVVFAEDVPNVASANTPSCTSCSVSHVR

SEQ ID NO: 36914 - protein, 416 aa, Microcystis aeruginosa
MMQAHDVLTLTEPPLDLDLIDLDEDFDDEDIELELEETSDSNDGKKTRRLASARRRDAARKKPYTEDSIRIYLQEIGRIRLLRAEEEIELARKIADLLKLERIREDFCLYSDAEWGKQVFLFERIEKIIVEKSEKEPKLSDIKAYLGKTELTAPLLEEWLAKSKEYLSAFKRRLYHGRRAKEKMVQSNLRLVVSIAKKYMNRGLSFQDLIQEGSLGLIRAAEKFDHEKGYKFSTYATWWIRQAITRAIADQSRTIRLPVHLYETISRIKKTTKILSQEMRRKPTEEEIATKMEMTIEKLRFIAKSAQLPISLETPIGKEEDSRLGDFIEADGETPEDEVSKNLLREDLENVLDTLSPRERDVLRLRYGLDDGRMKTLEEIGQIFNVTRERIRQIEAKALRKLRHPNRNSILKEYIR

SEQ ID NO: 36915 - protein, 519 aa, Trametes sp. 420
MLQLTSFRRLSLFLFTALATRTFAAIGPVTDLNIVNANISPDGFARDAVLAEGTFPGPLITGQKNDNFRINVVDKLTNTTMLTATSIHWHGFFQHGTNWADGVPFLNQCPIVSGNSFLYNFNVPDQAGTFWYHSHLNTQYCDGLRGALVVYDPADPHASLYDVDEESTVITLADWYHVAAPLAGAVPRSDATLINGLGRWSGDPTSELAAINVTPGKRYRFRLVSMSCDPNYTFQIDGHSMTVIEADGQNTEPLPVDQIQIFAGQRYSFVLEANQTVGNYWIRASPNLVADGGSGFANGINSAILRCDGAPEEEPTTTQDTSINPLREFDLHPLTDPAAPGNPTEGDVGVPINLAIGFSGGNFTVNGTTFESPSVPVLLQILSGAQNAQDLLPSGSVYSLPSNATVELSIPAFAIGGPHPFHLHGHAFSVVRSAGQTEPNYVNPVRRDVVSIGSGTDNVTIRFRTDNPGPWFLHCHIDWHLQAGLAIVFAEDIPETAATNPVPQAWSDLCPEYEASLNA

SEQ ID NO: 36916 - protein, 483 aa, Cytophaga hutchinsonii
MLAVVSSIFGGIVALVGYQYFVKKNEFTSIESMQRASFANFSDTSAIAVPAGLNFIHAAELTTPAVVHIKTTYMPETTRPKTRDEELFRYFYGDPYENYNQPREASGSGVIVTGGGYIVTNNHVVDKASKIQVVLNDKRTYDAKLIGTDPTTDLALIKIEGENLPFVVYGNSDQVRIGEWVLAVGNPFNLTSTVTAGIISAKTRSINILRDKDNMAIESFLQTDAVVNPGNSGGALVNLRGELIGINTAIASPTGAYAGYSFAVPVSLVKKVIDDIMNYGQVQRGLLGVVIQDMTPALAKEKTIDFISGVYVSAVNQGSAADLGGIKEGDIVTKINDINIGATTQLQEVVARYRPGDKLKVKYVRKGKELETSVTLKNKLGDMAIVAKDDNSVKTKLGADLQPVSGGEMSVLEISGGAKVAKLFSGKLKEAGVREGFIITSIDKKPVSSPEDVVRILESTTNGGILMEGIYPNGKKEFYGIGW

SEQ ID NO: 36917 - protein, 642 aa, Neisseria gonorrhoeae
MSKNQNHEEYQDDARPLTIEEQRARLRQLIIMGKERGYITYSEINDALPDDMSDADQIDNIVSMISGLGIQVTEHAPDAEDILLSDNAAVTDDDAVEEAEAALSSADSEFGRTTDPVRMYMREMGQVDLLTREDEIIIAKKIENALKNMVQAISACPGSIAEILELIEKICKDEIRVDEVVEAIIDPNEVLRNELGLGHLETTAPEKPSNDNSDENEDDEESEEDADEISAANLAELKQKVIGHFAQIEKDYKKMIGCLEKHHSRHKDYLAYRDAIANKLLEVRFATRQIDSLSSSLRGKVENIRKLEREIRDICLDRVHMERDYFIQNFLPEITNLQWIEEEIAKGRVWSNALDRFRHAILEKQTELADMEKETRISIEELKEINKNMVSSEKVSAAAKQEMIQANLRLVISIAKKYTNRGLQFLDLIQEGNIGLMKAVDKFEYRRGYKFSTYATWWIRQAITRSIADQARTIRIPVHMIETINKMNRISRQHLQETGEEPDSAKLAELMQMPEDKIRKIMKIAKEPISMETPIGDDDDSHLGDFIEDANNVAPADAAMYTSLHEVTKEILESLTPREAKVLRMRFGIDMNTDHTLEEVGRQFDVTRERIRQIEAKALRKLRHPTRSDRLRSFLDSEDSKL

SEQ ID NO: 36918 - protein, 394 aa, Deinococcus radiodurans R1
MKLLVVGGAGYIGSHTVRQLRAAGHEVAVFDNLSSGHAEALPGEVELIRGDLLDAASIRAALEAQKPDAIIHFAALIEVGESMRAPGRYYRNNVVGTLNLLQSIVETRKVPLVFSSTAAVYGTTDAVPIPEDAAMQPESVYGETKRMSEQMIHAFHVAHGLPYTVLRYFNVCGAAPGGDIGEAHPNKTHLIELACLTALGQREKMMIFGDDYPTPDGTCIRDYVHVQDLADAHVLAVEALHAGKTDAATYNVGLGHGFSVREVLDAVDAVVGTPLQRELAPRRAGDPPRLVADASRIVDQLGFAPKFTDLRDIVQTAWDWHRTHPQGLGSNNKDPSPLPLAGPLLRSFTSLPLVEGQTAQHKQRTEISPPFLLPLLYSSSSTTALPRVASRRAA

SEQ ID NO: 36919 - protein, 519 aa, Trametes sp. 420
MLQLTSFRRLSLLLVTALATRSFAAIGPVTDLNIVNANISPDGFARDAVLADGTFPGPLITGQKNDNFQINVVDKLTNTTMLTATSIHWHGFFQHGTNWADGVPFLNQCPIVSGNSFLYNFNVPDQAGTFWYHSHLNTQYCDGLRGALVVYDPADPHAGLYDVDDESTVITLADWYHVAAPLAGAVPRSDATLINGLGRWSGDPTSELAVINVTPGKRYRFRLVSMSCDPNYTFQIDGHSMTVIEADGQNTEPLPVDQIQIFAGQRYSFVLEANQTVGNYWIRASPNLVADGGSGFAHGINSAILRYDGAPEEEPTTTQDTSINPLREFDLHPLTDPAAPGNPTEGDVEVPINLAIGFSGGNFTVNGTTFESPSVPVLLQILSGAQNAQDLLPSGSVYSLPSNATVELSIPAFAIGGPHPFHLHGHAFSVVRSAGQTEPNYVNPVRRDVVSIGSGTDNVTIRFRTDNPGPWFLHCHIDWHLQAGLAIVFAEDIPETAATNPVPQAWSDLCPEYEASLNA

SEQ ID NO: 36920 - protein, 614 aa, Pseudomonas putida
MSGKAQQQSRIKELITRGREQGYLTYAEVNDHLPEDISDPEQVEDIIRMINDMGINVFESAPDADALLLAEADTDEAAAEEAAAALAAVETDIRRTTDPVRMYMREMGTVELLTREGEIEIAKRIEEGIREVMGAIAHFPGTVDYILGEYDRVNRGCRLSDVLSGYIDPDDNIAAPTEEVPIPGTKAAAAKEEADDDEEESEGGDDEEEPKAALTRSSQPSVSVRYPSSFSDHQGPEEKRSYPQGKRRALQALADLFMPIKLVPKQFEVLVERVRDALNRLRQQERAIMQLCVRDARMPRADFLRMFPSNETDQTWSGDLAKRNTKWAAALGEKDAAIVACQQKLIDLETETGLTVAEIKEINRRMSIGEAKARRAKKEMVEANLRLVISIAKKYTNRGLQFLDLIQEGNIGLMKAVDKFEYRRGYKFSTYATWWIRQAITRSIADQARTIRIPVHMIETINKLNRISRQMLQEMGREPTPEELGERMEMPEDKIRKVLKIAKEPISMETPIGDDEDSHLGDFIEDSTMQSPIYVATVESLKEATRDVLSGLTAREAKVLRMRFGIDMNTDHTLEEVGKQFDVTRERIRQIEAKAWRKLRHPTRSEHLRSFLDE

SEQ ID NO: 36921 - protein, 563 aa, Trametes sp. 420
MGKLQSFTALVVLLFSSANRAVAAIGPVADLTISNADVSPDGFTRAAVVMNGQTPGPLITGNKGDDFQINVIDSLDNDTMLTPTTIHWHGFFQKGTNWADGAAFVNQCPISTGNSFLYDFTATDQAGTFWYHSHLSTQYCDGLRGPLVVYDPDDPHASLYDVDDDTTVLTVSDWYHTAARLGTQFPTADSTLINGLGRFAGGDADSALAVVNVTQGQRYRFRLLSLSCDPNHIFTIQGHNFTVIEVDGVNVEPVTVDSIQIYAGQRYSFVLTADQDVDNYWIQAVPNTGTVATTGGVNSAILRYSGAEEIEPDAADQSSTNLLAETDLVPLENLAAPGDASEGGVDYALSLDFDFVLRNGTAFFINGDSFTPPSVPVLLQIMSGTQSAADLLPSGSVYTLPSNATVEISFPMTSTNAPGAPHPFHLHGHTFYVVRSAGSSDYNYVNPPQRDTVSAGTAGDNVTIRFTTNNPGPWFLHCHIDYHLEAGFAIVLSEDTEEAASLNTASCKCRRGCWFNFHGSVLMLLYRSCLGRPVPRLQRCLPRRHLSIINCGTRRDAEGYTPL

SEQ ID NO: 36922 - protein, 432 aa, Glycine max
MASKEFSGLCSLAPSLSESILCTTGLKMYMLESKGGAIACMFLSLFFLGTWPALLTMLERRGRLPQHTYLDYSITNFLAALLIAFTLGGIGKGTHDQPNFLVQLAQDNWPSVLFAMGGGLFLSLGNLSSQYAFAFVGLSVTEVITASITVVIGTTLNYFLDDKINKAEILFPGVGCFLIAVFLGSAVHSSNAADNKAKLSNFTGDYKDGDISSKEGDIVKSKDLESGSSSADNVEAGTAVFLVELEEKRAIKVFGKSTLIGLALTFFAGLCFSMFSPAFNIATNDQWNTLKKGVPHLTVYTAFFYFSISCFVIAMILNITFLYHPVLNLPKSSFKAYLADSDGRVWALLAGLLCGFGNGLQFMGGQAAGYAAADAVQALPLVSTFWGVILFGEYRKSSRRTYILLGSMLFMFIVAVAVLMASSGQRNSTAKE

SEQ ID NO: 36923 - protein, 403 aa, Debaryomyces hansenii CBS767
MSAASLLKKKGSDIVVLSALRSPVTRCVKGGNAKMYPEELLYQILKGSVDRCNINPELIDDILIGTVLQTLGGQKASALAVKSAGFPIKTTVNTVNRQCASSAQALSYSAGSILTGENQFAIAAGVESMTHDYFPHRGIPTRIYQPFKDEASSEAQNVLMPMGITSENVAKKFGISREDQDAFALQSHLKANKATESGHFLNEIIPIKARTNNEDEPLNIVEVSKDDGVRGGSTLEKLASLKPVFAEDGTTTAGNSSQISDGASAVIITTRDNAEKIGVKPIARFVGSSVAGVPSDLMGIGPSAAVPQLLNRLKVDINDIDIFELNEAFASQSLYCINKLGINHDKVNPYGGAIAIGHPLGATGGRVISTLLNGLRAQNKELGVISMCTSTGQGYAALFANEA

SEQ ID NO: 36924 - protein, 492 aa, Glycine max
MDPYKHRPSSAFNSPFWTTNSGAPIWNNNSSLTVGARGPILLEDYHLVEKLANFDRERIPERVVHARGASAKGFFEVTHDISHLTCADFLRAPGVQTPVIVRFSTVIHERGSPETLRDPRGFAVKFYTREGNFDLVGNNLPVFFVRDGMKFPDMVHALKPNPKNHIQENWRILDFFSHFPESLHMFTFLFDDLGVPQDYRHMDGFGVNTYTLINKAGKAVYVKFHWKTTSGIKCLLEEEAIKVGGANHSHATQDLHDSIAAGNYPEWKLFVQTIDPEHEDKFDFDPLDVTKTWPEDIIPLQPVGRLVLNKNIDNFFAENEQLAFCPAIVVPGVYYSDDKMLQTRIFSYADSQRHRLGPNYLQLPANAPKCAHHNNHHEGFMNFIHRDEEVNYFPSRYDPVRHAERFPIPPAICSGRREKCGIEKENNFKQPGERYRSWAPDRQDRFARRWVDALSDPRVTHEIRSVWISYWSQADRSLGQKIASHLSTRPNI

SEQ ID NO: 36925 - protein, 204 aa, Triticum aestivum
MDRYEVVRDIGSGNFGVAKLVRDVRTKEHFAVKFIERGHKIDEHVQREIMNHRSLKHPNIIRFKEVVLTPTHLAIVMEYASGGELFQRICNAGRFSEDEGRFFFQQLISGVSYCHSMQVCHRDLKLENTLLDGSVAPRLKICDFGYSKSSVLHSQPKSTVGTPAYIAPEVLSRREYDGKVADVWSCGVTLYVMLVGAYPFEDPD

SEQ ID NO: 36926 - protein, 545 aa, Buchnera aphidicola str. APS (Acyrthosiphon pisum)
MTKNYIFITGGVVSSLGKGIAAASLGAILKARNLNITIIKLDPYINVDPGTISPIQHGEVFVTEDGAETDLDLGHYERFIHTKMTFLNNFTTGGVYSQVLKKERRGDYLGATIQVIPHITNAIKERIILCSENSNIILVEIGGTVGDIESLPFLEAIRQMAVDIGRKNVIYIHLTLVPYIATAGEIKTKPTQHSVKQLLSIGIQPDILICRSEKTVPLHERKKIALFCNVPVDAVISLKDVNSIYKIPKLLKNQKLDDYICNYFKLNVPEADLQEWEEVIYAEKNFNNTIVIGIIGKYIKLPDAYKSVMEALKHAGFKNKIKVDIQLIDSQEVENKNFQILKNLNGILIPGGFGDRGIVGKLLSIQYARENHIPYFGICLGMQIAIIEFAQNVVGIKEANSTEFDPQCKYPIIDLIKNRPNNSSKNYNKIENRINLGGTMRLGSQPCKLSANSLSRKLYNQEIIIERHRHRYEVNNLLFKKIEAAGLQVTGRSQKNNVVEIIELSNHPWFLACQFHPEFTSTPRDGHPLFIDFIKSAGKHKKNFI

SEQ ID NO: 36927 - protein, 436 aa, Streptococcus thermophilus LMG 18311
MYRVFKEYFDIVNNVKYDVNDMPKVGLLVGLSFQHLFAMFGATVLVPILVGIDPAIALFSSGLGTLAHLTVTKYKIPAYMGSSFAYIAAMQMLMKTDGIGAVAQGAMAGGLVYLIVALVVKYVGNAWIDRVLPPIVVGPIIIVIGLSLAANAVKDATMVNDTYSIFSLVISMVTLFSVILFNMYGKKIIGVIPILLGLIVGYIFSVVLGWLTGHEFVQFSKVAAAHWFQVPSFDIPFVNYDFKLYPSAILTMAPIAFVTMTEHFGHVMVLNSLTGRDYFKDPGLDRTLTGDGLAQIIAGFFGAPPVTSYGENIGVMALSKVYSVYVIAGAAVIAVLMSFIGKVSALLSSIPTAVLGGISIALFGVIAASGLKILVEHKIDFDNKKNILIASVILVSGIGGLMIDLGGFQITGVASSTILGIVLYQILPDPNKGSKN

SEQ ID NO: 36928 - protein, 140 aa, Triticum aestivum
  misc_feature (16)..(16): Xaa can be any naturally occurring amino acid
  unsure (1)..(140): unsure at all Xaa locations
RTWGVKQKVKEAKFPXIRVVPMLWNVLMEAVKWSGKNQQQNSNSALGQVNAWAGLMNAFCTSGKLELELIYKVQTQCYEHAKLMKLFPEIIRSLYDQDVLAEDTILLCSAKGRTKKEGNLSFVKALEPFVKWLEEAEEEE

SEQ ID NO: 36929 - protein, 538 aa, Lactobacillus gasseri
MTPWWKKAVIYQIYPKSFQDSNGDGIGDIPGIISRLEYLEKLGIDAIWLSPVYLSPGIDNGYDISDYQKIDPQYGTMKDMDNLIKEAKKHHIRIVMDLVVNHTSDQHPWFVEAKKSQDNPYRDFYIWRDPVDGHEPNDLKSAFSGSAWKFDEKTGQYYLHFFADQQPDLNWKNPELRNKVYDMMNYWIDKGISGFRMDVIELIGKDPDQKIRENGPMLHPYLKEMNEHTFANKDMMTVGETWNATPKIAEEYSDPARHELSMVFQFENQALDQEPGKEKWDVRPLDLGELKKVLIKWQTEIDFNHAWNSLFWENHDIPRVISRWGNDQEYRVQCAKMFAIILHLMRGTPYIYNGEEIGMTNCPVKSIDEVEDIESINMYHERLEQGYKRADLINSINVKGRDNARRPMQWSNEENAGFTSGNPWLKVNPNYQKINVKAALADLDSIFYTYQKLIKLRHENPVVVDGDFELVENTGDSVLAFWRKLGSEKWLIVANLSGDRQRFNLDNDFKEVLISNYEKQDSLKNIILKPYEAFAVKA

SEQ ID NO: 36930 - protein, 191 aa, Arabidopsis thaliana; identical to SEQ ID NO: 1441

SEQ ID NO: 36931 - protein, 228 aa, Oryza sativa
  misc_feature (177)..(177): Xaa can be any naturally occurring amino acid
  unsure (1)..(228): unsure at all Xaa locations
VQDKRWPYVSIPLARGDRPEDWVPTEDASVDYDDNYDGIGDILPGQNEDIVDIFSARSYSNEGYHHVSEKDVEESPTGLTLKNKWEDTHWFSIWWQQFVDAATLESSVSRKMDSTCLSVIGISWNLIIAPWKMLFAFIPPYEIAHGWIAFICSLIFISGIAYGVTKITDQISCVTGXSPYVIAFTALAAGTSWPDLVASKIAAERQITADSAIANITCRYISAHLLSN

SEQ ID NO: 36932 - protein, 453 aa, Glycine max
VGEEVGRGHFGYTCQAKFKKGELKGQQVAVKVIPKAKMTTAIAIEDVRREVKILRALNGHSNLIQFYDAFEDQDNVYIVMELCEGGELLDMILSRGGKYSEDDAKAVMVQILNVVAFCHLQGVVHRDLKPENFLYAKKDESSELKAIDFGLSDFVRPDERLNDIVGSAYYVAPEVLHRSYSTEADVWSIGVIAYILLCGSRPFWARTESGIFRAVLKADPSFDETPWPSLSLEAKDFVKRILNKDPRKRISAAQALSHPWIRNCNNVKVPLDILIFKLMKTYMRSSSLRKAALRALSKTLTADELYYLREQFALLEPSKNGSISLENVNKALMKYATDAMKESRILDFLSSLNSLQYRRMDFEEFCAAALSVHQLEALDRWEQHARCAYELFDKDGNRAIVIEELVSELGLGPSIPVHVVLHDWIRHTDGKLSFLGFVKLLHGVSSRSLAKVQ

SEQ ID NO: 36933 - protein, 199 aa, Nannochloropsis gaditana
AGGIAEMSQQPEFVRESTDRLDAAGNVTKAITKGYSIGSASLACFLLFGAFMDEFSQFSGKPFRVVDIAVPEVLIGGIIGTMMVFYFVGLTVAAVGKTAGEVVKEVRRQFRDNPEIMTFKARPDYRSCVALVTHAALKEMVWPGLLATGLPIVVGVVFRGVGAITDRSLLGAEVPGRGYLMFGTVTGDTCMAATTRTMS

SEQ ID NO: 36934 - protein, 243 aa, Cyanidioschyzon merolae
MLIAYLTAGAPDINTTKEAVMKLAKKGADVIEIGVPYSDPLADGAILQKASKQALMNGFHLDHLWNLLSEVNEIEVPLVILAYYNQIWHYGVEKWVKKLVAHYVKGLIVPDLPYEESKTLRQICDRYGLNIIWLISPTTNKTRAQELARACKDWIYVISRTGVTGLETEFDKQIPKLIGELKKVTKAPIALGFGISKSEQVKLVKSWGADGVIIGSACMQILLEKGVDQLSEWISVMKKSFCP

SEQ ID NO: 36935 - protein, 473 aa, Arabidopsis thaliana
MQALQSSSLRASPPNPLRLPSNRQSHQLITNARPLRRQQRSFISASASTVSAPKRETDPKKRVVITGMGLVSVCGNDVDAYYEKLLSGESGISLIDRFDASKFPTRFGGQIRGFSSEGYIDGKNERRLDDCLKYCIVAGKKALESANLGGDKLNTIDKRKAGVLVGTGMGGLTVFSEGVQNLIEKGHRRISPFFIPYAITNMGSALLAIDLGLMGPNYSISTACATSNYCFYAAANHNHRGEADMMIAGGTEAAIIPIGLGGFVACRALSQRNDDPQTASRPWDKARDGFVMGEGAGVLVMESLEHAMKRGAPIVAEYLGGAVNCDAHHMTDPRADGLGVSSCIERCLEDAGVSPEEVNYINAHATSTLAGDLAEINAIKKVFKSTSGIKINATKSMIGHCLGAAGGLEAIATVKAINTGWLHPSINQFNPEQAVDFDTVPNEKKQHEVDVAISNSFGFGGHNSVVAFSAFKP

SEQ ID NO: 36936 - protein, 1054 aa, Saccharomyces cerevisiae
MTIIVASLFLPYTPQFEADVTNSDTAKLVESSMIKVDCNNQELSNNKQERSSSVTSASSHYIGLPQEAQINGEPLQRANVGSPATGVNYHNEMEMLSSEQFLEELTANATHAANSGIPPANNPVSSGSTAQRPSVEEFFSAPSARVCSPSQEASASSISASRSSAHHNDLSSSLMKNPNLSFDSHLPRVRSSSKSAVITPVSKSVPDVDPAVVDVAKVREEFQQQASLPSMKRVSGSTAGDSSIASSSSNLRYSQQFQDNFIEDTDSEDDIDSDLETDATKKYNVPKFGGYSNNAKLRASLMRNSYELFKHLPWTIVDSDKGNGSLKNAVNIAVAEKTVKEPVSWVGTMGIPTDELPHEVCHKISKKLEQDFSSFPVVTDDITFKGAYKNYAKQILWPTLHYQIPDNPNSKAFEDHSWDYYQKVNQKFSDRIVSVYKPGDTIWIHDYHLMLVPQMVREKLPKAKIGFFLHVSFPSSEVFRCLANRERILEGIIGANFVGFQTKEYKRHFLQTCNRLLAADVSNDEVKYHCNIVSVMYAPIGIDYYHLTSQLRNGSVLEWRQLIKERWRNKKLIVCRDQFDRIRGLQKKMLAYERFLIENPEYIEKVVLIQICIGKSSDPEYERQIMVVVDRINSLSSNISISQPVVFLHQDLDFAQYLALNCEADVFLVDALREGMNLTCHEFIVSSFEKNAPLLLSEFTGSSSVLKEGAILINPWDINHVAQSIKRSLEMSPEEKRRRWKKLFKSVIEHDSDNWITKCFEYINDAWESNQETSTVFNLAPEKFCADYKASKKHLFIFKISEPPTSRMLSLLSELSSNNIVYVLSSFTKNTFEGLYNGVLNIGLIAENGAYVRVNGSWYNIVEELDWMKEVAKIFDEKVERLPGSYYKIADSMIRFHTENAEDQDRVPTVIGEAITHINTLFDDRDIHAYVHKDIVFVQQTGLALAAAEFLMKFYNSGVSPTDNSRISLSRTSSSMSVGNNKKHFQNQVDFVCVSGSTSPIIEPLFKLVKQEVEKNNLKFGYTILYGSSRSTYAKEHINGVNELFTILHDLTAA

SEQ ID NO: 36937 - protein, 220 aa, Lactobacillus gasseri
MLKGLIFDLDGVLTNSAVYHLTAWNNLAKELGINLTDEQLDSLRGISRMDSLNLILKYGGQENKYSEAEKEKFAEEKNTKFVEQVEKMTPADILPGIPELLSDAKKQNLKMVIASASKNAPKILTKLGIMDEFDGIVDPATLHRGKPDPEIYEKAQKLLGLNANEVISFEDAQAGVQSIKSAGQFAVGIGDKEVLKEADYIVPTTKELKLSEIESVFNKK

SEQ ID NO: 36938 - protein, 442 aa, Escherichia coli O157:H7
MAMFGLPHWQLKSTSTESGVVAPDERLPFAQTAVMGVQHAVAMFGATVLMPILMGLDPNLSILMSGIGTLLFFFITGGRVPSYLGSSAAFVGVVIAATGFNGQGINPNISIALGGIIACGLVYTVIGLVVMKIGTRWIERLMPPVVTGAVVMAIGLNLAPIAVKSVSASGFDSWMAVMTVLCIGLVAVFTRGMIQRLLILVGLIVACLLYGVMTNVLGLGKAVDFTLVSHAAWFGLPHFSTPAFNGQAMMLIAPVAVILVAENLGHLKAVAGMTGRNMDPYMGRAFVGDGLATMLSGSVGSSGVTTYAENIGVMAVTKVYSTLVFVAAAVIAMLLGFSPKFGALIHTIPAAVIGGASIVVFGLIAVAGARIWVQNRVDLSQNGNLIMVAVTLVLGAGDFALTLGGFTLGGIGTATFGAILLNALLSRRLVDVPPPEVVHQEP

SEQ ID NO: 36939 - protein, 229 aa, Phytophthora infestans
MQIFVKTLTGKTITLDVEPSDSIDNVKQKIQDKEGIPPDQQRLIFAGKQLEDGRTLSDYNIQKESTLHLVLRLRGGMQIFVKTLTGKTITLDVEPSDSIDNVKQKIQDKEGIPPDQQRLIFAGKQLEDGRTLSDYNIQKESTLHLVLRLRGGMQIFVKTLTGKTITLDVEPSDSIDNVKQKIQDKEGIPPDQQRLIFAGKQLEDGRTLSDYNIQKESTLHLVLRLRGGN

SEQ ID NO: 36940 - protein, 394 aa, Vibrio cholerae O1 biovar eltor str. N16961
MPFFFYNFVKNQKEMLMKRLFAWGAPLFALVALTLSLFSQADTKPSTIDSTSANYQQATLAGGCFWCTESDMEKLPGVVDVISGYAGGDVDNPTYKQVSSGKTGHIEVIQVTFDPKIVTYEQVLDNFFRHIDPTDDQGSFVDRGEQYRPAIFYHNAEQLEVAKRFMMEIDQLGIFKKPLKTELIEFKKFWPAEDYHQDYYKKNKVRYNYYRYASGRDQYLDEIFGADRNTHPKTLRQWIDEKNGQANVKAYVRPSDEQIRAKLTSLQYKVTQRDGTERPFDNEYWDNKEEGIYVDIVSGEPLFSSTDKYDSKTGWPSFTQPLNSSYIVTKDDNSLFYTRTEVRSRFADSHLGHVFNDGPAPTGLRYCMNSAAMRFIPKQEMAAQGYGEYLALFK

SEQ ID NO: 36941 - protein, 404 aa, Shewanella sp. MR-7
MRPIIKSNKLDTVCYDIRGPVHKEARRLEDEGHRILKLNIGNPAPFGFEAPEEIVRDVILNLPSAQGYCESKGLFSARKAIVQHYQAQGIFGVDIEDIYIGNGVSELIMMAMQGLLNTDDEILIPSPDYPLWTAAANLAGGKAVHYRCDEDADWFPDLDDIKSKISSRTRGIVLINPNNPTGAVYSKELLLQVVELCREHNLILFADEIYDKILYDEAKHIPAASLSDDILTVTFNGLSKAYRAAGFRVGWMMLSGNLKAAKSYIEGLEMLSSMRLCANVPNQHAIQTALGGYQSINELILPSGRLTVQRDTCYELLNQIPGVSVKKPKGALYAFPKLDMKKFNLRDDERLVLDLLREKKILLVHGSAFNWPEPDHLRVVFLPYKEDLTKALTEFGHFLETYKQ

SEQ ID NO: 36942 - protein, 195 aa, Kluyveromyces lactis NRRL Y-1140
MNGFVNWYTASVKRSPRLTNGIMTGSLFGIGDVIAQVGFPEKKGQKYDLARTVRAVVYGSLIFSIIGDSWYKFLNQKVIVKPGKHWTNTAARVGCDQLLFAPVGIPMYYGVMSILEGKSLVDAKKKIEDNWWPTLVTNWYVWPAFQLINFSLVPVHHRLFSVNIISIFWNAFLSFKNSISPSDKKVPVNFPPVPE

SEQ ID NO: 36943 - protein, 411 aa, Oryza sativa
MNALAATSRNFKQAAKLLGLDSKLEKSLLIPFREIKVECTIPKDDGTLASYVGFRVQHDNARGPMKGGIRYHHEVDPDEVNALAQLMTWKTAVANIPYGGAKGGIGCSPGDLSISELERLTRVFTQKIHDLIGIHTDVPAPDMGTNSQTMAWILDEYSKFHGYSPAVVTGKPVDLGGSLGRDAATGRGVLFATEALLAEHGKGIAGQRFVIQGFGNVGSWAAQLISEAGGKVIAISDVTGAVKNSNGLDIAKLMKHSSENRGIKGFDGGDAIDPRSLLTEECDVLIPAALGGVINKDNANEIKAKYIIEAANHPTDPEADEILSKKGVLILPDILANSGGVTVSYFEWVQNIQGFMWDEEKVNNELKTYMTRGFRDVKEMCRSHHCDLRMGAFTLGVNRVARATVLRGWEA

SEQ ID NO: 36944 - protein, 148 aa, Brassica napus
GNPSSSTPSRYLHSQSAVSSEPREMADQETVAVVEAPTPVLGEPMDLMTALQLVMKKSGAHDGLVKGLREAAKAIEKHAAQLCVLAEDCDQPDYVKLVKALCAEHNVHLVTVPSAKTLGEWAGLCKIDSEGKARKVVGCSCVVVKDYG

SEQ ID NO: 36945 - protein, 228 aa, Brassica napus
PGRPRLPTNQKDGLRPSIIGSHLWQLAWRNRKEGRCPLEPGEVAVILRAMGYPKETQIYVASGQVYGGQNRMAPLRNMFPNLVTKEDLAGKEELASFRKHVTSLAALDFLVCLKSDVPARPHGGNFAKLIIGARRYMGHRQKSIKPDKGLMSKSFGDPYMGWATFVEDVVVTHQTRTGLPEETKKVEESTTFNLLLGFFRQSLEFSNDLVLLQDAFTFGFNPTKIIIT

SEQ ID NO: 36946 - protein, 158 aa, Pisum sativum
MSLIPSFFGNRRSNVYDPFSLDVWDPLKDFPFPSSALSASFPRENSAFVSTRVDWKETPEAHVFKADLPGLKKEEVKVEVEDDRVLQISGERSVEKEDKNDEWHRVERSSGKFLRRFRLPENAKMGQVKASMENGVLTVTVPKEEIKKPDVKSIEISG

SEQ ID NO: 36947 - protein, 563 aa, Kluyveromyces lactis NRRL Y-1140
MLTRNIVRTRPFSSHLFIRTLRQQRFFSDTTSVPKKRLINWKYVAFGLAGTGVAFYNTNDTFHDFTRHIYLTLGRVGVVTRATARCFYHYKKTLDGKYQNDAEYQTALKNCHKRCADITLKALERNGGVFIKLGQHIGAMTYLLPPEWTDTMIPLQDKCPESTVQEIDQMFQQDLKCTLDEVFSEFDPRPIGVASLAQVHVAKLKSTGEKVAVKCQHPQLKEFVPLDVMLTQTVFNLLDVVFPEYPLTWLGDELQSSIYIELDFTKEAENAKKSAEDFISCVNKTALRIPKVVSANKRILILEYLHGERLDNIKYMDEHHISRSEVSSCLSHIFNRMIFTPNVGIHCDPHGGNLAIRALEKPYKGHNFEIILYDHGLYRTPTTEMRRDYAKFWLALLDQDQEKLHYYAKQFAHVNDEQVPLFAAAITGRSIDTALNYDISKPRSQEEMAVMSSKITEGDLLVDLMSILSKIPSVVLLILKTNDLTRHLDECLHNPLGPERTFLIMSQYCSKIVYDEARETINGSYSRWSVKWIFCELKAWLEFQRRKNQLVLYDLALWWKNKF

SEQ ID NO: 36948 - protein, 521 aa, Lycopersicon esculentum
MAASIGALKSSPSSHNCINERRNDSTRAISSRNLSFSSSHLAGDKLMPVSSLRSQGVRFNVRRSPLIVSPKAVSDSQNSQTCLDPDASRSVLGIILGGGAGTRLYPLTKKRAKPAVPLGANYRLIDIPVSNCLNSNISKIYVLTQFNSASLNRHLSRAYASNMGEYKNEGFVEVLAAQQSPENPDWFQGTADAVRQYLWLFEEHNVLEYLILAGDHLYRMDYEKFIQAHRETDADITVAALPMDEKRATAFGLMKIDEEGRIIEFAEKPQGEQLQAMKVDTTILGLDDKRAKEMPFIASMGIYVISKDVMLNLLRDKFPGANDFGSEVIPGATSLGMRVQAYLYDGYWEDIGTIEAFYNANLGITKKPVPDFSFYDRSAPIYTQPRYLPPSKMLDADVTDSVIGEGCVIKNCKIHHSVVGLRSCISEGAIIEDSLLMGADYYETDAERKLLAAKGSVPIGIGKNCLYKRAIIDKNARIGDNVKIINKDNVQEAARETDGYFIKSGIVTVIKDALIPSGIVI

SEQ ID NO: 36949 - protein, 206 aa, Buchnera aphidicola str. APS (Acyrthosiphon pisum)
MNNNFQNNIFWQKHSITRLKREKKNGHKSIVLWFTGLSGSGKSTIANFLEEILFKNGINSYLLDGDNIRSGLCSDLSFSLADRNENIRRIGEVVKMMLHAGLIILVSVISPYRNQREMVRQMLGKKNFLEVFIDTPIEICESRDPKKLYKQARTGQISDFTGIQCTYETPNTPDVLLKGTDSLKNNSKKLIKILYNHNIISFINID

SEQ ID NO: 36950 - protein, 185 aa, Debaryomyces hansenii CBS767
MTTSVSSALKTTPTSSLITLAAGCFWGVEKVFRRYFGNQGIIDIKVGYANGVPTVGNVNYEKVCSGSTDFVESIQISYEPSQVTLEKLLDTFFRMHDPTTVNAQGPDVGTQYRSAIMTHDEKAQKIAWDVKEKMQTEWYPNHKIVTIIEPIKIWYDAEEYHQEYLKKNPGGYECPSHFLRTKPKV

SEQ ID NO: 36951 - protein, 428 aa, Arabidopsis thaliana
MMTSRSIVPQQSTDDVVVVDGKNVAKGRNRQVLGDIGNVVRGNYPKNNEPEKINHRPRTRSQNPTLLVEDNLKKPVVKRNAVPKPKKVAGKPKVVDVIEISSDSDEELGLVAAREKKATKKKATTYTSVLTARSKAACGLEKKQKEKIVDIDSADVENDLAAVEYVEDIYSFYKSVESEWRPRDYMASQPDINEKMRLILVEWLIDVHVRFELNPETFYLTVNILDRFLSVKPVPRKELQLVGLSALLMSAKYEEIWPPQVEDLVDIADHAYSHKQILVMEKTILSTLEWYLTVPTHYVFLARFIKASIADEKMENMVHYLAELGVMHYDTMIMFSPSMVAASAIYAARSSLRQVPIWTSTLKHHTGYSETQLMDCAKLLAYQQWKQQEEGSESSTKGALRKKYSKDERFAVALIPPAKALLTGTESA

SEQ ID NO: 36952 - protein, 574 aa, Lactobacillus gasseri
MQLAALKHRTESEDCTVIDHSHVKIRLHTAKDDVKKVFVHYIDNYLPPVDAATLEMKKAGSGQVNDYWTATLTAPYHRIKYTFEVIGNDGSHIIFGDRSIEKFSDEKLREDGLYFKVPYFHDIDRIKTPAWLKDVVWYQIFPERFANGDKSNDPVNVKPWNPEDHPGREDFYGGDLQGVLDHLDDLQRLGITGLYFCPIFKASSNHKYDTIDYLQVDPAFGDKDLFAKVVNEAHKRGMKVMLDAVFNHLGDQSMQWQDVVKNGAKSRFKDWFHINSYPVEPYRDPSKGEKNPPYETFAFEKHMPKLNTANPEVQDFLLEIATYWVKYFDIDAWRLDVANEVDHHFWKRFHDELIKIKPDFYIVGEIWHSARPWLQGDQFTGVMNYPYTLQIEDHFFKHKLDGKELSEHLTDQLMMYPDIVNQAMMNMLDSHDTARILTLANGNQDLALQAIAYEFVQPGIPCIYYGTEMGMSGDNDPDCRKPMDWGKLNGPVWKRVYELVKFRLDHQDTLNQGDVKLTVTENDLLKVERTGKETINAYYNTSDHDIKIDKKPSLSQNYEDGILAPDGFLVEVKA

SEQ ID NO: 36953 - protein, 324 aa, Rhodobacter sphaeroides 2.4.1
MLVNGKWTADWQPVQKADDHGRFVRQVSSFRNWITPDGSAGPTGTGGFAAEAGRYRLYVALICPWASRTLMARRLKGLDGLIPVTVVNPVMGTQGWEFGGHDDAEEDPLFGARHLHEIYTRAEPQFTGRATVPVLWDMKRDAMVNNESADILRMFDTAFEGLAPSDLRLYPAALAGEIDALNAQVYDRLNNGVYKAGFASTQEAYDEAVAGVFEMLDHLEYRLTGDYIFGGALTETDIRIFVTLIRFDAAYHGLFKTNRRQIADYPRLWAYMRRILARPGVRETVNMDHITRGYYSIKALNPSRIRPVGPAHIEAALRETAAGI

SEQ ID NO: 36954 - protein, 552 aa, Lactobacillus gasseri
MRHWYDRAIIYQIYPKSFQDSNGDGIGDLNGIRKRIPYLKELGVNAVWLNPVFVSPQVDNGYDVSNYFAIDPKMGTMEDMDDLIKEMHEAGIHVIMDFVLNHTSDQHPWFQDAIKNPDSIYRDYYIFAGKNNQRPNNWGSFFGGSVWEKDPAGTGQFYFHLFDKRMPDLNWKNPEVRHAMSEIAKYWLEKGIDGLRLDAFIHIAKADLRQNFPVNSENEEPVIAEPFFANLPQVQKWMRPFCEEIKQDYPDALLLGEAASANVNLAVDYTNKDNHLMDSVITFRYFTEDQSQIDPSFSAQYQPKSLDLVKFKQNQAVWQQTLSGVSKPTLYWNNHDMARIATRIAKNDIQARSLAMLMYLQNGLPIIYYGEELGMKNLEFEDATQFEDETVKEFIESAKKAGKTSQEALLMASKTHKLPARGPMPWNNEKNNGFSDGNPWLKGKKVDYANAADEIADNHSMFNFYKKLIALKKEALFEDGGYYLLPTSNDSYVYERNLEDQKALVAVSLSKDPIELDVDPEFKQEKLVAGNYQLKDGKLKLAPYAGVVLEKD

SEQ ID NO: 36955 - protein, 370 aa, Methanococcus maripaludis S2
MFRKNLKKELDLIKNQNLYRKLKLEDNICLNFSTNDYLGLSKNNEVIKAYNDGLNYGAGATGSRLTSGNINHENLEETISEFKGTEKSLVYSSGYGTNLGVISALCKKGDLVLSDELNHASIVDGIRLSRADKKIYSHNNMHELIEILENSRNYENKFIVSDAVFSMDGDIAPVDELKKIADKYNAVLILDDAHGTGVLGKGRGTLHHFKIKPADNIIQIGTLSKAVGTVGGFVSGIEELIEYLINTSRSFIYSTALPPAVISASIKSFELIKSGELTDKLSKNINTANKIFKSSGFIEEEKITPIYPFIFGEDSIKISEELLKYKIFCVGIRYPTVKRGSERIRLSITAENKKEDFEYLCECISKIKNG

SEQ ID NO: 36956 - protein, 232 aa, Oryza sativa (japonica cultivar-group)
MELSEHEEDAGDVGGGCSSPPTPPHRVLTSAAPETIRCRYHECLRNHAAASGGHVVDGCGEFMPASTEEPLACAACGCHRSFHRRDPSPGRAGAARLPQLHLPASINSRAPPALLLPPAAAASKQGLPFPGYGTPSGGTGTTTASSSDERLRPSPVQPRRRSRTTFTREQKEQMLAFAERVGWRIQRQEEATVEHFCAQVGVRRQALKVWMHNNKHSFKQKQQQENRQEQQQ

SEQ ID NO: 36957 - protein, 222 aa, Brassica napus
  misc_feature (127)..(127): Xaa can be any naturally occurring amino acid
  misc_feature (157)..(157): Xaa can be any naturally occurring amino acid
  misc_feature (173)..(173): Xaa can be any naturally occurring amino acid
  misc_feature (177)..(177): Xaa can be any naturally occurring amino acid
  misc_feature (198)..(198): Xaa can be any naturally occurring amino acid
  misc_feature (209)..(209): Xaa can be any naturally occurring amino acid
  unsure (1)..(222): unsure at all Xaa locations
MAKEPVRVLVTGAAGQIGYALVPMIARGIMLGADQPVILHMLDIPFAAEALNGVKMELIDAAFPLLKGVVATTDAVEGCTGVNVAVMVGGFPRKEGMERKDVMSKNVSIYKSQAAALEKHAAPNCKXVLVVANPANTNALILKEFAPSIPEKNITCXLTRLDHNRALGQISEXRVRXPVSDVKNVIIWGNHSSTQYPXDVNHAKVQTSXSGKKPVRELAKKK

SEQ ID NO: 36958 - protein, 458 aa, Oryza sativa (japonica cultivar-group)
MAAVEAEKVVAELRERCATPASLLRDVAAAMAGEMGAGLEKEGGSRVKMLLSYVDKLPTGREDGLFYGLDLGGTNFRVLKVHLGGSKKHVVNSESREVSIPPHLMSGTSSELFGFIAGELGKFVAEEEEGTDMPNGKKKELGFTFSFPVRQRSVASGTLVKWTKAFSIDDAVGEDVVAELQTAMVKQGLDMHVAALINDAVGTLAGARYYDEDVVAGVIFGTGTNAAYVEKANAIPKWEGELPNSGDMVINMEWGNFYSSHLPVTEYDEALDKESLNPGEQIYEKLTSGMYLGEIVRRVLLKLSLQSGIFGSIDNSKLKTCFHLRTPHISAMHHDETPDLKIVAEKLHQILEITHTSLEIRKMVVEICDIVARRAARLAAAGVAGILMKLGRNGGINNQRSVIAIDGGLFEHYTKFRECLESTLGELLGEEASKSVAVKHANDGSGIGAALIAASQSR

SEQ ID NO: 36959 - protein, 447 aa, Arabidopsis thaliana
MEKRVEKRRIVLVPLPLLGHFTPMMQLGQALILKGFSIIVPQGEFNRVNSSQKFPGFQFITIPDSELEANGPVGSLTQLNKIMEASFKDCIRQLLKQQGNDIACIIYDEFMYFCGAVAEELKLPNFIFSTQTATHKVCCNVLSKLNAKMYLIDMEEHDVQNKVVENMHPLRYKDLPTATFGELEPFLELCRDVVNKRTASAVIINTVTCLESSSLTRLQQELQIPVYPLGPLHITDSSTGFTVLQEDRSCVEWLNKQKPRSVIYISLGSMVLMETKEMLEMAWGMLNSNQPFLWVIRPGSVSGSEGIESLPEEVSKMVLEKGYIVKWAPQIEVLGHPSVGGFWSHCGWNSTLESIVEGVPMICRPYQGEQMLNAIYLESVWRIGIQVGGELERGAVERAVKRLIVDKEGASMRERTLVLKEKLKASIRGGGSSCNALDELVKHLKTE

SEQ ID NO: 36960 - protein, 213 aa, Hordeum vulgare subsp. vulgare
EPMLYTEDSCIIREGDPVNEMLFVMRGYLESMTTNGGQSGFFNSNVLKGGDFCGEELLTWALDPAAVSNLPSSTRTVKTLSEVEAFVLRADDLKFVATQFRKLHSKQLQHTFRFYSQQWRTWAACFIQAAWHRYCRKKLEDSLFEKEKRLQAAIVSDDSTKLSLGAALYASRFAGNMMRILRRNATRKARLQERVPARLLQKPAEPNFFAVGE

SEQ ID NO: 36961 - protein, 563 aa, Yarrowia lipolytica CLIB122
MESLVRQSKKLCPYIGRTSASSLKQLGNGRLTQKAGQCPIMGKAMGVRGFKSDAGSNAESATVDVHAAVDTSKGTCPHAAQYSPVYPSSRLDNYPFGMTQRGLGKVPTQDAHNATTFNYESFYENKINAKHQDKSYRYFNNINRLAAEFPRAHRGSIEEDKVTVWCANDYLGMGRNPVVVDAMHETLDKYGAGAGGTRNIAGHNRHAVELEAAIADLHKKEAALVFSSCYVANDSTLSLLGQALPNCVYFSDASNHASMIHGIRHGGSEKVVWKHNDLADLEAKLARYPKSTPKVIAFESVYSMCGSIGPIEEICDLADKYGAITFLDEVHAVGMYGPTGAGVAEHLDFEHYHSGAQTQRQPIMDRVDIFTGTLGKAYGCVGGYIAGSAKFVDMVRSYAPGFIFTTTLPPATMAGARAAINYQKATMKDRVAQQTHTRYVKDKLANRGIPVVPNPSHIVPVLVGDAQKAKAASDLLLTKHQIYVQAINFPTVPIGQERLRVTPTPGHHEGLCDELVAALEDVWQELDLKRVEDWTAEGGLCGVGEGVEVEPLWSEEQLSYGRD

SEQ ID NO: 36962 - protein, 629 aa, Yarrowia lipolytica CLIB122
MAFAVEDKYKSLCQKLFFSRVPVKHYPRKHCNTNAKERGWTTTTVIVGWIFIYLYASGKTIAQHLFPSLAPFATSHFSGLALLSSQAVVESAIFVVARPACAKISDHLGRLEAWIVVVVAHIIGAVLYAASPNIGCYFAGTVFWEIGMVGGHLMMELYAADTSTTETRVLASYFIQSPSVWAPWISAPVVAGFLKVTTWRWGYGSMAIIIPGTSIGIIITLLYMRLKYENRLGGQGDFYSPGGPMRFIKSFDIIGLLAVGGAMILFFLPITFAAGTDKWKYHSYIAMLTIGSFLMVFTPIWEVYGTKTPLIPWKLFKSRIMVISSAQMFLLSMANKIYIPYFITWLLVVKGQSPKAATNVSSTLIVTANAWGLFAVAPYMWWRGHCKRVIVIGTCLHLVGIGMTYHYRTPHGSLAVMIIAQVFEGVGRGMIYIPAVAMAQAVFDKHKVASVTALYYTTGGVGQVIGDSISGAIYRTLYPKYIHKYAPDIPAKDLNMIINKIKKATKYPMGSKVRTEINMAFNEAMRHMLLGPFGCVAGMIVLSLFYPMVNLKEASDDVYDAPDNSDGEDIFTPHPAPGTEGDLEKQHSGDEKFESNSENGEHTNSEEGNLPRVSAEAAAASYINNTQVL

SEQ ID NO: 36963 - protein, 316 aa, Vibrio cholerae O1 biovar eltor str. N16961
MSNKLAQLRKLTTVVADTGEIDAIKKYQPEDATTNPSLILKAAQIAEYAPLIDQAIAYAKTQSNDKAQQVQDTCDMLAVNIGKEILKTIPGRISTEVDARLSYDTERSVAKARQLVKMYNDAGISNDRILIKLASTWEGIRAAEILEKEGINCNLTLLFSFAQARACAEAGVFLISPFVGRIMDWYKAKEGRDFAASEDPGVLSVTKIYNYYKEHGYKTVVMGASFRNIGEILELAGCDRLTIAPSLLAELEAAEGELVAKLVDSKGSKARPAPMTHSEFLWEHNLDAMAVEKLAEGIRNFAVDQGKLEAMIAAKL

SEQ ID NO: 36964 - protein, 170 aa, Brassica napus
  misc_feature (124)..(124): Xaa can be any naturally occurring amino acid
  misc_feature (143)..(143): Xaa can be any naturally occurring amino acid
  unsure (1)..(170): unsure at all Xaa locations
MSSCLLPQFKCPPDSFSIQFRTSHSVSKHNKGSVFFQPQCAVSTSPPLLTSVLDVAKIRLPSFDTDSNPRVSDRQWTYTGTIGPSTEAKYLEAETLLTSDESVVAAAAAEAVALARAAVKVAKXATLFRNSYNTKVLVSSTAXGEKQSKWDQFTEKERAGILGHLAVSDT

SEQ ID NO: 36965 - protein, 680 aa, Vibrio cholerae O1 biovar eltor str. N16961
MLNALRSTSFIEMSNTMNRKQLANAIRALSMDGVQKANSGHPGAPMGMADIAEVLWRSHLNHNPQNPNWADRDRFVLSNGHGSMLIYSLLHLSGYELSIDDLKNFRQLHSKTPGHPEYGYAPGIETTTGPLGQGITNAVGMAIAEKALAAQFNKPGHDIVDHFTYVFMGDGCLMEGISHEACSLAGTLGLGKLIAFWDDNGISIDGHVEGWFSDDTPKRFEAYGWHVIPAVDGHDADAINAAIEAAKAETSRPTLICTKTIIGFGSPNKAGSHDCHGAPLGNDEIKAAREFLGWEYAPFEIPTDIYAAWDAKQAGASKEAAWDEKFAAYAKAYPAEAAEYKRRVAGELPANWEAATSEIIANLQANPANIASRKASQNALEAFGKLLPEFMGGSADLAPSNLTMWSGSKSLTAEDASGNYIHYGVREFGMTAIINGIALHGGFVPYGATFLMFMEYARNAMRMAALMKVQNIQVYTHDSIGLGEDGPTHQPVEQIASLRMTPNMSTWRPCDQVESAVAWKLAIERKDAPSALIFSRQNLAQQPRSAEQVANIAKGGYILKDCAGQPELILIATGSEVELAVAAYEQLSAEGKAVRVVSMPSTDAFDKQDAAYREAVLPAAVTKRIAIEAGIADFWYKYVGFGGRIIGMTSFGESAPAGELFKLFGFTTENVVKQAKELLA

SEQ ID NO: 36966 - protein, 612 aa, ASPERGILLUS NIDULANS FGSC A4
MADRASSRPRAQSEAARLRDEERMQARPSPTRSVGGGRRPSGLATEGSGLRHRNTGLSRRSRTNRVSSLSSRTTLANRTGGNFTFAGPEETSQLRAAHEPFVHPGYTDLNPEYEQPPNTKPVWSLAKPLPRVVRPGMVPTKEEILQGRTTERPPLPAENSQKQGLDVDPNELEAGRIEKADPKKMAAQVDDARIQRENNFVNKILTGDVGTTRISRTSSTAIRRPSGVQIEPRPSEQLSAVPEGEGHDSSQSPPDDTGHDLSDEPLQDVHIPEEPPSPEISPDQLDFDEAAYPEDLHPLVQDLVEEEVHNNHTVWSVIRTHHREALAESLAVFIQLTVGLAADLSVTLGGTTNPNTTAWAWGFAAMMAIYISGGVSGAHLNPTITCMLWFYRGFPKRKMPEYFAAQFIGAFVAALAVYGLYHDSINEYLSISTSSTSSTTNVLNSFVTSQRNPWINPQTAFFNEFLGTVVLTVTVLALGDDQNAPPGAGMNALVVGLMVYTLSITFSYQTGAALNPSRDFGPRLALLALGYGSDLFLNPYWFYGPWAGSFCGAFIGAFLYDFMIFTGGESPVNYPWERTERAMKRSREKWGRRLKKGFKRQKKGGLEKEVAV

SEQ ID NO: 36967 - protein, 356 aa, Micromonospora echinospora
MELTTTAARPGLRHRMQQLIYGFFTAQTLHVAVRLRIPDLLADGARDVGDLASATGADAPSLRRLLRALVFLEVLDEPAPGTFALTEQGEVLRADVTGSMRELVLLLSGPESWAAWGQLEHSVRTGEVAWEHVHGRSCFDHLMADPQRQAAFNAAMAEGSRAFVPTLLSAYDFGDLRTVVDVGGGSGALLAGVLAAHPHLRGTVFDTPDGVADAARTVAEQGVADRCGVETGDFFVSVPPGADAYVLKSVLHDWDDEQCVEVLRTVRRAVRPDSRVILVESLMPTTVTTAPSVAQVVMNDLNMMVCHGGRERTVAEFRELLRVAGFRLESVTPCPAPSVVGILEAAPAPATGPDGS

SEQ ID NO: 36968 - protein, 619 aa, Bradyrhizobium japonicum USDA 110
MGIEAEGKDAMPGPISQPQTLADVKTLPELLRWRVEATPAAEAYRHFDAHAGRWVSQSWHEIDAEFELWRQALAAENFSPGERVAILMPNGIAHIAMDQASLSRGLVPVPMHAVDNPDSIAYILADSGALLLFVDTLARWQAIVATGQPLDALKRIVCADMTGPVPADARIVALDQWLASAPGATAPLSDVAVAPDDLAAIVYTSGTTGRPKGVMLSHDNVVANVKAIAHRIAASPDDVFLSFLPLSHTFERTGGYYYPIAAGACVAYARSVPQLGDDLKHVRPTVLVSVPRIYERVYALIMQHRASAGSIERALLDLTIAVGGRRFDARQGRGALSLLDRLAWPLLKQLVADKVLAQLGGRLRVAVSGGAPIAEPVIRLFLALGLDILQGYGMTETSPVVSVNTPEDNDPRSVGHVLDGVEARLGENDELLVRGPSVMLGYWHKPEETRRVKEADGWLHTGDQARIENGRITITGRIKDILVTSTGEKIAPVDLETAILADPLFEQALVVGEQRPFLAALVVLNAKAWVQEKERLAASGKQGGAAERAALLARIAAAVKAYPSYATPRAVWWTLDPWTIASGLLTPTLKNKRPALEHRFAEEIAQIYAKKPAATVKAQ

SEQ ID NO: 36969 - protein, 599 aa, Streptomyces avermitilis MA-4680
MHPDRPTWTPSPAATEQPRQVRRILKLFRPYRGRLAIVGLLVGAASLVSVATPFLLREILDVAIPQGRTGLLSLLALGMIVSSVVTSIFGVLQTLISTTVGQRVMHDLRTAVYGRLQRMSLAFFTRTRTGEVQSRIANDIGGMQATVTSTATSLVSNLTSVVATIVAMAALDWRLTAVSLLLLPLFVWISRRVGNERKKIATQRQKQMATMAATVTESLSVSGILLGRTMGRADSLTQSFADESESLVDLEVKSNMAGRWRMAVISIVMAAMPAVIYWTAGIALQLGGPSVSIGTLVAFVSLQQGLFRPTVSLLSTGVQIQTSLALFQRIFEYLDLPIDITEPDQPVHLDQVKGEIRFEGVEFHYDDKSGPILQGIDIRVPAGGSLAVVGPTGSGKSTLSHLVPRLYDVTGGRVTLDGVDVRDLDFDTLARAVGVVSQETYLFHASVAENLRFAKPDATDEELYAAARAAQIHDHIASLSDGYDTVVGERGHRFSGGEKQRLAIARTILRDPPVLILDEATSALDTRTERAVQEAIDALSANRTTLTIAHRLSTIRGADQIVVLDAGRAVERGTHEELLERDGRYAALVRRDAQLEPTR

SEQ ID NO: 36970 - protein, 244 aa, Oryza sativa (japonica cultivar-group)
MAAAGWPLSSSVADLLPASLSLTLLLASLVHPLPPSAPFLLRLLALLIPSPRPSRAQVVVVVLAAAAFFFEHIRKIGCTHSLERTEVSAAFFEDPNSLNKVRCPSIYDPAEKYISLIIPAYNEEHRLPEALTETLNYLKQRSAVEKSFTYEVLIVDDGSTDHTSKVAFEFVRKHKIDNVRVLLLGRNHGKGEAVRKGMLHSRGELLLMLDADGATKVTDLEKLEAQVCHKLNQNMFYKVLLCIL

SEQ ID NO: 36971 - protein, 205 aa, Schizosaccharomyces pombe
MAGKKKHLLKVIILGESGVGKTSIMNQYVNRKFSKDYKATIGADFLTKEVLVDDKVVTLQLWDTAGQERFQSLGVAFYRGADCCVLVYDVNNSKSFETLDSWRDEFLIQASPSNPETFPFILLGNKVDVEEQKRMVSKSKALAFCQARGEIPYFETSAKEAINVQEAFETVAKLALENMDSDDIAADFTDPIHLDMESQKTSCYC

SEQ ID NO: 36972 - protein, 702 aa, Kluyveromyces lactis NRRL Y-1140
MTRDIVNHLVFEVATEVANKVGGIYSVLKSKAPITCKQYGPKYLLLGPLNPQSVQVEVEPVDWEDESNFHIKEVQWSLRSMHNRGVRFTYGRWLIDGAPMVILFDLNSVRNYLNEWKADLWEIAGIPSPDGDFETNDAILLGYTVAWFLGELAHMNQTNAIVAHFHEWLAGVAIPLCRKRRIDVVTIFTTHATLLGRYLCAGNVDFYNNLDKFDVDAEAGKRGIYHRYCIERAAAHSADVFTTVSQITAYESEYLLKRKPDGILPNGLNVIKFQAVHEFQNLHALKKEKINDFIRGHFHGQFDFDLEKTLYFFIAGRYEYRNKGADMFIESLARLNHRLKASGSKMTVVAFIIMPAKNKSYTVDELRGQAVVRQLENSVKDVTQLIGKRIFEHAMRYPHNGTKTEIPTSLDELFKPSDKVVLKKRVFALRRPEGTLPPIVTHNMVDDANDPILNQIRRVQLFNNSYDRVKIIFHPEFLNANNPILSLDYDEFVRGCHLGVFPSYYEPWGYTPAECTVMGIPSITTNLSGFGAYMEDLIEKDQAKDYGIYIVDRRFKNPNESVEQLVDYMEDFVNKTRRQRINQRNRTERLSDLLDWRRMGLEYVKARQLALRRAYPDEFKELTGGTDLDDSNMDSLAGNPKVKVARPLSVPGSPRDSRASSVGAVMMTPGDLGTLQDANNADDYFHLSMGDNEDDEDEDQFN

SEQ ID NO: 36973 - protein, 112 aa, Glycine max
MPSTQPLTVAARSLRSRILSRSGSTSAGASRWATPGHEERPKGFFMNRTPPPPGQSRKWEDWELPCYVTSFLTIVILGVGLNAKPDLSIETWAHQKALERLEAERLAGDSSD

SEQ ID NO: 36974 - protein, 103 aa, Zea mays
  misc_feature (16)..(16): Xaa can be any naturally occurring amino acid
  unsure (1)..(103): unsure at all Xaa locations
PNYIYQKIFNTSKSIXSTNSLDYTTNFSHMLYFHDPQILYLIRLYITIHTNHHITNVSAHTVHLVGTSLSNPYLSFASTLNGLTVPLHVLSNHELLLFIKSVI

SEQ ID NO: 36975 - protein, 477 aa, Acinetobacter sp. ADP1
MSQQFDLVVIGGGPGGYEAAIRAAQLGFKVACIEKRVHKGKPSLGGTCLNVGCIPSKALLDSSHHYEDTIHHLGDHGITTGEVNIDIAKMLARKDKVVENLTGGVAQLLKGNGIEWLQGTGKLLAGKKVEFVPFEGETQVLEPKYVILASGSVPVNIPVAPVDQDLIVDSTGALEFAEVPKRLGVIGAGVIGLELGSVWRRLGSEVVVFEALDAFLPMADKALSKEFQKILTKQGLDIRIGAKVSGTEVNGREVTVKYNQAGEDKEQVFDKLIVCVGRKPYAEGLLAEDAGIKLTDRGFIEVNDHCATSLEGVYAIGDLVRGPMLAHKAMEEGVMAVERIHGHAAQVNYDTIISVIYTHPEAAWVGLTEEQAVANGHEVKTGQFPFAVNGRALAAGEAAGFVKFVADAKTDRLLGMHVIGPGASDIVHQGMIALEFVSSVEDLQLMTFGHPTYSEVVHEAALAVDGRAIHAIQRKRK

SEQ ID NO: 36976 - protein, 388 aa, Picea mariana
MGRAPCCAKVGLNKGAWSAEEDSLLGKYIQTHGEGNWRSLPKKAGLRRCGKSCRLRWLNYLRPCIKRGNITADEEELIIRMHALLGNRWSIIAGRVPGRTDNEIKNYWNTNLSKKLAVRGIDPKTHKKVTTDSINRASDRFNQRKGGKLYDCSQRSQRLERNVARAGQSTGLVIPNVHNLKADLKGQYIAGPRAIQSSNSIRSSSPINTLIQPKSNELTDDPDFMQPQPVVSSEAGKQTDDSTVYCSSDSAASCALIDHLSSADDDQYLSLEGNSNECYSHTVAEESGTLKSSNPQTHSEAICDSRERDNGGPVQKHDQFPEYDVLSFFDVRNAENEICCNDDQWVHEQEMPQLHSWDNQIDDQGKEHFGSHVNNDVTAMSWEASFWF

SEQ ID NO: 36977 - protein, 262 aa, uncultured soil bacterium
MGTLTGKTAVVTGSTSGIGLAIARAFAGAGANIVINGFGAPADIERERSGIETDFKVKAVHSAADMSKPAEIAEMIALGEKTFGSVDILVNNAGIQFVSPIEEFPIEKWDAIIAINLSSAFHAIRAAVPGMKKRGWGRIINTASAHSLVASPFKSAYVSAKHGIAGLTKTVALELATHKITCNCISPGYVWTPLVEKQIPDTMKARNLTKEQVIHDVLLEAQPTKEFVTSEQVAALALFLCGADAAQITGTNLSIDGGWTAA

SEQ ID NO: 36978 - protein, 309 aa, Zea mays
MALRPQLLRLLLPSPPHRNPPPPPSSPSVAPIGRRTAAAAVLLLAAGVSAPPPRAARAEPDGEDVDEARIVRLFQEASPSVVFIKDLVVAGPQGRRVGEDEDGDEEGGGAKVEGTGSGFVWDSTGHIVTNYHVVAKLAGDGSASHRCKVFLEGSGGKSYSKEARLIGCDPAYDLAVLKIDADRDQLRPALIGTSRSLRVGQSCFAIGNPYGYEHTLTTGVISGLGREIPSPNGRAIRGAIQTDTAINAGNSGGPLIDSYGHVIGVNTATFTRKGSGISSGVNFAIPIDTVVQSVPNLIVYGTSVSNRFY

SEQ ID NO: 36979 - protein, 106 aa, Triticum aestivum
MAELVGPRVYSCCHCRNHVCLHDDIISKAFQGRNGRAFLFSHAMNVTTGAKEDRQLMTGLHTVADIHCRDCREVLGWKYERAYEESQKYKEGKFIFEKAKIVQENW

SEQ ID NO: 36980 - protein, 632 aa, Acinetobacter sp. ADP1
MGAINPKEDYSNIQNLTFDAVIVGGGGSGMRASYQLAQAGLKVAVLTKVFPTRSHTVAAQGGIGASLGNMQEDNWHFHFYDTVKGSDWLGDQDAIEFMTREAPKVVYELEHLGMPFDRNADGTIYQRPFGGHSANYGDKPVPRACAAADRTGHALLHTLYQSNVKMGTQFFVEWIALDLIRNEAGDVLGVTAYDQETGNIAVFQAKATLFATGGAGRVYRASTNAYINTGDGLGMAARAGIPLQDMEFWQFHPTGVAGAGVLLTEGCRGEGAILRNKDGEPFMERYAPTLKDLAPRDFVSRSMDQEIKEGRGCGPKADYILLDMTHLGADTIMKRLPSVFEIGKKFANVDITKEPIPVVPTIHYQMGGIPTNIHGQVVVPVATENLHLEAHYNNATKEYTFETNCPDFVKPVKGFYAIGECSCVSVHGANRLGTNSLLDLVVFGKAAGEHIIDYVTKHHGDEYAPLPTDVLESTLKRIRHLDESTSGENAQEVADAIRDIVQDHAAVFRTQELLDEGVRQILALEPRVRNIYLKDKSKVFNTARVEALEVENLYEVAKATLISAAARKECRGAHTVVDYELAPDHPDYPYGRRDDEWMKHTLWYSADNRLEYKPVRYVPLTVDAIPPAPRTF

SEQ ID NO: 36981 - protein, 914 aa, Chlorobium tepidum TLS
MITSTTSVVDFDKALLDFRYLLDCFIEVLENLGQEALARHIGGDSKTPIREFDCAERAIQAWSIVFQLLNMAEENSAAQYRRRIESSEGVESLSGLWGEALRHLKNLGVTEAEIAAELPQIEVEPTLTAHPTEAKRRTVLEQHRELYLLLVKRENRMWTPAERDKIRTDIKVVLERLWRTGEILLQKPEVSAERQNVLHYLHTIFPDILPILDNRLEKAWAVAGFDPAITADPRNLPRLSFGSWVGGDRDGHPLVTAETTQETLQEMRRHAIELVHRQLERLASMLSLSGRLQSPSRAMEERMETLRHKLGKAGALAFERNLHEPWRQFVNLMIAALPAGTTENEHYCYRRHTELLKDLELLMSSLTAINASTIARGDVAPVYRIVQTFGFHLGRLDIRQNSRFHDLALSQLMMAAGLDGKGFPEWSEEARLEFLERELLSPRPFTHPDMHAGPEAETVIACYRVLFDHYRQFGPDGIGSLIVSMTRNLSDLLVIYLFAREVGLMVRHGDGDACPIPVVPLFETIDDLERSHDILDRFLAHPVTRRSIALQQELHGRQKPVQQVMVGYSDSNKDGGIVTSLWSLYRSEERLIETGRKHGVDILFFHGRGGSISRGAGPTHRFIRAQPHGSLDAGLRVTEQGETISQKYANRISAAYNLELFLAGVTEARLVHRKEGYRPHPLEKVMDTLARSSNKAYRQLIEADGLLEFFRQATPIDIIESSRIGSRPARRTGSQSLEDLRAIPWVFSWNQARFGISGWYGAGSALEELRATDPETFEVMRKSDFSWAPFHYIINNIATSILSVDPWIMEQYASLVENKNIRENLLGMIQAEYLRTMRLLDLLYGGPLREKHFNVARFIETRQEGLSKLHRLQIDLLKSWRSAKASGNEQQADALLPELFLTVNAISSGLRTTG

SEQ ID NO: 36982 - protein, 274 aa, Arabidopsis thaliana
MGRSPCCEKDHTNKGAWTKEEDDKLISYIKAHGEGCWRSLPRSAGLQRCGKSCRLRWINYLRPDLKRGNFTLEEDDLIIKLHSLLGNKWSLIATRLPGRTDNEIKNYWNTHVKRKLLRKGIDPATHRPINETKTSQDSSDSSKTEDPLVKILSFGPQLEKIANFGDERIQKRVEYSVVEERCLDLNLELRISPPWQDKLHDERNLRFGRVKYRCSACRFGFGNGKECSCNNVKCQTEDSSSSSYSSTDISSSIGYDFLGLNNTRVLDFSTLEMK

SEQ ID NO: 36983 - protein, 165 aa, Glycine max
VPRWFLSIPSIYYKTLIISIPSCIEIALAASASWVFSPLNHFDLCFKLINMLGLNFKQVPQTYDEGQHEGRQAVSKEDIQIRKGCLKIKVGQGEEQQKVTVPVNYLKHPLFVQLLKEAEEEYGFSQKGTITIPCQVAEFKNVQHLIHTERSLHHHHHLVATCFKA

SEQ ID NO: 36984 - protein, 493 aa, Arabidopsis thaliana
MTRKEVVLAVTAATITAVAAGVLMGRWIRRKERRLKHTQRILRKFARECATPVSKLWAVADALVADMTASLTAECCGSLNMLVSFTGSLPSGDEKGVHYGVNLRGKELLLLRGTLGGNEEPISDVQKHEIPIPDDVLNGSFKELCDFISLELVKFLAMNPGGEAEEVKNLGFTLTRSVEQIGSHSISSIHRKSLANDDDEKVLKDLVNDMNESLETHGLKIRMNTALVDNTIGELAGGRYYHKDTVAAVSLGMGTNAAYIEQAQEISRWKSAIREPQEIVVSTEWGDFRSCHLPITEFDASLDAESLNPGHRIFEKMVSGRYLGEIVRRVLLKMSEESALFGDTLPPKLTIPYILWSPDMAAMHQDISEERETVNKKLKEVFGIMDSTLAAREVVVEVCDVVAERAARLAGAGIVGMIKKLGRLEKKMSIVIVEGGLYDHYRVFRNYLHSSVWEMLGDELSDHVVIEHSHGGSAAGALFLAACGDGHQDSESK

SEQ ID NO: 36985 - protein, 320 aa, Neurospora crassa
MATKTFKLNTGANIPALGLANPSPPPPSIGTWQGESTQVKDAVVAALKSGYRLIDTAYCYGNEEHVGAGLKEAFDQGIVKREDVFVVTKLWATYTSRAEEGLEKSLRNLGLEYVDLFLVHWPLLMNPEGNDDRFPKLPNGERDILRDYSHVQIWKNMEKLVGSGRTKAIGVSNYSKRYLEELLPHAKIVPAVNQIENHPQLPQQEIVDFCKEKGIHIMAYSPFGSTGSPVTSAEPVIKIAEKHGVKPTTVLLSYHLYRGSTVLPKSTNPERIEANAKLIELDAEDQKLLNDYSEGLVKEGKVQRYVYPPFGVDFGFPDKS

SEQ ID NO: 36986 - protein, 659 aa, Symbiobacterium thermophilum IAM 14863
MVSAEQLDTLPKRLQAMAARYGRSRVALREKEYGIWQEYTWQDYLDHVRDFCLGLVSLGFRRGDKIAIVGDNRPEWVIAELAAQSAGGTSVGIYQDSLAREMAYVIDHSDAVVVVVEDQEQVDKILEVRDLIPKVRYLVYYDPKGLRTYTDPWLLYFPQVMEMGREYGRRHPGLFEEMVAAGDGEDTAIICYTSGTTGHPKGAMLSHRNLLAMGDTIQTVDPLTPDDDFLSFLPLAWIGEQMTALAMHLSVGFTVNFPEEPDTVQENLREIGPHVMFSPPRIWEDMVTRVQVRIQDAGWLKRRLWEFFLPVGLRVADARFAHRPVPLKDRLLYALGEFLVYSAVKDHLGLSRLKRAYTGGAALGPDVFRFYHALGVNLKQIYGQTEIVGIAVLHRDDDIRFHTVGTPLPGGEMAISPEGEILLRSRAVFQGYYKMPEESARALAGGWLHTGDAGYIEEESGHLVVIDRLKDVMRLSTGEIFSPNFIENKLKFSPYIKEAVAVGDRRTHVVAMVNIDLQSVGHWAEGQGIPYTTYQDLSQKGPVLDLIAGEIARVNAELPEAARIRSFVILHKELDADDEELTRTRKLRRGFVYQKYAPVIEGLYAGADEIPVQSKVRYRDGREAVIETVLQVRRLLPVPGAAPEVEQPEPRAAGGGGVG

SEQ ID NO: 36987 - protein, 66 aa, Glycine soja
ETRHPVYRGVRRRDSGKWVCEVREPNKKSRIWLGTFPTAEMAARAHDVAAIALRGRSACLNFADSA

SEQ ID NO: 36988 - protein, 250 aa, Bordetella parapertussis 12822
MYKLVLIRHGESQWNLENRFTGWTDVDLTETGREQARKAGELLKREGYAFDLAYTSVLKRAIRTLWIALDALDAMYTPVGINWRLNERHYGQLQGLNKAETAAKYGDEQVLIWRRAYAIAPEPLDLEDPRHPRFDGRYAKIPADQLPATECLKDTVARVLPFWNESIAPAIRAGRRVLVAAHGNSLRALIKHLDNVSDDDIVGVNIPTGQPLVYELDEDLKPIRHYYLGDAAEIEAAMAAVAAQGKAKKD

SEQ ID NO: 36989 - protein, 427 aa, Kluyveromyces lactis NRRL Y-1140
MFKKEPLSENNSRKPEEPEPVEGHKLTKLFNKVTGQPSSYVNKSDYIFGKTLGAGTFGVVRQARCISSGENVAVKILLKKALKGQSVQLQMLYDELSILQQLNHPNIVRFKDWFESKEKFYIVTQLATGGELFDRILEKGKFCEVDAVFIVKQILQGVQYLHQRNIVHRDLKPENILYLNKSDDSPLVIGDFGIAKELKDDNELIHKAAGSMGYVAPEVLTSSGHGKPCDIWSIGVITYTLLCGYSPFLAESADGFIEECTSGQYPVVFHKPYWNNVSKTAKEFILWALTVSPKRRPTATDLINDIWITSTEKSTTDLLPEIRKGFDARKEFRDAVEIVKLNNRIKKLKVLYENQDESDTDIEVNSTDSFSKNDYSADSLQSSLKSLSIKDSHTELKSSLTQNAFAQLVLTASKNKEKVKSFQDSGN

SEQ ID NO: 36990 - protein, 594 aa, Neisseria meningitidis MC58
MALVELKVPDIGGHENVDIIAVEVNVGDTIAVDDTLITLETDKATMDVPAEVAGVVKEVKVKVGDKISEGGLIVVVEAEGTAAAPKAEAAAAPAQEAPKAAAPAPQAAQFGGSADAEYDVVVLGGGPGGYSAAFAAADEGLKVAIVERYKTLGGVCLNVGCIPSKALLHNAAVIDEVRHLAANGIKYPEPELDIDMLRAYKDGVVSRLTGGLAGMAKSRKVDVIQGDGQFLDPHHLEVSLTAGDAYEQAAPTGEKKIVAFKNCIIAAGSRVTKLPFIPEDPRIIDSSGALALKEVPGKLLIIGGGIIGLEMGTVYSTLGSRLDVVEMMDGLMQGADRDLVKVWQKQNEYRFDNIMVNTKTVAVEPKEDGVYVTFEGANAPKEPQRYDAVLVAAGRAPNGKLISAEKAGVAVTDRGFIEVDKQMRTNVPHIYAIGDIVGQPMLAHKAVHEGHVAAENCAGHKAYFDARVIPGVAYTSPEVAWVGETELSAKASGRKITKANFPWAASGRAIANGCDNGFTKLIFDAETGRIIGGGIVGPNGGDMIGEVCLAIEMGCDAADIGKTIHPHPTLGESIGMAAEVALGTCTDLPPQKKK

SEQ ID NO: 36991 - protein, 225 aa, Glycine max
MLSISATRIFFLRSTTIRLSSSSSSLQFFSNPNRTLFRPFLHTSFKPLPSSFSFRTDHTMATSNAKSVHDFTVKDAKGNDINLGDYKGKVLIIVNVASQCGLTNSNYTELSQLYEKYKQKGLEILAFPCNQFGAQEPGSNEQIQEFVCTRFKAEFPVFDKVDVNGDKAAPLYKYLKSSKGGLLGDGIKWNFAKFLVDKEGNVVDRYAPTTSPLSIEKDLLKLLDA

SEQ ID NO: 36992 - protein, 238 aa, Cicer arietinum
FDKGARTALAFVTLRADGEREFMFYRNPSADMLLTPEDLNLELIRSAKVFHYGSISLIVEPCRSAHLKAMEVAKDAGCLLSYDPNLRLPLWPSPEEARNQILSIWDKADLIKVSDVELEFLTGSDKIDDASALSLWHPNLKLLLVTLGENGSRYYTKNFHGSVDAFHVNTVDTTGAGDSFVGALLGKIVDDQSILEDEARLREVLKFANACGAITTTKKGAIPALPTEADVLSLIKGE

SEQ ID NO: 36993 - protein, 538 aa, Kluyveromyces lactis NRRL Y-1140
MTARPELNTLHSAATEPTIIHSNNESLNALDYTGNDDKSVALSNAISRTNSTGNKIPKKRKPRRMFTTPGRFQQQLAIPTSYLERKPTTKAEAKGFYYFVSCMKQGKIMLFDQTLDRIDQCYDTMWTWPGFSHGVDFYQSHKDAKVLGTFLQVLRCCFDTRSIVFLPLFPVGIVFYKREEDIPAVICLLLALMYFAKLLSNTTEYASEHFGPVFGSLLNATFGNLVELIISGTTVSKDDAILTITSLIGSVISNNLLVIGSCFFFGGLDGVIMHSKAAIANHLFFLSSVTMALSLTSVIAVIDSGKSLRFKMDTSQIGAALIFLCYIIYLIVSTNQEFKALSSKKLKERSLKESDIETLPELDSDSDFEFSVGDKKDDEEKDLPPKLVCFITLAIATAGLGPTANFFVESLKELTDDKPISKVFIGLIILPLAGSLPEHISSLISAHHGQMDLAVSLAIGSSNQVLGMVLPIVQLISSRYPRTGFTLYFEPYVAGYLFSSTFVCCFTLIHGLLFSVNILHGTLLLATFGFIIYLTFAN

SEQ ID NO: 36994 - protein, 227 aa, Streptococcus thermophilus LMG 18311
MEDKNFAERLNILRAGVLGANDGIISIAGVVIGVASATSNIWFILISALSAIFAGAFSMAGGEYVSVSTQKDTEEAAVAKEQALLARSPESARESLYQTFLSQGDCETEAEVKVNQAFSKNPIKVLVEEKYGVDMEEITNPWHAAVSSFLSFSVGSLPPTLAILLFPDPYRIPITAVVVALTLILTGYVSAKLGKAPVKQAMLRNLAVGLLTMLVTYVVGQVFHVNV

SEQ ID NO: 36995 - protein, 1212 aa, Oryza sativa
MQFMMPLDTNACAQPMRRAGEGAGTERLMERLNIGGMTQEKALRKRCFGDGVTGTARCVFTSDADRDTPHLRTQSSRKNYADASHVSAVILGGGTGVQLFPLTSTRATPAVPVGGCYRLIDIPMSNCFNSGINKIFVMTQFNSASLNRHIHHTYLGGGINFTDGSVQVLAATQMPDEPAGWFQGTADAIRKFMWILEDHYNQNNIEHVVILCGDQLYRMNYMELVQKHVDDNADITISCAPIDGSRASDYGLVKFDDSGRVIQFLEKPEGADLESMKVDTSFLSYAIDDKQKYPYIASMGIYVLKKDVLLDILKSKYAHLQDFGSEILPRAVLEHNVKACVFTEYWEDIGTIKSFFDANLALTEQPPKFEFYDPKTPFFTSPRYLPPARLEKCKIKDAIISDGCSFSECTIEHSVIGISSRVSIGCELKDTMMMGADQYETEEETSKLLFEGKVPIGIGENTKIRNCIIDMNARIGRNVIIANTQVYVLGLFWNGNSIIGILKFAPLSQQTCPVICFACLMCLRFFNSHLLATYETEELMGEVNSCKEMKSVCNWFALARQLIILLSVLVSCPGCQDFLSSLKMSHSSDEDSEISDSEIDEYADKFYARLVAGEFKVKDGQSYSCPFCSGKKKKDFNINNLIQHASGVGAASNRQAKDKATHRALAKHLKNGLTKSSGQQSQTAVVEPQPLPNRDEKFVWPWMGVLVNVPTEWKDGRQIGRSGNHLKEQLSRFCPLKIIPLWNFRGHSGNAIVEFGKDWHGFRNALAFEDYFGKEGYGRRDWKEKQNQGSNLFGWVARAEDHTSPGLIGDHLRKNGDLKTINDLENEGARKTDKLVANLANQIEVKNRHLQELEVTYNERTTSLEKMMGQREQLLQKYNEEIRKMQQLAQRHSQKIIDENQKLRSELESKMSELNTRSKELDEIAAKSDYDRRIIDQEKQKNAIKSSHLKLATLEQERADENVLKLVREHKREKEAAVKKILKLEQQVDAKQKLELDIQQLKGKLEVMKHMPGDEDSALKNKIDELSEELQEKMDELDAMESLNQTLVIKERKSNTEMQDARKELENGLLDLLDGQSHIGIKRMGELDLEAFSKACRKMSSEEDAEITAAILCSKWQAEIKNPDWHPFRFVLVDGQEKEIIEDDAKLQELKEEHGEDIYRLVRDALCEINEYNPSGRFPVGELWNFKDKRKATLKETVQFVLRQWRANRRKR

SEQ ID NO: 36996 - protein, 381 aa, Streptococcus thermophilus LMG 18311
MTEVFYDHLAKTRHQIHQHPEVSEEEHETTVFLKAYLKNLGVEPLDYPLKTGLIAEIGSGHPIIALRADIDALPIKEKTGLPYASDNGAMHACGHDFHQTSLLGAAQLLKEREAELKGTVRLIFQPAEENFQGAYQVIEAGGIEGVSAIIGYHNNPHLKPGQIGLRSGAILAGVEQFRVDVKGVSSHAARPDLGVDTVLVTTTIINNLQQIVARTVSPFESAVLSVTHIEVGNTWNVLPAAGFFEGTIRTFEPKVREDVIARFEKVVQATADQFGAQVDITWGNSPYVTYNDQTLTPLIFENSKAFAEVIETLPSTGGEDFAAYQKEIPGVFAFVGTNGEEDAPGWHHDDFLVKDEALPVAVNYYVENALFLLDYFKEQDD

SEQ ID NO: 36997 - protein, 424 aa, Acinetobacter sp. ADP1
MSEATGKKAVLKLDGKEIELPIYSGTLGPDVIDVKDVLAAGHFTFDPGFMATASCESKITFIDGNEGVLLHRGYPIDQLATQADYLETCYLLLNGELPTPEQKQEFDAKVRNHTMVHDQVSRFFNGFRRDAHPMAIMVGVVGALSAFYHNQLNIEDVNHREITAIRLIAKIPTLAAWSYKYTVGQPFIYPRNDLGYAENFLHMMFATPADRDYKVNPILAKAMDRIFTLHADHEQNASTSTVRLAGSTGANPYACIAAGISALWGPAHGGANEAVLKMLDEIGTVENVAGFMEKVKTKEVKLMGFGHRVYKNFDPRAKVMKETCDEVLAALGINDPQLELAMELERIALSDEYFIKRNLYPNVDFYSGIILKAIGIPTEMFTVIFALARTVGWISHWLEMHSAPYKIGRPRQLYTGETKRDIKR

SEQ ID NO: 36998 - protein, 463 aa, Glycine max
MASSFLSAASHAVSPSCSLSTTHKGKPMLGGNTLRFHKGPNSFSSSRSRGRISMAVAVNVSRFEGIPMAPPDPILGVSEAFKADNSDVKLNLGVGAYRTEELQPYVLNVVKKAENLMLERGDNKEYLPIEGLAAFNKATAELLLGADNPAIKQQRVATVQGLSGTGSLRLGAALIERYFPGAKVLISAPTWGNHKNIFNDASVPWSEYRYYDPKTVGLDFEGMIEDIKSAPEGSFILLHGCAHNPTGIDPTPEQWEKIADLIEEKNHIPFFDVAYQGFASGSLDEDAASVRLFVARGIEVLVAQSYSKNLGLYAERIGAINVISSSPESAARETSQLKRIARPMYSNPPVHGARIVADVVGNPVLFNEWKAEMEMMAGRIKNVRQQLYDSITSKDKSGKDWSFILKQIGMFSFTGLNKNQSDNMTNKWHVYMTKDGRISLAGLSLAKCEYLADAIIDSYHNVS

SEQ ID NO: 36999 - protein, 496 aa, Porphyridium purpureum
VKLAAGMGVMSDLEKKFIELEAKLVAQPAGQAMPGKSNIFANNEAWRQEMLKQDPEFFNRLANGQSPEYLWIGCADSRVPANQLLDLPAGEVFVHRNIANQCIHSDISFLSVLQYAVQYLKVKHILVCGHYGCGGAKAALGDSRLGLIDNWLRHIRDVRRMNAKYLDKCKDGDEELNRLIELNVLEQVHNVCATSIVQDAWDAGQELTVQGVVYGVGDGKLRDLGVVVNSSDDISKFYRTKSDSGALKAGNPNAPLVQVTKGGESELDSTMEKLTAELVQQTPGKLKEGANRVFVNNENWRQKMLKQDPQFFSNLAHTQTPEILWIGCADSRVPANQIINLPAGEVFVHRNIANQCIHSDMSFLSVLQYAVQYLKVKRVVVCGHYACGGCAAALGDSRLGLIDNWLRHIRDVRRHNQAELSRITDPKDSLNRLIEINVLEQMHNVCATSIVQDAWDAGQELEVQGVVYGVGDGKLRDMGVVAKANDDIGQIFRTKQ

SEQ ID NO: 37000 - protein, 90 aa, Glycine soja
GINISGTNGEVMPGQWEYQVGPSVGIEAGDHIWASRYILERITEQAGVVLSLDPKPIEGDWNGAGCHTNYSTKSMREDGGFEVIKKAILN

SEQ ID NO: 37001 - protein, 196 aa, Medicago sativa
IPEDDPRNPATIADNVGDNVGDVAGMGADLFGSYVATVLAAMVLGNYVLRDILAANPSWTDAFGGIGPILLPMAIAGFGILFSIIGTLLVRIKDNDAREAQVQGALNVGNWVSIILVAISCFFLVQYMLPETMQMEFYGEGAKDISSMRVFYATLVGLFVGGVISSVTEYYTGLGKKPILAIVQKSSTGAGTNIIA

SEQ ID NO: 37002 - protein, 325 aa, Sinorhizobium meliloti
MMTAKPRILITRRWPQAVERVLAERFDTVLNEEDRPLDRSALADALRNFDAVLPTVSDRLPADVFTGGGLRTRILGNFGVGYNHIDAGAAKEAGIVVTNTPGVLTDCTADLAVSLLLAAARRTGEGERQVRAGAWDGWRPTHMIGTKVTGKTLGIIGFGRIGKAMAKRCHFGFDMDIVFYNRSRVAPEEAARFGARQLDTVEDVLRAADFVSLHCPGGGENRHLINAARLAAMKPAAYLINTSRGDVVDEAALIAALEKGVIRGAGLDVYEAEPDVPTRLRALENVVLLPHLGSATEETRTAMGMKVVDNITAFFAGLQPPDRVA

SEQ ID NO: 37003 - protein, 475 aa, Ashbya gossypii ATCC 10895
MGNTPSSSTETKDLEEKPQKSVGAGREKEIPMPEQLKDVSMVDVSEAAAEPVAEDSRRKVKRVHPGEVAQTFSQLSLRGGEDMGLAEKRSTTLIFDYDDDMASKGLNHAGVGSNSDIDSMADDRMATEQPAGSSSSSCISPPPQHDVLGPPAYGMYGATQPQGAAREAQAQPPQPPSQQQQQQQQQQQASPPMVPVEITWQQGGSRVYVTGSFTGWRKMIGLVADPARPGVFQIKLQLPPGTHRFRFIVDNELRFSDFLLTATDQMGNFVNYLEIVSPQPAGQQHIQAPHAPRLQAPFDQAQSTHTNPSDLRPDDARIDGDAYSRTEKQMSARSKLALQIEEEPDDMGDGYTRFHEEIKTKPAYEFTQDIPAVFTDPSVMGQYYLTLDQQQHNQQNLAWLTPPQLPPHLEHVILNHYNKSADGVSENTSGALPIPNHVVLNHLATSSIKHNTLCVASIVRYKQKYATQILYAPLQ

SEQ ID NO: 37004 - protein, 593 aa, Pisum sativum
METETETPNGSTPCPTSAPSAIPLRPSSCDGTMGRHLARRLVEIGVRDVFSVPGDFNLTLLDHLIAEPELNLVGCCNELNAGYAADGYGRAKGVGACVVTFTVGGLSILNAIAGAYSENLPVICIVGGPNSNDYGTNRILHHTIGLPDFSQELQCFQTITCFQAVVNNLDDAHELIDTAISTALKESKPVYISIGCNLPAIPHPTFARDPVPFFLAPRVSNQAGLEAAVEEAAAFLNKAVKPVIVGGPKLRVAKAQKAFMEFAEASGYPIAVMPSGKGLVPENHPHFIGTYWGAVSTSYCGEIVESADAYVFVGPIFNDYSSVGYSLLIKKEKSLIVQPNRVTIGNGLSLGWVFMADFLTALAKKVKTNTTAVENYRRIYVPPGIPLKREKDEPLRVNVLFKHIQALISGDTAVIAETGDSWFNCQKLRLPENCGYEFQMQYGSIGWSVGATLGYAQAATDKRVIACIGDGSFQVTAQDISTMIRCGQRSIIFLINNGGYTIEVEIHDGPYNVIKNWDYTGFVSAIHNGQGKCWTAKVRTEEDLTEAIATATGAEKDSLCFIEVFAHKDDTSKELLEWGSRVAAANSRPPNPQ

SEQ ID NO: 37005 - protein, 493 aa, ASPERGILLUS NIDULANS FGSC A4
MPPPVGRYGPTGLTGPYSHLAQQQAHLQQQQQAQHHPAHAQSSNTALPPPSLGVHPGFTTANANANMNPFTLAGAGVGNGMSVAGFGAAGDGGGTGLASHAAQMGFARGAQMQQQQLHQAHDGRFTLEGKGGGVKTRIRDVWKHNLAQEMAVLRHLVERYPYISMDTEFPGIVARPIGSFTNKADYHYQTLRCNVDLLKMIQLGITLFSPKGEVPPPDATDANGQPLGNGLVPAPCTWQFNFRFSLEEDMYAQESTAMLAKAGIDFATHEKNGIDPLEFGALLISSGLVLLDDVHWISFHSGYDFGYLMKIMLCQALPENEEEFHKLLNIFFPSLYDIKYLMKHATRNQAVNDSPLTPAAAQIISNLGQKSGLQDIADELGVKRVGIAHQAGSDSLVTGEIFWKMRQLVFNGKIDDSKYSGQIWGLNGQMPTVTYHNNPHQTPNLNGATIYSAAGTPSTPNNAGVQTPQNHTPGALTPGATGGVLGQYQMAKS

SEQ ID NO: 37006 - protein, 397 aa, Zea mays
MAEICCEAAAAAAGSDQKGECAGSRAARRRRMEIRRLRVVAEEASAKRRRLEADEEDAVGGRAPRYGVTSVCGRRRDMEDAVTARPEFINGHHFFGVFDGHGCSHVATSCGERMHQIVAEEATAAAGSSVSDETARWRGVMEKSYARMDAEAVVSRETAGPAPTCRCEMQLPKCDHVGSTAVVAVVGPRHLVVANCGDSRAVLSSGGATIPLSADHKPDRPDELERIHAAGGRVIFWDGARVFGMLAMSRAIGDSYLKPFVISDPEVLVVERKDGEDEFLILASDGLWDVVSNEVACKVVRTCLRNRAPRGGRERSSPTSNLSPRQSSASGGSSSSSGDEEAGAPSGDCAGSESDGESAEDRACAEAAILLTKLALARQSADNVSVVVVNLRRRPRS

SEQ ID NO: 37007 - protein, 405 aa, Pisum sativum
PVYISIGCNLPAIPHPTFSRDPVPFSLAPKLSNQMGLEAAVEAAAEFLNKAVKPVLVGGPKLRVAKASDAFVELADASGYALAVMPSAKGMVPEHHPHFIGTYWGAVSTAFCAEIVESADAYLFAGPIFNDYSSVGYSLLLKKEKAIIVMPDRVVIANGPAFGCVLMNDFLKALAKRLKHNNVAYENYHRIFVPDGTPLKSASKEPLRVNVMFQHIQKMLSSETAVIAETGDSWFNCQKLKLPEGCGYEFQMQYGSIGWSVGATLGYAQAVPEKRVIACIGDGSFQVTAQDVSTMLRCGQKTIIFLINNGGYTIEVEIHDGPYNVIKNWNYTGLVDAIHNGEGKCWTTKVFCEEELVEAIAKATGPKKDSLCFIEVIVHKDDTSKELLEWGSRVSAANSRPPNPQ

SEQ ID NO: 37008 - protein, 412 aa, Shewanella sp. MR-7
MKRLAIPLQGAQMLFVAFGALVLMPLLTGLDTSVALFTAGIGTLLFQLITKRQVPIFLASSFAFIAPILYGVQTWGIPSTMGGIIAAGLVYILLGALVKVRGTDFIHRLLPPVVVGPVIIIIGLGLAPVAVNMALGKSGDGSLTLVPTNTALIISLASLCTTIAVAIFAKGLLKVMPILAGIVVGYGLSLAFGIVDFAVVAAASWIAIPKFVAPEFNWHAIAFMIPVAIAPAVEHIGDILAISNVTGKDFMKKPGLHRTLTGDGVATIAAAAFGGPPNTTYSEVTGAVTLTRNFDPKIMTWTAITAITLAFVGKLGALMQTIPVPVMGGIMCLLFGSIAAVGLNTLIRNHVDLSEPRNLSIVGVTLVFGIGGMAFGIGSFSLTGISLCGIVAITMNLLLPASKHHERDAASH

SEQ ID NO: 37009 - protein, 350 aa, Agrobacterium tumefaciens str. C58
MQNIKTCVIVGAGMVAKTHVLACAASSEKIRLKGIVDGGSGRAKALAAEASKHAGYEVAVYSSIEDAARDADVDFAIIATPPNARIDIVGQLAKAGKHILMEKPVARNTEEADGIVALCRDAGVTLGIIFQHRMRAASQKARELVDGGTLGALGLCEISVPWWRAQSYYDEPGRGTLARDGGGVLISQAIHTIDLALSLTGPVARVQAMAATTRFHRMETEDYVSAGLRFKNGAVGSLVASTASFPGAAESILLHFDNASLRLASGLLHLDWRDGRQETFGGAAAGTGGGADPMAFTHEWHKGVFDDFADAISSGRPPVVTGEAALLSHRLIDAIINSADTGKEVELQDD

SEQ ID NO: 37010 - protein, 511 aa, Oryza sativa
  misc_feature (201)..(201): Xaa can be any naturally occurring amino acid
  unsure (1)..(511): unsure at all Xaa locations
MDGLAAPSPSHSGATSGGGASHRKRKLPPSSLSDATADEDDDTTAPSSPSTSPSSPSRPSSPSSSHSDDDDDDSLHTFTAARLDGAPPSSSGRPPKPESSTVSAAAAAAAAAAAPKPDSASAAAGDGKEDPKGLFTDNIQTSGAYSAREEGLKREEEAGRLKFLCYSNDGVDEHMIWLVGLKNIFAGHVRKLPKEYIVRLXMDRTHKSMMVIRNNIVVGGITYRPYTSQKFGEIAFCAITADEQVKGYGTRLMSHLKQHARDADGLTHFLTYADNNAVGYFVKQGFTKEITLDKERWQGYIKDYDGGILMECRIDQKLPYVDLATMIRRQRQAIDEKIRELSNCHIVYSGIDFQKKEAGIPRRTMKPEDIQGLREAGWTPDQWGHSKSRSAFSPDYSTYRQQLTNLMRSLLKNMNEHPDAWPFKEPVDSRDVPDYYDIIKDPIDLKTMSKRVESEQYYVTLEMFVADMKRMFSNAKTYNSPDTIYYKCASRLESFFSNKVASQLAQASTKN

SEQ ID NO: 37011 - protein, 357 aa, Agrobacterium tumefaciens str. C58
MIGVAIIGAGIGAQHLTGYRALPKRFVVKAICDLDLERARSVAGDDTSIRLTTDLDEVLADESIQLIDVCLPPHLHFPVTLKAHAAGKDVVCEKPLVRSLEEANALIDSVKKTGRSVFPVFQYRFGQAMRQLRALIDAGLAGKAFVASSEVHWNRGASYYDIPWRGTWKGECGGAILGHAIHAHDLLCHVLGPVDEVFAMADTRVNTIETEDCAALSFRMKSGALATSSVTLGAAEDTSRLRFCFEGFTAESGTLPYRPAEDTWRFIARAPTTQDQIDAVLATVADGENGFAGFVEAIADAMEGCGGKEVTVNDGLQSIELVTAIYRSVREGKPVRLSDAAEGEWIKGWAPRASANA

SEQ ID NO: 37012 - protein, 495 aa, Arabidopsis thaliana
MCFNNIETGDEVETERQVFGSSEEDEFRVEDTARNTNNVQISQQQQQPLAHVVKWERYLPVRSLKVLLVENDDSTRHIVTALLKNCSYEVTAVPDVLEAWRILEDEKSCIDLVLTEVDMPVHSGTGLLSKIMSHKTLKNIPVIMMSSHDSMVLVFKCLSNGAVDFLVKPIRKNELKNLWQHVWRRCHSSSGSGSESGIHDKKSVKPESTEGSENDASISDEHRNESGSSGGLSNQDGGSDNGSGTQSSWTKRASDTKSTSPSNQFPESPNKKGTYENGCAHVNRLKEAEDQKEQIGTGSQTGMSMSKKAEEPGDLEKNAKYSVQALERKNDDTLNRSSGNSQVESKAPSSNREDLQSLEQTLKKTREDRDYKVGDRSVLRHSNLSAFSKYNNGATSAKKAPEENVESCSPHDSPIAKLLGSSSSSDNPLKQQSSGSDRWAQREAALMKFRLKRKERCFEKKVRYHSRKKLAEQRPHVKGQFIRKRDDHKSGSEDN

SEQ ID NO: 37013 - protein, 186 aa, Triticum aestivum
  misc_feature (85)..(85): Xaa can be any naturally occurring amino acid
  misc_feature (115)..(115): Xaa can be any naturally occurring amino acid
  misc_feature (138)..(138): Xaa can be any naturally occurring amino acid
  misc_feature (170)..(170): Xaa can be any naturally occurring amino acid
  unsure (1)..(186): unsure at all Xaa locations
MAPAVMASSATTVAPFQGLKSTAGLPVSRRSSGSLGRVSNGGRIRCMQVWPIEGIKKFETLSYLPPLSTEALLKQVDYLIRSKWXVPCLEFSKVGFRLPLSTTALPGYYDGRYWXTMWKLPMFGCTDATQVLNEVEEXKKDTLILFRVIGFDNLRQVQCVSFIAFRPQVXRSPGKAKLQVETMAYV

SEQ ID NO: 37014 - protein, 495 aa, Arabidopsis thaliana
MCFNNIETGDEVETERQVFGSSEEDEFRVEDTARNTNNVQISQQQQQPLAHVVKWERYLPVRSLKVLLVENDDSTRHIVTALLKNCSYEITAVPDVLEAWRILEDEKSCIDLVLTEVDMPVHSGTGLLSKIMSHKTLKNIPVIMMSSHDSMVLVFKCLSNGAVDFLVKPIRKNELKNLWQHVWRRCHSSSGSGSESGIHDKKSVKPESTEGSENDASISDEHRNESGSSGGLSNQDGGSDNGSGTQSSWTKRASDTKSTSPSNQFPESPNKKGTYENGCAHVNRLKEAEDQKEQIGTGSQTGMSMSKKAEEPGDLEKNAKYSVQALERKNDDTLNRSSGNSQVESKAPSSNREDLQSLEQTLKKTREDRDYKVGDRSVLRHSNLSAFSKYNNGATSAKKAPEENVESCSPHDSPIAKLLGSSSSSDNPLKQQSSGSDRWAQREAALMKFRLKRKERCFEKKVRYHSRKKLAEQRPHVKGQFIRKRDDHKSGSEDN

SEQ ID NO: 37015 - protein, 396 aa, Streptomyces coelicolor A3(2)
MRGGQRRASRLRPPTYRRRPPPAASILEVAPVQTQTLTQTDTAAGGAEPDAERGVLLAMPAQPGAGAALPHPGAPVDVPEHPEPPPPTRTESGGPSSDLFRQYLREIGRIPLLSAAEEVDLARRVEAGLFAEEKLRCSPGLDDRLALDLDRLVVLGRLAKRRLIEANLRLVVSVAKRYVGRGLTMLDLVQEGNLGLIRAVEKFDYARGYKFSTYATWWIRQAMSRALADQARTIRVPVHVVELINRVVRVQRRMLQERGCEPTPQEVAAHLDLAPERVGEVLRLAQEPVSLHAPVGEEDDVALGDLIEDGDAASPVESAAFLLLRQHLEAVLSTLGERERKVVQLRYGLADGRPRTLEEIGRLFGVTRERIRQIESKTLSKLRDHAYADQLRGYLD

SEQ ID NO: 37016 - protein, 118 aa, Brassica napus
  misc_feature (35)..(35): Xaa can be any naturally occurring amino acid
  misc_feature (65)..(65): Xaa can be any naturally occurring amino acid
  unsure (1)..(118): unsure at all Xaa locations
MTEALIKKKPVMASVKDMPLLRDGPPSGGFAPVTXARPVSSRDHNAMAIFLTISAALAWWMYQAXHGNMILREYMEHTYADHRAIPPSPQSVEDEEYVSYLYQCPDDNAGVMKDVPGF

SEQ ID NO: 37017 - protein, 836 aa, Geobacter sulfurreducens PCA
MKAVIMAGGFGTRIQPLTSSIPKPMIPLLNRPIMLHIVELLKKYEITDLVMLLYHQPAVIKNFFRDGTDFGVKITYVTPLQDMGTAGAVKCAEKYLDERFIVISGDLLTDFNLQKIIDFHEEKEALATITLTSVKDPLQFGVVITDKEKRISQFLEKPGWGEVISDTINTGIYVLEPEIFSHIPAEENYDFSQDLFPKLLEKQQSLFGYTAKGYWRDIGNTDSYREAHHDIFKGKVNVRIDEPKQDLVGKDLRLGSDVNLDEHVTLEGTVVIGDNSQVFESAHIKDTVIGRNCTIEAGVRLSRCVIWDNVYVKRGAKLNDSVLCGNVRVGNGVVMEEGVIVADDTSIGEESYIKRDVKIWPRKVIEAGATVTGNLIWGEKWKKALFEGALIKGLTNMELTPEFVAKLGCAYGTTLPKGSFVISGRDAYRSSRMLKRSFIGGLLSSGVNVRDLTMVPMPVLRYKLRSFGEVGGIQFRQALDDPASTEIIFLDGDGLDFSSSMGKNVERIFFKENFRRAHHTEPGGLTEIPQQVMDFYREGFLHAIGKTPLQKKAFKVVIDFNHSPASQLLPGILTQMGCEVISLNAYVDEERGVQALSDRGQSLSQLSKIVATLEANAGFWLDPTVEGVIMVDETGTVHEGADILLLMVGLALKAGEKGVFAIPVSAPSAIERMAQERGCAVTRTKSADRSMIEAALSSEVILAGSMDGRFAFPRFQAAFDGMFAIAKSIEMAARSGASISATAAEIPRRAFLHTRVPCVWDMKGGIMRKMSEDSLDKEASFIDGIKVHFGEDWALVLPDQYQPHVHIVAEARDPKAAQKLLTEYQKKVEQWKKELS

SEQ ID NO: 37018 - protein, 351 aa, Zinnia elegans
MPPPLLGVEGDGLGNVSLMTSASTMESIFQKNAELTERNYLGLSDCSSFDSTAVSGISEVKRNNLNLKATELRLGLPGSQSPERDVDVDLVNSESLDEKPLFPLLPSKDGICSNSQKVFVSGNKRGFSDAIDEGKWMFGSSGTDSETSNMNGKISSGAQPVMIKDATSKVVTQEQTHATFGTNLNIVNTSNPPAAKAQVVGWPPVRSFRKNILATNSKTNDEVDGKPGPGALFVKVSMDGAPYLRKVDLRSYSTYQQLSSAIEKMFSCFTIGQCGSQGAPGRESLSESKLRDLLHGSEYVLTYEDKDGDWMLVGDVPWDMFIGSCKRLKIMKGSDAIGLAPRAMEKSKNRN

SEQ ID NO: 37019 - protein, 357 aa, Geobacter sulfurreducens PCA
MAKKLFIPGPVDVHPEILQAMASPMIGHRMPEYAALHGRVTAGLKRVLATDGRVFLATSSAFGVMEGAVRNLVAKRCVNFCNGAFSDKWHDVTKRCGKEADAVKVEWGKPITPEIVDQALATGKYDAITLIHNETSTGVMSPLPEIARVLRNYPDVVSIIDTVSSMSALPVPVDELGIDCCIFGVQKAFALPPGLAVFTASDKALARARTVEGRGYYFDFLEFEANDEKNNTPSTPCISHIYAMDRQLERFFAEGLEQRWARHRQLAGMVREWVTDRGFGFFADEPYRSVTLTCALNTRDTDLARLKKMLGERGYAFDDGYGKIKGKTFRVAHMGDMQRTDLEEFLATADECLAELG

SEQ ID NO: 37020 - protein, 168 aa, Triticum aestivum
MAPTVMASSATSVAPFQGLMSTAGLPVSRRSNGASLGSVSNGGRIRCMQVWPIEGIKKFETLSYLPPFSTEALLKQVDYLIRSKWVPCLEFSKVGFIFREHNASPGYYDGRYWTMWKLVMFGCTDATQVINEVEEVKKEYPDAYVRIIGFDNMRQVQCVSFIAFKPPG

SEQ ID NO: 37021 - protein, 447 aa, Methanococcus maripaludis S2
MVEKSTEYRKTKILVTMGPSLDGTFEKSLEFIDGIRFNMSHTNTKHIEKYLDILNKKNIAKLMDLKGNKIRIKKSNFSELIENQVVKLGKDILISYIPECIKKGQNILINDGKIKLIVESVEKDITARVLVGGHIKEKMGVNFPEGCFPNDLTDEDIKNVKFAVENEFEYIALSFVRSETDILNLKNLIKEYSGNCSVIAKIETKEGLKNIDEILNHSDGVMIARGDLGVEVAIEYLPIIQKNIIKLANEKGKLIITATQMLDSMVNNPYPTRAEVTDVANAIFDGTDCLMLSNETTIGKYPIESIKTLDNIARVSENDISKYKQEIEFEEHSIYSGIAYAVEALSKKLNPKIVITPTTSGKTPLRISKFRFNSPIIALAPENIVFRKLRLVWGVIPIKIDEIGDVDEVLEISKKIAKNIIDSGIYVVTLGHPKGEKKTNVIKVESI

SEQ ID NO: 37022 - protein, 359 aa, Fagus sylvatica
MDKYEVVKDLGAGNFGVARLLRHKETKELVAMKYIERGLKIDENVAREIINHRSLRHPNIIRFKEVVLTPTHLAIVMEYAAGGELFERICTAGKFSEDEARYFFQQLISGVNYCHSMQICHRDLKLENTLLDGSPAPRLKICDFGYSKSSLLHSRPKSTVGTPAYIAPEVLSRREYDGKLADVWSCGVTLYVMLVGAYPFEDQDDPRNFRKTIQKIMAVQYKVPDYVHISQDCKHLFSRLFVANPSRRITLKEIKNHPWFLKNLPRELTESSQAIYYQRDNPSFSLQSVDEIMKIVGEARNPPPSSKIVRGFSWGPDENEEGNEDIDAEVEEEEEEEDEEDEYDKRVKEVHASGEFHIS

SEQ ID NO: 37023 - protein, 96 aa, Glycine falcata
LYAGINISGTNGEVMPGQWEYQVGPSVGIEAGDHIWASRYILERITEQVGVVLSLDPKPIEGDWNGAGCHTNYSTKSMREDGGFEVIKKAILNLSL

SEQ ID NO: 37024 - protein, 338 aa, Yarrowia lipolytica CLIB122
MAIKVGINGFGRIGRIVLRNALKNPEVEVVAVNDPFIDTEYAAYMFKYDSTHGRFKGKVEAKDGGLIIDGKHIQVFGERDPSNIPWGKAGADYVVESTGVFTGKEAASAHLKGGAKKVIISAPSGDAPMFVVGVNLDAYKPDMTVISNASCTTNCLAPLAKVVNDKYGIIEGLMTTVHSITATQKTVDGPSHKDWRGGRTASGNIIPSSTGAAKAVGKVIPELNGKLTGMSLRVPTVDVSVVDLTVRIKNGASYEDIKATMKAASESPELKGILGYTDEDVVSTDFIGDTHSSIFDAKAGIGLNDNFVKLISWYDNEYGYSARVVDLIVAVAKKDASA

SEQ ID NO: 37025 - protein, 139 aa, Fagus sylvatica
MEKYELVKDIGSGNFGVARLMRNKETKELVAMKYIERGLKIDENVAREIINHRSLRHPNIIRFKRKVVLTPTHLAIVMEYAAGGELFERICAAGKFSEDEARYFFQQLISRVSYCHSMQICHRDLNWRTTYWDGSPAPR

SEQ ID NO: 37026 - protein, 223 aa, Oryza sativa
MAALLARQAAQALRARQMAQLGPSATAMQGHIRTYMGAGKPTRFKEDEEKEKLAKEIAKDWNAVFERSINTLFLTEMVRGLMLTLKYFFEKNVTINYPFEKGPLSPRFRGEHALRRYPTGEERCIACKLCEAICPAQAITIEAEEREDGSRRTTRYDIDMTKCIYCGFCQEACPVDAIVEGPNFEFATETHEELLYDKEKLLENGDRWETEIAANLESESLYR

SEQ ID NO: 37027 - protein, 112 aa, Zea mays
MAAVETVVLKVAMSCEGCSGTVRRVLSKMEVVETFDIDLKEQKVTVKGNVKPEDVFQTVSKSGKRTSYWEGEATAPDAAAAPEAEAAPITAAETPPAAAPAAPEITPAKADA

SEQ ID NO: 37028 - protein, 417 aa, Triticum aestivum
  misc_feature (244)..(244): Xaa can be any naturally occurring amino acid
  unsure (1)..(417): unsure at all Xaa locations
MNRKENPPSIPPPLLVPTLSLSLSLRLSVRARSAFLGREEMAAKRELVVSFGEMLIDFVPTVAGVSLAEAPAFVKAPGGAPANVAIAVARLGGGAAFVGKLGDDEFGRMLAKILRENGVDAGGVVFDSGARTALAFVTLRADGEREFMFYRNPSADMLLTADELKVDVIKRAAVFHYGSISLIAEPCRTAHLHAMKVAKEAGALLSYDPNLREALWPSLEEARTKILSIWDQADIVKVSEVELXEFLTGINSVEDDVAMKLWRPTFKLMLVTLGDQGCKYYTKDFRGTVPSYKVQQVDTTGAGDAFIGSLLRKIVQDPSALQDKTKLEGAIKFANACGAITATKKGAIPSLPKEDKCCPLMEKALNPLMISSSFEFCKLYCKLFWIRSKVYSSQDAPAFLFAPLYERVFVLEFFSSE

SEQ ID NO: 37029 - protein, 537 aa, Xanthomonas axonopodis pv. citri str. 306
MGAGTIGPVFSMTGLPLTTSISPGASAGARLPLQIPFIIGNEACERFSFYGMRNILVQFLITSLLLQEISGPGREAEAKHILHSFMIGVYFFPLLGGWLADRFSGKYNTILWFSLVYCAGHACLALFEGSRDGFFLGLGLIALGAGGIKPLVASFMGDQFDQSNKHLAKVVFDAFYWIINFGSLFASLLIPLALKNLSPAWAFGIPGILMFVATLVFWLGRKRYVLVPLPPKDPHGFAAVVRTALLTHAPGQGRPGLLLAVVSVLLALAGFALIEPLGIVVCLCIALVLLLAGIGGGTWWQLERARGTHPDVAVEGVRALLRVLVIFALVMPFFSLFDQKASTWVLQGREMTMPAWFTASQMQALNPLLVMLLIPFNNLVLYPLLRRGGWEPTPLRRMTSGIAFSGVAWIAVGAIQMIMDGGEPMHIAWQILPYALLTFGEVLVSATGIEFAYSQAPPSMKGVVMSFWYLTTTVGNLWVLLSNVAVRNATVTAHIADTGLSEAAFLMFFFAAFAFLAALAFGLYARRYRMVDNYRTA

SEQ ID NO: 37030 - protein, 378 aa, Bordetella parapertussis 12822
MTAQTSAVSVISAANRLVAKVGSSLVTNEGRGLDRAAVDHWAAQIAALHQQGKQVVLVSSGAIAEGMARLGWRKRPSAMHELQAAAAVGQMGLCQAYEAAFAEFGLRTAQILLTHEDLADRHRYLNARSTLFALLRLGVVPIVNENDTVVTDEIRFGDNDTLGALVTNLIEADALIILTDQRGLYEADPRCDPAARFVAHAQAGDAALEAMAGGAGSGVGTGGMLTKILAAKRAAHSGAHTVIASGRERNVLTRLAQGECIGTELRAVLPVWSARKQWLADHLRLRGRVVLDDGAVHALLHEGKSLLPIGVAEVQGEFERGDVVACVDMHGRECARGLINYSSADTRRILRQPSSQIARILGSMTDPELMHRDNLVVT

SEQ ID NO: 37031 - protein, 182 aa, Glycine max
  misc_feature (129)..(129): Xaa can be any naturally occurring amino acid
  unsure (1)..(182): unsure at all Xaa locations
MLSIKRVPTVVSNYQKEETGEAAAAGGCGRNCLKSCCIQDARLPLYAFKRGEKVGGKELPLLGCKKHPVDFLDSLVLGEWEDRMQRGLFRYDVTTCETKVIPGKYGFIAQLNEGRHLKKRPTEFRVDKXLQPFDENKFNFTKVGQEEVLFQLEASNDGEAQFFPNVPIDVENSPSFVAINVS

SEQ ID NO: 37032 - protein, 477 aa, Symbiobacterium thermophilum IAM 14863
MYIGGEWREAVSGRRFEVTNPATGEVIATVPDAGREDARAAIEAAHAAFGEWSSLPAHVRARYMRRLYDLIVQNVDRLARVLTEENGKPLAEAKGEVFNGAEYLNWYAEETRRIYGETIPSSSRRTRIWVLRQPVGVVGAITPWNFPSSMVTRKIAPALAAGCTVVLKPAEQTPLSALLIAELIHEAGLPAGVVNVVTTLDPAAVGQEFLENRLVRKISFTGSTEVGKHLMQGAAAQMKRVSMELGGNAPFIVFEDADLDAAVQGVVISKFRNAGQTCICANRIYVQESIAPAFTERLVEAVRGLRVGHGLEEGINVGPLIDEAAYVKVEGHVSDARGKGARVLTGGHRLTGPGFDRGFFYAPTLLDQVSDEMRIVHEETFGPVAPILTFRTEEEVIRRANDTNYGLAAYIFTRNLGRTVRVSEALEYGMVAVNDSLLAVPQAPFGGVKESGLGREGGHHGLDDYLEYKYLSVVLDG

SEQ ID NO: 37033 - protein, 399 aa, Brassica napus
MALKFNPLVSQPYKLASSARPPVSTFRSPKFLCLASSSSPALSSKEVESLKKPFTPPREVHLQVLHSMPPQKIEIFKSMEDWAEQNLLPHLKDVEKTWQPQDFLPDPASGGFEDQVKELRERARELPDDYFVVLVGDMITEEALPTYQTMLNTLDGVRDETGASPTSWAVWTRAWTAEENRHGDLLNKYLYLSGRVDMRQIEKTIQYLIGSGMDPRTENNPYLGFIHTSFQERATFVSHGNTARQAKEHGDLKLAQICGTIAADEKRHETAYTKIVEKLLEIDPDGTVVAFADMMRKKISMPAHLMYDGRDDNLFDNFSSVAQRLGVYTAKDYADILEFLVGRWRIESLTGLSGEGNKAQEYLCGLTPRIRRLDERAQARAKKGPKIPFSWIHDREVQL

SEQ ID NO: 37034 - protein, 528 aa, Brassica napus
MERTNSIEMDQERLTAEMAFKDSSSAVIRIRRRLPDFLTSVKLKYVKLGLHNSFNFTTFLFLLIILPLTGTVLVQLTGLTFETFSELWYNHAAQLDGVTRLACLVSLCFVLIIYVTNRSKPVYLVDFSCYKPEDERKMSVDSFLKMTEQNGAFTDDTVQFQQRISNRAGLGDETYLPRGITSTPPKLNMSEARAEAEAVMFGALDSLFEKTGIKPAEVGILIVSCSLFNPTPSLSAMIVNHYKMREDIKSYNLGGMGCSAGLISIDLANNLLKANPNSYAVVVSTENITLNWYFGNDRSMLLCNCIFRMGGAAILLSNRRQDRSKSKYELVNVVRTHKGSDDKNYNCVYQKEDERGTIGVSLARELMSVAGDALKTNITTLGPMVLPLSGQLMFSVSLVKRKLLKLKVKPYIPDFKLAFEHFCIHAGGRAVLDEVQKNLDLEDWHMEPSRMTLHRFGNTSSSSLWYEMAYTEAKGRVKAGDRLWQIAFGSGFKCNSAVWKALRVVSTEELTGNAWAGSIENYPVKIVQ

SEQ ID NO: 37035 - protein, 159 aa, Shewanella sp. MR-7
MALATFGAGCFWGVEYFFRQVNGVTNATCGYMGGNNDATTYEEVKKGKTGHAEVVQVEFDPAIVSYDELLDVFWKNHNPTTLNMQGGDIGTQYRSTIFFHDREQKATAEASKLAFARSGRWGLRHIVTEIVPLQQFHVAEEYHQNYIDKNNLPSCHLEY

SEQ ID NO: 37036 - protein, 163 aa, Haemophilus influenzae Rd KW20
MVPPSDPESNYGEVQKLLFDHIQIPAENIHRIRGENEPHFELKRFEEELSAVIPNGVFDWIILGMGIDGHTASLFPHQTNFDDENLAVIAKHPESGQIRISKTAKLIEQAKRITYLVTGESKADILKEIQTTPAENLPYPAAKIKAKNGVTEWYLDKAAVRLL

SEQ ID NO: 37037 - protein, 89 aa, Oryza sativa
MASSRWVRPEVYPLFPAMGVAVGICGFQLFRDITGNPEVRVNKVGRAAGVLENHEEGRRYAEHGLRNYVRDKTPEIMPAINKFFPEPTK

SEQ ID NO: 37038 - protein, 501 aa, Kluyveromyces lactis NRRL Y-1140
MESRLGWLTDLSTETGTNLRRTSIICTIGPKTNNPETLVELRKAGMNIVRMNFSHGSYEYHQSVIDNARKSEELYQGRPLAIALDTKGPEIRTGTTTNDVDYPIPPNHEMIFTTDDKYAKACDDKTMYVDYKNITKVIEAGRIIYVDDGVLSFEVLEVIDDNTLKVKSLNAGKICSHKGVNLPGTDVDLPALSEKDKSDLKFGVKNGVHMVFASFIRTAQDVLTIREVLGEQGKDIKIIVKIENQQGVNNFDDILKVTDGVMVARGDLGIEIPAPQVFAVQKKLIAKCNLAGKPVICATQMLESMTYNPRPTRAEVSDVGNAVLDGADCVMLSGETAKGNYPINAVKTMAETALIAEQAIPYIPTYDDLRNLTPKPTSTTETIAAASVSAVFEQKARALIVLSTTGDTPRLVAKYKPNVPIVMVTRNPRAARFSHLYRGVFPFVYDESSDSEWTVDVEKRINFGVKKAKEFGILVDGDTIVTIQGFAAGVGNSNTLRVLTV

SEQ ID NO: 37039 - protein, 392 aa, Shewanella sp. MR-7
MSKATLNTDTVHRVGFLDKASLHIPILRILQADGTTYETAVLPVIDEALATKIYDTCVFTRVLDERMLGAQRQGRISFYMTCTGEEAAIVGSVAALDAEDVILAQYREHAALRYRGFTTEQFMNQMFSNEKDLGKGRQMPIHYGCAALNYQTISSPLATQIPQATGVGYSLKMQGKRNVAVCYFGEGAASEGDFHAGLNMAAVLKCPVIFFCRNNGYAISTPTEEQFAGNGIASRGVGYGMHTIRVDGNDMLAVLAATQQARAYAIEHNAPVLIEAMTYRLGAHSSSDDPSGYRSKEEEAKWQQHDPVKRFKLWLINKGWLAEADDAQCYEKYREEVLAAVKVAEKLPIPMLDEIIEDVYDKPTPALKKQLSELKEHIKKYPQSYPKSAGRL

SEQ ID NO: 37040 - protein, 161 aa, Glycine max
MSLIPNFFGGRRSNVFDPFSLDVWDPFKDFPFPNTLSSASFPEFSRENSAFVSTRVDWKETPEAHVFKADIPGLKKEEVKVQIEDDKVLQISGERNVEKEDRNNTWHRVERSSGKFMRRFRLPENAKVDKVKASMENGVLTVTVPKEEVKKADVKNIQISG

SEQ ID NO: 37041 - protein, 202 aa, Capsicum annuum
MATEAPPPVDTTEVPPFTAAETAVKQPHKLERKWTFWFDNQSKPKQGAAWGSSLKKAYTFDTVEEFWSLYDQIFKPSKLTVNADFHLFKAGIEPKWEDPECANGGKWTVTSSRKANLETMWLETLMALVGEQFDDSEDICGVVASVRRSQDKLSLWTKTATNEAAQMGIGRKWKEIIDTEKISYSFHDDSKRERSAKSRYTV

SEQ ID NO: 37042 - protein, 527 aa, Xanthomonas campestris pv. vesicatoria str. 85-10
MVAMMPLHATTARLERSTLLPTLKKSGRPRDARGRFIRHHERLPVSLADTRGALFVASEMADFIKAGGLGDVAAALPRALRHRYDVRVLIPGYRAVLERAGKVEIVGRVLAHAALPACDIGRIVQSDGLPIYILLSKELFERDGSPYVSTSGSEFEDNAIRFATLSHAAAQIAAGHAGLGWKPRLLHLNDWPCALAAGYVRWSGGTTPCLLTIHNLAYQGLVPYSMAAALGIPAERVAELEFYGQMSFLRGGIVNADHVNTVSVSYAKQITGPAQGCGLDRLLAGRAAKGALTGIVNGIDASWDPRTDEYLDSHFSVNQWQGRQANAAQVRKAFGLRESTGPLFAVVSRLVHQKGLDLICEVAPQIVAAGGQIAVIGGGEPEIERQVAELTRRYPGQVGAFIGFEEGLARRMFAGADFLLMPSRFEPCGLSQMYAQRFGCLPIAHATGGLIDTVDDGVTGFLFQHASVEALRRCLERAFRTFRLPSLLSAMRRAAMLRPSGWDVAGKKYLSLYEHTAATAPALATVS

SEQ ID NO: 37043 - protein, 179 aa, Fagus sylvatica
FKEVILTPTHLAIVMEYASGGELFERICNAGRFSEDEARFFFQQLISGVSYCHAMQVCHRDLKLENTLLDGSQAPRLKICDFGYSKSSVLHSQPKSTVGTPAYIAPEVLLKKEYDGKIADVWSCGVTLYVMLVGAYPFEDPEEPKNFRKTIHRILKVQYSIPDYVHISPECRHLIQGYL

SEQ ID NO: 37044 - protein, 130 aa, Zea mays
  misc_feature (10)..(10): Xaa can be any naturally occurring amino acid
  misc_feature (19)..(19): Xaa can be any naturally occurring amino acid
  misc_feature (31)..(31): Xaa can be any naturally occurring amino acid
  misc_feature (33)..(33): Xaa can be any naturally occurring amino acid
  misc_feature (39)..(39): Xaa can be any naturally occurring amino acid
  misc_feature (50)..(50): Xaa can be any naturally occurring amino acid
  misc_feature (87)..(87): Xaa can be any naturally occurring amino acid
  unsure (1)..(130): unsure at all Xaa locations
MGCYRGAAAXSRLRSRMGXEATTRGGVRGVXMXSACDLXLKAQVRELIPXQQERLKKLKAERGKTQRGNITVDMGLGGMRGMTGMRXETSLLEPEEGIRFRGLSIPEWQKVRGTAVKGGEPLAEGLLWVL

SEQ ID NO: 37045 - protein, 308 aa, Glycine max
MFTFLFDDLGVPQDYRHMDGFGVNTYTLINKAGKAVYVKFHWKTTSGIKCLLEEEAIKVGGANHSHATQDLHDSIAAGNYPEWKLFVQTIDPEHEDKFDFDPLDVTKTWPEDIIPLQPVGRLVLNKNIDNFFAENEQLAFCPAIVVPGVYYSDDKMLQTRIFSYADSQRHRLGPNYLQLPANAPKCAHHNNHHEGFMNFIHRDEEVNYFPSRYDPVRHAETFPIPPAICSGRREKCGIEKENNFKQPGERYRSWAPDRQDRFNRRWVDALSDPRVTHEIRSVWISYWSQADRSLGQKIASRLSMRPNI

SEQ ID NO: 37046 - protein, 96 aa, Glycine falcata
LYAGINISGTNGEVMPGQWEYQVGPSVGIEAGDHIWASRYILERITEQAGVVLSLDPKPIEGDWNGAGCHTNYSTKSMREDGGFEVIKKAILNLSL

SEQ ID NO: 37047 - protein, 528 aa, Brassica napus
MERTNSIEMDQERLTAEMAFKDSSSAVIRIRRRLPDFLTSVKPKYVKLGLHNSFNFTTFLFLLIILPLTGTVLVQLTGLTFETFSELWYNHAVQLDGVTRLACLVSLCFVLIIYVTNRSKPVYLVDFSCYKPEDERKMSVDSFLKMTEQNGAFTDDTVQFQQRISNRAGLGDETYFPRGITSNPPKLNMSEARAEAEAVMFGALDSLFEKTGIKPAEIGILIVNCSLFSPTPSLSAMIVNRYKMRQDIKSYNLGGMGCSAGLISIDLANNLLKANPNSYAVVVSTENITLNWYFGNDRSMLLCNCIFRMGGAAILLSNRRQDRSKSKYELVNVVRTHKGSDDKNYNCVYQKEDERGTIGVSLARELMSVAGDALKTNITTLGPMVLPLSEQLMFLVSLVKRKLLKLKVKPYIPDFKLAFEHFCIHAGGRAVLDEVQKNLDLKDWHMEPSRMTLHRFGNTSSSSLWYEMAYTEAKGRVKAGDRLWQIAFGSGFKCNSAVWKALRVVSTEELTGNAWAGSIENYPVKIVQ

SEQ ID NO: 37048 - protein, 436 aa, Escherichia coli O157:H7
MESLNQFVNSLAPKLSHWRRDFHHYAESGWVEFRTATLVAEELQQLGYSLALGREVVNENSRMGLPDELTLQREFERARQQGALAQWIAAFEGGFTGIVATLDTGRPGPVMAFRVDMDALDLSEEQDVSHRPYRDGFASCNAGMMHACGHDGHTTIGLGLAHTLKQFESGLHGVIKLIFQPAEEGTRGARAMVDAGVVDDVDYFTAVHIGTGVPAGTVVCGSDNFMATTKFDAHFTGTAAHAGAKPEDGYNALLAAAQATLALHAIAPHSEGASRVNVGVMQAGSGRNVVPASALLKVETRGASDVINQYVFDRAQQAIQGAATMYGVGVETRLMGAATASSPSPQWVAWLQSQAAQVAGVNQAIERVEAPAGSEDATLMMARVQQHQGQASYVVFGTQLAAGHHNEKFDFDEQVLAIAVETLARTALNFPWTRGI

SEQ ID NO: 37049 - protein, 493 aa, Bordetella parapertussis 12822
MSLSVGNAALLPGRNLIGSEWREAALGARFAVADPATGKVIAHVPDSGARDAGAAVTAAHQAFADWRRTPAKVRAQIIKRWNALLHENAEDLARLISSEQGKPLAEARGEVSYAASYVEWFAEEATRADGDLIPSPAQGRRMFALREPVGVVAAITPWNFPAAMIARKIAPALAAGCTVVCKPAEDTPLTSLALTALAQQAGVPPGVLNIVTASRGRAAEVADAWLDDPRVRKITFTGSTPVGKHLARRSADTLKRVSLELGGNAPFIVFDDADLDAAVEGLMVSKFRNGGQTCVCPNRIFVQAGVHDAFVRKLAARVEGLVVGPASDPASQIGPMINARAVEKIEHHVADALERGARLAVGGKRIHSARCAGDHYYAPTVLTGVDETMACFREETFGPVAPITVFASEADVVAAANATAFGLAAYFYSTDVRRIWRLADALETGIVGVNEGALAAEAAPFGGVKDSGYGREGSRHGLAEYMQIKYVCQGQLD

SEQ ID NO: 37050 - protein, 716 aa, Ashbya gossypii ATCC 10895
MSSYQGDRIGGGSSNIAIPLQQQRRQSNAHVTESLASRRSSMLLGTSHVSGKLLKRQGTLGQSSPVADKNIESRVFIDIDSPNFKTVEQKQHEEIVNSLRNYYLNDYVQSKRKLSSTSVNTASMSNMEDEEASDDGKSSADDSGLRHDSHLNSVGGDITREFYWIGSRGDQMRRTKNRSCDDLSLACGQRRGSTASALNVPGGFRREYIVSKIRKDVSSVNEDQTAVDNSLFFDKVPFLTRNFLEFLYVEGHFAGESFDEEFALVPPTYATGVDEHTPLLLNTDPEQQQQVPAHLRVKTSTFKAFLLMIKSFIGTGVLFLPNAFSNGGLAFSISMLFFFSAYSYWCYYILVRSKDATGVSSFGDIGGILFGSWMKFIILFSLVLTQMGFAGAYVVFTAKNLIAFLDNVFNWPDIPVKYLLLTQLFIFIPLSFVRNVSKLSITSLFANFFIISGLIIVVYYTACRWMYDLSFKPAEGVIMVFNPNRWSLFIGTAIFAFEGIGLIIPVQESMRHPEEFPKVLGLVIITTTVLFITIGTLGYLAYGSQIQSVILLNLPQDALSVNMIQLFYSMAILLSTPLQLFPAIGIIENKFFPRFTKVDIKGQDSADFQLQQNSGRANWRVKWSKNLVRSIIVLLVIILAYFGADNLDLFVSIVGCLACIPLVYIYPSMLHLRSCSTPDHEKSNTWKTRCSVLIDYILIIFGFVSMCYTSYQCFAG

SEQ ID NO: 37051 - protein, 584 aa, Symbiobacterium thermophilum IAM 14863
MWHEWCMSPWSLRAPKGQASRFMGKHVAEPYDLTMNTTAPGGEPVHTSIATKFMIGVTAALVTVLGVNLGLDIRQQRAQAEEDLREQARMVATQVIAMREFIARNQDRINRDSHGHFEFKYLNPAAVGRGVGQIFAEMSDYQYKQTRLQVRMAENMPDAFEVEALRRFASNPDLAEVVGYTGSGQDRVFRYMVPLKMEASCLPCHGPPAGEPDIAGYPKEGLQVGELAGALSITIPTERFEARLTQSTRSRATVIVLATGLSLALIGFLNHQLVARPLAALAGVTRRIGQGRWEVPEEEVRDLRAHQETSPLVDAIQAMSDELQALYRNLERKVAERTRQLQEAHADLEALHRSQTEFYSAMTHEFRTPLTSIIGFSQLLLSPGGDPLTPGQREHLKDILESAQRLLQLVNDLLDASRLQAGQMPLRIAAVDLGEAVQEALAVVRPLAQQREITVTCHIPADLPLVAADDLRVLQILLNLLSNAIKFTQVGGEVALTAEARSDLVQVSVRDNGPGIPPEDHEVIFQLFRRGSAHERTGGSGLGLALAKLLVELHGGRIWVESRPGCGSTFHFTLPVHGGEPRCP

SEQ ID NO: 37052 - protein, 165 aa, Ashbya gossypii ATCC 10895
MSSYPIFIGSELLGDARAALHAGMCARRLHKSPRTRKGKVSKTPPKVFCVKPPIDIVERDGTYLAHIANPGVANQDDIKVEYHEDRNTVIISGSLPVMAGQRQGDKCHIKELPSGNFCREIDFPEHEAIDASKISLDYEHGILSISIPKLPVRRAATVQKIKIRG

SEQ ID NO: 37053 - protein, 170 aa, Haemophilus somnus 2336
MSNKAIYLAGGCFWGVECYFHRIDGVLDAISGYANGKTENPSYQDVLYNNTGHAETVKVIYEQNKLSLEDILQYYFRVIDPTSLNQQGNDKGTQYRTGIYYTDPQDREIILTALTQEQKKYSKPIVVEVLPLQRFDPAEEYHQDYLLKNPNGYCHIDIKKADEPLVKTYK

SEQ ID NO: 37054 - protein, 479 aa, Shewanella sp. MR-7
MFRRTKIVTTLGPATDRDDNLRRIIAAGANVVRLNFSHGSPEDHLKRATQAREIAKELGVHVAILGDLQGPKIRVSTFKDNKKVQLNLGQAYILDAELGKGEGDENQVGIDYKQLPDDVKIGDILMLDDGRVQLRVERVEGRKVHTTVTVAGPLSNNKGINKQGGGLSAAALTEKDKADILTAAMIQVDYLAVSFPRSGADLEYARSLAQQAGSNALIVAKVERAEAVASEEAMDDVILASDVVMVARGDLGVEIGDAALVAVQKKLIARSRQLNKIVITATQMMESMISSPMPTRAEVMDVANAVLDGTDAVMLSAETAAGDFPEETVKAMANVCTGAESHPSVKVSKHRLDARFTSVEETIALSTMYAANHLEGVKAIIALTESGATPKLMSRISSSLPILGLSRHETTLAKMALYRGVLPIYFDSTIYPADELAQKALESLTTAGYLQSGDLVLMTKGDAMETIGGTNTCKVLIVA

SEQ ID NO: 37055 - protein, 158 aa, Retama raetam
MSLIPSVFGTGRRTNVFDPFSLDIWDPFQDFPLRTIAPSGFDTETAAVANTRIDWKETPEAHVFKADLPGLKKEEVKVEVEEGRVLQISGERTKEKEDKNDTWHRVECSAGRFLRRFRLPENAKVEQVKASLENGVLTVTVPKEEVKKPDVKPVQITG

SEQ ID NO: 37056 - protein, 355 aa, Zea mays
MSAYCGKYADELIKNAAYIGTPGKGILAADESTGTIGKRLSSINVENVEENRRALRELLFCCPGALQYISGVILFEETLYQKTKDGKPFVDVLKEGGVLPGIKVDKGTIEVVGTDKETTTQGHDDLGKRCAKYYEAGARFAKWRAVLKIGPNEPSQLAIDLNAQGLARYAIICQENGLVPIVEPEILVDGPHDIDRCAYVTETVLAACYKALNEHHVLLEGTLLKPNMVTPGSDSKKVTPEVIAQYTVRTLQRTVPAAVPAVVFLSGGQSEEEATLNLNAMNKLSTKKPWALSFSFGRALQASTLKAWAGKVENVEKARAAFLARCKANSEATLGTYKGDAAADTESLHVKDYKY

SEQ ID NO: 37057 - protein, 395 aa, Streptomyces avermitilis MA-4680
MRPVHFAAARRTPIGKLRGALSVVRPDDLAATVIRGLIADLPGLDPARIDDVYWGAANQAGEDNRNVARMAALLAGLPESVPGATVNRLCASGLEAVTTAARTIAAGEADIVLAGGSESMSRAPFVLPRPDEALPHRIETVDTRLGWRLVNPAMKELHGLLSMGETAEEVAERYAVPRERQDEFALRSHRRAADARKNGYFDDELLPVTRPDGVVVADDECVREDTSYEKLSRLKPVFRQGGTVTAGNASPMNDGAAGLLLVSEEALNELGLESLGQYVAGASAGVHPDVMGIGPVPATEKALARVGWTIGDIEEAEFNEAFAAQALACVDRLGIDPELVNPTGGAIALGHPLGCSGARILTTLLHRMRRTGAARGLATMCVGVGQGSAILVERH

SEQ ID NO: 37058 - protein, 277 aa, Brassica oleracea
MNTFPASTEMVGSENESPVTTVVGGDYYPMLAASCPKKPAGRKKFQETRHPIYRGVRLRKSGKWVCEVREPNKKSRIWLGTFKTAEMAARAHDVAALALRGRGACLNYADSAWRLRIPETTCHKDIQKAAAEAALAFEAEKSDVTMEETMAVASQAEVNDTTTDHGMNMEEATAVASQAEVNDTTTDHGVDMEETMVEAVFTEEQSEGFNMAEESTVEAAVVTDELSKGFYMDEEWTYEMPTLLADMAAGMLLPPPSVQWGHNDDLEGDADMNLWSY

SEQ ID NO: 37059 - protein, 600 aa, Nocardioides sp. JS614
MREFSNPLTIEVPATGNLTDDVVVNAREAGGSIVFSRPSAHPDAAGWEDVTAAQFLAEVSGVAKGLIAAGIEAGDRVAVISKTRYEWTLLDYAAWFAGAVTVPIYETSSAEQIAWILADSGARAVVAEGADHLARIREVRSGLDQLNHVWSIADNAVDNLVRLGADISDEELEKRRTTATPLDLATLIYTSGTTGRPKGCMLTHGNFMFELSVAVAELPELFEGDDSSTLLFLPLAHVFARIIQVGCIKTRTRLGHSSDIKNLLADLQEFKPTFILAVPRVFEKVFNTASQKATADGRGRIFDRAAETAIAYSRGLDRGRPSLAVRAKHAVFRRLVYGKLLAALGGSCRYAVSGGAPLGDRLGHFYRGIGLTVLEGYGLTETTAALTVNLPDAIKVGTVGRPLPGTAVRVADDGELLFRGGQVFAGYWHNETATSEALEPDAWFHTGDVGEVDDEGFVRITGRKKEILVTAGGKNVAPAVLEDRLRAHVLIDQCMVVGDGQPFIAALVTIDRESFPAWAEAHGKSGSIASLVDDPDLRAEIAAAVEDANKAVSKAESIRKFTILPDEWTEEGGQLTPSLKIRRNVVMRELKDDVAALYLS

SEQ ID NO: 37060 - protein, 250 aa, Brassica oleracea
MNSVSTFSELLGSENESPVGGDYCPMLAASCPKKPAGRKKFRETRHPIYRGVRLRKSGKWVCEVREPNKKSRIWLGTFKTAEIAARAHDVAALALRGRGACLNFADSAWRLRIPETTCAKDIQKAAAEAALAFEAEKSDTTTNDHGMNMASQAEVNDTTDHGLDMEETMVEAVFTEEQRDGFYMAEETTVEGVVPEEQMSKGFYMDEEWMFGMPTLLADMAAGMLLPPPSVQWGHNDDFEGDADMNLWNY

SEQ ID NO: 37061 - protein, 128 aa, Neisseria meningitidis MC58
MAYSDKVIDHYENPRNVGTFDKGDDSVGTGMVGAPACGDVMRLQIKVNDEGIIEDAKFKTYGCGSAIASSSLITEWVKGKSLDDALAIKNSEIAEELELPPVKIHCSILAEDAVKAAVADYRKRQENR

SEQ ID NO: 37062 - protein, 214 aa, Glycine max
  misc_feature (62)..(62): Xaa can be any naturally occurring amino acid
  misc_feature (98)..(98): Xaa can be any naturally occurring amino acid
  unsure (1)..(214): unsure at all Xaa locations
MATLSNSTNIFWQDCQVGRPERQKLLNQKGCVVWITGLSGSGKSTLACSLSRELHSRGKLSXYVLDGDNLRHGLNKDLGFKAEDRAENIRRTENYLIXGEVAKLFADAGLICVASLISPYRRDRDTCRAMLPDANFIEVFMNMPLELCEARDPKGLYKLARAGKIKGFTGIDDPYEPPINCEIEIKQENGDCPTPTLMAGQVVTYLENKGFLES

SEQ ID NO: 37063 - protein, 395 aa, Mesorhizobium sp. BNC1
MTASFLQYLSREVDGLKEAGLYKSERVITSMQSARIESGGKRVLNFCANNYLGLADNEELREAAKAALDRYGYGMASVRFICGTQEEHKALEKRISSFLGYEDTILYSSCFDANAGLFETLLAPEDAIISDALNHASIIDGVRLCKARRYRYANNDMGELEERLKEAADARFRLIATDGVFSMDGIIANLKAICDLAEKYDAMVMVDDSHAVGFVGAHGRGTPEYCGVEGRVDIATGTLGKALGGASGGYTSGKKEVVEWLRQRSRPYLFSNTLAPVIAAASLKVFEIVENGDELRRRLYENADRFRDRMTKLGFTLAGSGHPIIPVMIGEAGLAAKMAERLLDYGIYVIGFSFPVVPKGEARIRTQMSAAHSAEDIDRAVEAFGKVGRELGVIS

SEQ ID NO: 37064 - protein, 344 aa, Mesorhizobium sp. BNC1
MTNMMKALVKAKPEEGLWMERVPLPEIGPNDVLIKVRKAAICGTDVHIWNWDEWARKTVPVPLVTGHEFVGEVVDVGSAVTEYRIGQRVSGEGHIVCGHCRNCRAGRGHLCRNTLGVGVHRPGAFAEYISLPQHNVVAIPDDVPDEIAAIFDPLGNAVHTALSFDLVGEDVLVTGAGPIGIMGALVAQCVGARKVVITDINPGRLALAKKLGVRHVVNAREEKLTDVMRKLGMTEGFDVGLEMSGSASAFRDMIDVMNNGGKIAILGIAPTGFEIDWNKVIFKMLHLKGIYGREMFETWYKMIALVQGPLDISGLITHRISADDYREGFAAMRSGEAGKVVMDW

SEQ ID NO: 37065 - protein, 650 aa, Magnaporthe grisea 70-15
MWLLEVGRPFVNAVVVLHRDFSGGTGQIFLTLASDDDLVIFGAGSVAGWPCSGGKIRLKVDPKFTVEARPFQARNEQTPEQSSQEPTHMVAGTIHTLDGSLAESLRGDFLLEVVCATSHIVHSTRPPAPVSSAMRLGLGAASPPRLFPLGTKDTRPHYYKPDSICKGAWPKMGNQTSAQRQAGASGSSSSAASAQASATGSDPPTRSHSRRDSKHPIPVQIQRAAAPPEQSPAQAQGSTTVPPRSQQYPLSVPSPSSSVSRSAELPSRPLQTGPADGPSKPVAVPNASQAQQNHQPHKAHIPGESAPGGGAGSEALETPEAAMVPTSSMSDLSYITRPPRLPLPIEEEIHTPGSPIISPNENVPSSPTGAVETLDSEETLNRKSSALSSGTYNHEAEEEEEGGDELSVDKTRPTVPFRLEWPHGGEKVYVTGTIFQWNRKHRLHPVEGKPGHFAATINILPGTHHVRFLVDGQMQTSTELPVTVDFGNNLVNYIEVSVTEPTPPGIVQPDAPEKKVSQQELAGSRGPSQIDEKTVRYKEVDPKEVFEHEIPTYLVDFDQPEDSHAYHVSVGAIEKLPAAPALPGFLSKPILNAAVLIKDDNSVLNMPNHTVLNHLATSSIKNNILAVSATTRYKSKYVTTIIYKPTGQDG

SEQ ID NO: 37066 - protein, 483 aa, Streptococcus thermophilus LMG 18311
MIVSTYYPKIFYCDKLVLLHLLEESMENHNYENEGQFQRKMTSRHLFMLSLGGVIGTGLFLSSGYTIAQAGPLGVILSYLVGAVVVYLVMLSLGELAVAMPVTGSFHTYATKFISPGTGFTVAWLYWICWTVALGTEFLGAAMLMQRWFPSVPAWIFAAFFALVILGINALSVRSFAEAESVFSSIKVIAIFVFIILGLGAMFGLVSFEGHHEAIMFKHLTANGLFPNGGLAIVSVMLAVNYAFSGTELIGIAAGETDNPKEAVPRAIKTTIGRLVIFFVLTIVVLASLLPMKEAGVSSAPFVDVFDKMGIPFAADIMNFVILTAILSAGNSGLYASSRMLWSLANEGMLNKKLVTINKHGVPMTALLISMAGAVLSLFSSIYAADTVYLALVSIAGFAVVVVWLSIPMAQINFRKQWKLEHSEDELDYKTPFNPILPYITIVLLAISVLGIAWDSSQRAGLYFGIPFMIFCYLYHYLCFNKW

SEQ ID NO: 37067 - protein, 298 aa, Zea mays
ACSIGSWNKTMESEIMASYETKQNCEIRVFESSDEMATDLAEFISQASEISVKERGCFAIALSGGPLVRHMRKLCEAPYNKTLDWPKWYIFWAEERAVAKNHAESNYRLTKEEFLSKVPILNGHVYSINDNATVEEAASDYEFVMRQLVKVRTVGVSESNDCPRFDLVLLNIGPDGHVASLFPNHPALELKGDWVTYITDSPEPPPERITFTLPVINSASSVAIVATGEDRARAVSFSVSACQDQEEEGPADDDAGTTMIPPASMVQPTDGKLVWFLDEAAASSLEASNGACEHQEGY

SEQ ID NO: 37068 - protein, 629 aa, Acinetobacter sp. ADP1
MSDMHSPTSQVAALISRGKEQGYLTYAEVNDHLPDSITESEQIEDIIQMLQDVGIPVHERAPESDDTMFGDSTEADEVAEEEAAAVLASVENEPGRTTDPVRMYMREMGTVELLTREGEISIAKRIEEGIRDVLHSIAYWPNAVEVVLQEYNDYVTGERRLADILSGYLDPETDDDIPEVLEEEAELEEDDESTSKTTTKDVKLDDDDEEEEESEGDDDSEGDSGPDPEIAKVRFEELEAAWKNTKTVIEKHGRNSEEANAALESLATVFMMFKFTPRLFDIISEMIRGTHENIRSNEREVMRYAVRRGRMDRTQFRTSFPGQESNPAWLEEQIAKAPNESKAYLEKVRPDIQAFQQKIAEIEQDLNLNVREIKEIAKRMAVGEAKARRAKKEMVEANLRLVISIAKKYTNRGLQFLDLIQEGNIGLMKAVDKFEYRRGYKFSTYATWWIRQAITRSIADQARTIRIPVHMIETINKINRVSRQLLQEMGREPTPEELGERLEMDEVKVRKVLKIAKEPISMETPIGDDEDSHLGDFIEDSNITSPVDAATSEGLKEATREVLENLTEREAKVLKMRFGIDMPTDHTLEEVGKQFDVTRERIRQIEAKALRKLRHPSRSEHLRSFLEND

SEQ ID NO: 37069 - protein, 152 aa, Zea mays
MSLVRRSNVFDPFSMDLWDPFDTMFRSIVPSATSTNSETAAFASARIDWKETPEAHVFKADLPGVKKEEVKVEVEDGNVLVISGQRSREKEDKDDKWHRVERSSGQFVRRFRLPENAKVDQVKAGLENGVLTVTVPKAEEKKPEVKAIEISG

SEQ ID NO: 37070 - protein, 714 aa, Zea mays
MAATTSTAAAAVSFSLPSPPHCRGARRRRAPSLLRAASTAAPPSPDLSIQLSPRASPPASTNGAATALGPPVSASFARDRAEDLQAEARAMARAAGATVYSPELLAARYGSRPFKVALRAGEVLSKLASFGVKVLLDERRGESSSERRRARAVELRTIFTRLGPTFVKIGQGLSTRPDLCPAEYLEELAELQDSLPTFPDEEAFACIERELGFTLDSIYSTISPSPIAAASLGQVYKARLKYSGKLVAVKVQRPSIEKAIGLDFYLLRGLGFLINKYVDIVTSDVVALIDEFARRVFQELNYVQEGQNARRFKKLYADKQDVLVPDIFWDYTSAKVLTMEWIEGVKLNQQAVIESQGLKVLDLVNIGIQCSLRQLLEYGYFHADPHPGNILATPEGKLAFLDFGMMSETPEDARVAIIGHVVHLVNRDYEAMARDYYALDFLEPDVDVSPIVPALKNFFDDALNATVSELNFKTIVDGLGAVLYQYPFNVPAYYALILRSLTVLEGLALYADPDFKVLAASYPYFAKRLLTDPNPYLRDALIELVFKDGKFRWNRLENLLVQGRQDREFAAKDALQPVLKLLLGPGGEELRALVVKEAVRVTEAIAIGTLVDSYNAAPSFLKPLISSGNLAEPFKFSETEQEQMMELRDQVFRVWGLLRSSNNFDPSLLQPIVQVLQEPEARVLGSRVAGGVTQRLAARLLQQLLRTPPAPGSS

SEQ ID NO: 37071 - protein, 426 aa, Ipomoea batatas
LPNAEDVDMPWDSDVFAVPSGYNAPQQVHITQGDYEGRGVIISWTTPYDKAGANKVFYWSENSKSQKRAMGTVVTYKYYNYTSAFIHHCTIKDLEYDTKYYYRLGFGDAKRQFWFVTPPKPGPDVPYVFGLIGDIGQTHDSNTTLTHYEQNSAKGQAVLFMGDLSYSNRWPNHDNNRWDTWGRFSERSVAYQPWIWTAGNHEIDYAPDIGEYQPFVPFTNRYPTPHEASGSGDPLWYAIKRASAHIIVLSSYSGFVKYSPQYKWFTSELEKVNRSETPWLIVLVHAPLYNSYEAHYMEGEAMRAIFEPYFVYYKVDIVFSGHVHSYERSERVSNVAYNIVNAKCTPVSDESAPVYITIGDGGNSEGLASEMTQPQPSYSAFREASFGHGIFDIKNRTHAHFSWHRNQDGASVEADSLWLLNRYWAS

SEQ ID NO: 37072 - protein, 86 aa, Brassica napus
MKIQCDVCENAPATVICCADEAALCPKCDVEIHAANKLASKHQRLHLDSLITKFPRCDICQEKAAFIFCVEDRALLCKDCDESIHV

SEQ ID NO: 37073 - protein, 534 aa, Pirellula sp. 1
MQLSLTRRCVCEVIGTYCLVLIGCGAMVVDNQTGMLTHVGVATVWGLIVMTMIYSIGDLSGAHMNPAVSIAFASVGRFPIVDAAAYVVAQCVGALLAAGSLGIVFGVDDVKLGATMASLPTGSAWAVEFMMTTILMWVVLGVSTGAKEKSITAGLAVGATIAMEAFVAGPLTKASMNPARSLGPAVMSSHYNLLWLYLTAPIVGAIAGGCLYRFVRGNDELDTEEGSMAKKISALVLFAFLIGACGSTSMAEEGSSLLRPNDRVAVIGGTFVERMQPRDELEAALQTQRPDWKLSFRNLGWSGDTVSAIARKRFDNIEAGRARRLADIDAADPTVALIWYGQSEAGKFAEDSERIQTDLMRLVDDLKQRQTRVILLTPVAMPGDRRPNYESGLEAFEQMLRNVARAQSLALVELNWKPSDQQLTDDRMLPNNVGYRELAHLLATALLNESVTGDDATSNLAVTRELTESPERELLLEAIARKNEFFFHRYRPQNETYLFLFRKHEQGNNAVELEQFDPIIQEADQAIWDAAGRQ

SEQ ID NO: 37074 - protein, 115 aa, Zea mays
MKTRSQTSPKPLKTVAMAPRPSSTKRKPRPKPAGKGDPRAPKKPPTAFFYFMEDFRKIYKQEKPSVKSMQEIGKACGEKWNTMTFEEKVKYYDIATEKRAEFEKAMIEYNKKKES

SEQ ID NO: 37075 - protein, 315 aa, Pyrobaculum aerophilum str. IM2
MTNLSDIGVISLVYIFLNTPPDFQMDLSGLVERASRSVVGVITRQLDLFQGDFGFGTAFAVDSGVFATAFHVVASAEEVALVTPEGDKARGQVIAADAAEDVALIYAELKAPPLPMGSALKLKVGQGVVAIGYPLALLDKPTATFGIVSAVGRTLRAGDRVFEFLIQTDAAINPGNSGGPLINMEGEAVGVNSAIIAGAQGLGFAVPIDIVKIMLEMIRKYGRYVRPALGIYVTALNKAVASIYGIPLDRGLLVVEVLPGSPAEDLGLERGDVILKVDGRAVTNVFELRLRVAEAVISQRRPVFEIWRRGRVLEL

SEQ ID NO: 37076 - protein, 158 aa, Staphylococcus warneri
MEIVYVAGGCLWGVQAFFKTIPGIVSTEAGRANGITSNLNGEYDGYAECVKLTFDPDSLTIRNIMSYLFEVIDPYSLNQQGQDIGEKYRTGLYSENTKHLNEAQTFINEREDRAHIVVEVLPLSYYVKSAPEHQDRLENYPEDHHLCHIPMHMLNKYK

SEQ ID NO: 37077 - protein, 364 aa, Zea mays
MGSTAGDVAAVVDEEACMYAMQLASSSILPMTLKNAIELGLLEVLQKEAGGGKAALAPEEVVARMPAAPSDPAAAAAMVDRMLRLLASYDVVRCQMEDRDGRYERRYSAAPVCKWLTPNEDGVSMAALALMNQDKVLMESWYYLKDAVLDGGIPFNKAYGMTAFEYHGTDARFNRVFNEGMKNHSVIITKKLLDFYTGFEGVSTLVDVGGGVGATLHAITSRHPHISGVNFDLPHVISEAPPFPGVRHVGGDMFASVPAGDAILMKWILHDWSDAHCATLLKNCYDALPENGKVIVVECVLPVNTEATPKAQGVFHVDMIMLAHNPGGKERYEREFRELAKGAGFSGFKATYIYANAWAIEFIK

SEQ ID NO: 37078 - protein, 120 aa, Ashbya gossypii ATCC 10895
MSSFKSEYPFEKRKAESERICSQFENRVPVICERAEKSDIPEVDRRKYLVPADLTVGQFVYVIRRRIKLPAEKAIFIFVNDTLPPTAALMFAVYQEHKDKDGFLYVKYSGENTFGSEENQ

SEQ ID NO: 37079 - protein, 343 aa, Pseudomonas syringae pv. syringae B728a
MKKLLPTSTAGSLPKPSWLAQPETLWSPWKLQGEALVEGKQDALRLSLQEQQLANIDIVSDGEQTRQHFVTTFIEHLDGVDFEQRETVRIRDRYDASVPTVVGAVARRAPVFVEDAKFLRQQTRQPIKWALPGPMTMIDTLYDAHYRNREKLAWEFAKILNQEAKELEAAGVDIIQFDEPAFNVFFDEVNDWGVATLERAVEGLKCETAVHICYGYGIKANTDWKKTLGSEWRQYEEAFPRLQNSSIDIISLECHNSRVPMDLLELIRGKKVMVGAIDVASHTIETPEEVANTLRRALQFVDADKLYPCTNCGMAPLPRHVASGKLRALSAGADIVRKELLSQ

SEQ ID NO: 37080 - protein, 444 aa, Symbiobacterium thermophilum IAM 14863
MAQMRRPYRPALLWFALPPAAGVTVALAYAASGRLEAALARGPRALDLAVWLALLAALLIPPVYGYREASGLARTAERRADAAHREARRAAQERLDRLLAEKAQMDLILQHMADGILLLDERRRIVLVNPAAERMLGVSRHEALGRDHLEVTHHFELDERLARVLATGRPEALEIRRAHPQEQILEARLALAPSGGERGVLVMLRDITRSRQLEQMRTEFVANVTHELRTPLTSIQGFAETLLEGALDEPETARHFVEIMLRESRHLGALIDELLDLSRVESGKFRMQRRPTVPAELIAATAARFAQKAERAGVQLVTEAPDGLPLINGDPDRLVQVLSNLVENAIKYTPAGGRITLSARRDGDGVRIAVADTGAGIPQADLGRIFERFYRVDKARSRATGGTGLGLAIAKHIVEAHGGTIGVESEVGKGSTFTVILPALTGPE

SEQ ID NO: 37081 - protein, 235 aa, Symbiobacterium thermophilum IAM 14863
MFPVPERILVVDDEPSILELVAYNLRRAGFEVLTADNGEDGLRIAREEEIDLVILDVMLPGIDGFEVLRALRRHSELPVLMLTARGEEIDRVVGFEIGADDYVTKPFSPRELTGRVKAILRRARRSAEPQDQDTLVLGPLTINFASYEVLRDGRRVDLTPTEFQILGVLARSPGRVFTRDELVDRVMGPDFYGDVRTVDVHIRHLRAKLEENPSEPRLIETVRGVGYRFAGPRRR

SEQ ID NO: 37082 - protein, 376 aa, Arabidopsis thaliana
  misc_feature (19)..(19): Xaa can be any naturally occurring amino acid
  misc_feature (149)..(149): Xaa can be any naturally occurring amino acid
  misc_feature (157)..(157): Xaa can be any naturally occurring amino acid
  misc_feature (166)..(166): Xaa can be any naturally occurring amino acid
  misc_feature (223)..(223): Xaa can be any naturally occurring amino acid
  unsure (1)..(376): unsure at all Xaa locations
MGYLFEETLSSNPKTPIVXVDDDNELGLMAVRLANAAAFPMVLKAALELGVFDTLYAEASRTDSFLSPYEIASKLPTTPRNPEAPVLLDRMLRLLASYSMVKCCKVLLGKGERVYRAEPICRFFLKNNIQDIGSLASQVIVNFDSVFLXIAWAQLKXLVLEGGDAXDLAHGGMKLFDYMGTDERFSKLFNQTGFTIAVVKKALEVYQGFKGVKVLVDVGGGVXGNTLGVVTSKYPNIKGINFDLTCALAQAPSYPGVEHVAGDMFVDVPTGDAMILKRILHDWTDEDCVKILKNCWKSLPENGKVVVIELVTPDEAENGDINANIAFDMDMLMFTQCSGGKERSRAEFEALAAASGFTHCKFVCQAYHCWIIEFCK

SEQ ID NO: 37083 - protein, 121 aa, Blumeria graminis f. sp. hordei
MTVLDALKGALRTALMHDGLARGLREASKALDRREAHMCVLNEACEEEAYKKLIVALCSEHKIPLIKVPDGKQLGEWAGLCVLDREGNARKVVNCSCVVVKNWGEESSERMMLLNYFQTEQ

SEQ ID NO: 37084 - protein, 381 aa, Agrobacterium tumefaciens str. C58
MNIAALSPYEAKLAGLSRKSRLRALAPREGIDFTSNDYLGLAEAPRLKAAIAHAIGKGVPVGAGGSRLLRGNHPEHEALESEAAAFFGAEKAIYFGSGFAANVALFSTLPLRDDIVLHDALIHASVHDGIAAGKAKAVAVPHNEVEAFQREIIRWRQAGGSGRPWIAVESLYSMDGDCAPLAALADLAERHGGFLVVDEAHATGVFGPGGRGLAAQLEGRSNVLALHTCGKALGASGALLSLPAVLADYLVNRARGFIYSTAPSPLMAAAVREALRIVADEPSRRSRLAELVGFAGEELQSQLGVTPSGSQILPVMIGDNARSLKIAARLSQGGFDVRAIRPPTVPEGTGRLRIAITLNVDESQIAAMVGLLAVSMREEAA

SEQ ID NO: 37085 - protein, 423 aa, Haemophilus influenzae Rd KW20
MNLDLNQLVKWHREFHRFPEIGWSEFWTTSRIADYLEDLDCFEIFLGKQIINPDFVRGRKQAVVDKGLANAKAYGANEKWLEKMEGYTGCVALFDSGKPGKTIALRFDIDCVNVTETRSPEHIPNKEGFASINDGFMHACGHDSHITIGLGVALWIAQNKDKLTGKVKIVFQPAEEGVRGAAAIAQSGIIDDADYFASSHISFCANTGTVIANPRNFLSTTKIDIRYKGKPAHAGAAPHLGRNALLAAAHTVTQLHGIARHGKGMTRINVGVLKAGEGRNVIPSSAELQLEVRGENKAINEYMTEQVMQIAKGISISFNVAYETEIVGEAVDMNNDVELIKLIEEISLEQPQINNVNSDYAFNASEDATILGRRVQEHGGKAIYFILGADRTAGHHEAEFDFDENQLLTGVNIYTSLVQKLLS

SEQ ID NO: 37086 - protein, 192 aa, Triticum aestivum
  misc_feature (157)..(157): Xaa can be any naturally occurring amino acid
  misc_feature (176)..(176): Xaa can be any naturally occurring amino acid
  unsure (1)..(192): unsure at all Xaa locations
PFLDKEFINVAMSMDPEWKMYDKNLGRIEKWVMRKAFDDEENPYLPKHILYRQKEQFSDGVGYNWIDGLKAFTEQQVTDEMMSNAAQTFPYNTPVNKEAYYYRMIFERLFPQDSARETVPWGPSIACSTPAAIEWVEQWKASNDPSGRFISSHDSAXTTPAAVSWRWWPTAATAPXNGTVNGGNDVAVAIAV

SEQ ID NO: 37087 - protein, 105 aa, Zea mays
  misc_feature (52)..(52): Xaa can be any naturally occurring amino acid
  misc_feature (88)..(88): Xaa can be any naturally occurring amino acid
  unsure (1)..(105): unsure at all Xaa locations
IRLEERYIASELCEALCPGQAPAIEAEERGDGTLRTTSIEFAMTRCMNCGFXREASPGYALDEGPNSECRPETHEELLSTRRIVEKAXRWETEIAHNLRPESLYR

SEQ ID NO: 37088 - protein, 385 aa, Oryza sativa
MGEQQQQVERQPDLPPGFRFHPTDEEIITFYLAPKVVDSRGFCVAAIGEVDLNKCEPWDLPGKAKMNGEKEWYFYCQKDRKYPTGMRTNRATEAGYWKATGKDKEIFRNHHMLIGMKKTLVFYKGRAPKGDKTNWVMHEYRLADASPPQPPPPPSSAEPPRQDDWAVCRIFHKSSGIKKPVQVPMQMPMQMQMPVAHQVPAANYQQQMAMASASIIQVPMQMQMPSMSDQLQMLDDFSTGSLMAPPPPPPSYSTLPGFPLQINGGAQQFVGNPSMYYQQQQQQQQQQMDMAAGGFVVSEPSSLVVSPQDAAEQELRRRHLVGGMQHGRYHLEVLIHTYIHTCMRRSASVMTEGGGLISYTPFLCICIMAFALPLASCVIDVSEIC

SEQ ID NO: 37089 - protein, 229 aa, Zea mays
MAVSFANLSSEAGLKKLDEYLLTRSYITGYQASKDDLAVYTSFSSAPSSKYINVARWFNHIDALVRLSGITAEGQGVKVESSAVPSAPTPDVAEAQAPVAEEDDDDDVDLFGEETEDEKKAAEERAAAAKASGKKKESGKSSVLLDVKPWDDETDMAKLEEAVRSVQMEGLLWGASKLVPVGYGIKKLQIMMTIVDDLVSVDTLIEDYLCAEPVNEYVQSCDIVAFNKI

SEQ ID NO: 37090 - protein, 409 aa, Rhodobacter sphaeroides 2.4.1
MRRVVITGIGIVSPIGNNAAEVEASLRAGRSGISFSEDYAHHGFRSQIHGMPDLVLEDHVDKRDLRFMGAGAAYNFIAMEQAIKDSGLEATEVSNPRTGLVMGSGGPSTSNFFQAHKIVIEKGSPKRMGPFMVTRCMSSTNSACLATPFKIKGVNYSITSACSTSAHCIGNGTELIQMGKQDIVFAGGGEELDWTLSCLFDAMGAMSSKYNDAPETASRPFDATRDGFVIAGGGGVVVLEELEHALARGAKIYAEVTGYGATSDGADMVAPSGEGGERSMRLALGTLPEGRRVDYINAHGTSTPAGDVTEVRAIRRIFGEGKVPPISSTKSLTGHSLGATGVHEAIYSILMMQGDFIAASANVTQLDPEIQPDEIATTLREGVEIDSVLSNSFGFGGTNASLLLSKFNN

SEQ ID NO: 37091 - protein, 888 aa, Candida albicans SC5314
MAPQQVNAFSANGSIPSPKEFEGKGKLKLSGRILNVMTSLPLQIISDYDNKTGQYYWDVETVRGNSALYSSQHFLAENKEWETHLIAWTGELINKKKDTSSLTADTLQDDPLYLDEEDKSKIEKKLCDASGTPNIHPVWLLRRDQGRWRKYAENVLWPVFHYIQGQPSDGKAETDAWHDYVKFNEAYLNKIKSVYKPGDIIWIHDYYLLLLPQLLRMEFPNAYIGFFLHVPFPSSEYFRCLSKRSQLLDGMLGADKIGFQSDSFQRHFISCCARVLGCEVNRDSVSAYGTTISVETLPIGIDTEKIEHDAFSSELGVEEKVQALKQVYKGKKLIVGRDRLDKVRGVIQKLEGFEIFLDMYPEWRETVVLIQVSSPGYSHSANVETRVTEIISRINSKYGNLNHTPVLHYQMRVAKEEYLALLRVADLALITSVRDGMNTTSLEFVICQKYNNSPLILSEFTGTATVLKDAIMVNPWDSVGVAKTINDALMLSTKEKVSLESKLYEKVLSNTVQNWTSTFICDILSHSIVTHSNSYTPALNRPLLLNNYKESQRRLFLFDYDGTLTPIVQDPAAAIPSDKLNRILDVLSSDPKNQIWIISGRDQAFLEKWMGNKNVGLSAEHGCFMKDIGSKEWVNLAASFDMSWQEKVDDIFKYYTEKTPGSNIERKKVALTWHYRRADPDLGNFQAEKCMKELNDTVAKEYDVEVMAGKANIEVRPKFVNKGEIVKRLVLHPHGAKQEKHPTGHCTKDIPIEELPDFMLCLGDDLTDEDMFNSLNEINKKWKGDNRPTNKFGSYGVYPVAVGPASKKTVAIAHLNEPRQVLETLGLLAGLVSIFESAGTVDLDDRGHLANSVSSERSKHAVSKAVSLRKKASQEKEIVKEDPTNGAK

SEQ ID NO: 37092 - protein, 163 aa, Arabidopsis thaliana
HVPSMYPSPNVSAHIFMGLMVNPPKPGDISYDQFARESKGILESLRKRARLMTDGFSSCKNVVCNFTEGAMYSFPQIRLPTGALQAAKQAGKVPDVFYCLKLLEATGISTVPGSGFGQKEGVFHLRTTILPAEDEMPEIMDSFKKFNDEFMTQYDNNFGYSKM

SEQ ID NO: 37093 - protein, 338 aa, Yersinia pestis biovar Medievalis str. 91001
MKYDGYNWLECVMKPSIVLYKSIPTDLHQRLAQHFTVNSFDGLTPDNQPELLAALQQAEGLIGSGGKIDQDFLQLAPNLRAASTISVGYDNFDVEALSQRGIALMHTPTVLTETVADTMMALMLSTARRVVELAERVKAGEWQESIGDDWFGVDVHHKTIGILGMGRIGMALAQRAHFGFSMPVLYTSRRPHEAAEQRFGARHCSLDTLLAEADFLCITLPMTEQTYHMIGREQLAKMKSSAILINAGRGPVVDEQALIAALQDGTIHAAGLDVFEQEPLPVDSPLLTLRNVVAVPHIGSATHETRYNMAACAVDNLINALTGTVKENCVNPQVLITH

SEQ ID NO: 37094 - protein, 410 aa, Zea mays
  misc_feature (22)..(22): Xaa can be any naturally occurring amino acid
  misc_feature (31)..(31): Xaa can be any naturally occurring amino acid
  misc_feature (369)..(369): Xaa can be any naturally occurring amino acid
  misc_feature (378)..(378): Xaa can be any naturally occurring amino acid
  unsure (1)..(410): unsure at all Xaa locations
MNRRAPLGDIGNLVSVRPAEGXLSCRSRSIXPITRSFGAQLVKNVQANAAIKNAAILPARHAPRQERKAPAKQPPPEDVIVLSSDSEQSRTQLESSASSVRSRKKVINTLSSVLSARSKAACGITDKRRQVVVIEDIDKLDVNNELAVVEYIEDIYTFYKIAQHDRRPCDYIDTQVEINPKMRAILADWIIEVHHKFALMPETLYLTMYIIDQYLSLQPVLRRELQLVGVSAMLIACKYEEIWAPEVNDFILISDSAYSREQILSMEKGILNSLEWNLTVPTVYMFLVRFLKAATLGNKVEKEMENMVFFFAELALMQYGLVTRLPSLVAASVVYAARLTLKRAPLWTDTLKHHTGFRESETELIECTXCWSAHTRPXADSKLRSVYKKYSSEQFGGVALRPPAAAVEIK

SEQ ID NO: 37095 - protein, 964 aa, Solanum tuberosum
MATRNLEKLASIDAQLRLLVPTKVSEDDKLVEYDALLLDRFLDILEGLHGEGIKETVQECYELSAEYENTRDKKKLEELGSVLTSLDPGDSIVVAKSISHMLNMANLAEEVQIANSGREKSKKGDFSDESNLMTESDIEETLKRLVVDLKKSPREVFEALKNQTVDLVFTAHPTQATRRSLLQKHARIRNCLAQLYAKDITPDDKEELDEALQREIQAAFRTDEIRRTPPTPQDEMRAGMNYFHETIWNGVPKFLRRVDTALKNIGINERIPYNAPLIQFSSWMGGDRDGNPRVTPEVTRDVCLLARMMAANLYYSQIDDLMFELSMWRCNDELRDRADEQHRSLKRDEKHYIEFWKQVPPSEPYRVIIGDVRDKLYHTRERTRQLLSNGFSEIPEEATYTNIEQFLEPLELCYRSLCACGDRPIADGSLLDFLRQVSTFGLSLVRLDIRQESDRHTDVLDAITQHLEIGSYRQWSEERRQEWLLSELSGKRPLFGPDLPKTEEIADVLNTFHVISELPSDCFGAYIISMATAPSDVLAVELLQRECHVKQPLRVVPLFEKLDDLEAAPAAIARLFSIEWYKNRINGKQEVMIGYSDSGKDAGRLSAAWQLYKAQEELIKVSKQYGVKLIMFHGRGGTVGRGGGPSHLAILSQPPDTIQGSLRVTVQGEVIEQSFGEEHLCFRTLQRFTSATLEHGMYPPFPPKPEWRALLDEISVVATEKYRSIVFKEPRFVEYFRLATPELEYGRMNIGSRPSKRKPSGGIETLRAIPWIFAWTQTRFHLPVWLGFGAAFKYALNKDKKNLNMLQDMHKKWPFFRVTADLIEMVFAKGDPGIAALYDKLLVSEDLWSFGELLRSDYEETKSLLLQVAGHKELLEGDPCLKQRLRLRDSYITTLNVCQAYTLKRIRDPTYNVTLRPHITKEYIESKPAAELVCLNPESEYAPGLEDTLILTMKGIAAGMQNTG

SEQ ID NO: 37096 - protein, 477 aa, Pseudomonas aeruginosa PAO1
MTADKKAKILATLGPATRSRDDIRALVEAGANLLRLNFSHGDYADHAQRFAWVREVEAELNYPIGVLMDLQGPKLRVGRFAAGAVQLQRGQTFTLDLSDAPGDERRVNLPHPEIIHALEPGMSLLLDDGKIRLEVVNCHSDAIETRVAVGGELSDRKGVNVPEAVLQLSPLTDKDRRDLAFGLELGVDWVALSFVQRPEDIDEARGLIGDKAFLMAKIEKPSAVSAIEAIAERADAIMVARGDLGVEVPAESVPGIQKRIVQVCRQLGKPVVVATQMLESMRFSPAPTRAEVTDVATAVGAGADAVMLSAETASGQYPREAVEMMAKIVRQVEAEPDYHVQLEVNRPQPDATVSDAISCAIRRVSRILPVAVLVNYTESGNSTLRAARERPKAPILSLTPNLRTARRLTVAWGVYSVVNEQLAHVDEICSTALDIALAQRMARRGDTVVVTAGVPFGRPGSTNMLRIETVAPPLGDL

SEQ ID NO: 37097 - protein, 313 aa, Ashbya gossypii ATCC 10895
MSTKATLKASTDTVTLNTGAKIPLFGLGTWQSTDDDASSAVAAALKHGYKHIDTASFYKNEELVGKAVKESGIPREELFITTKVWNDQQRDPAGALDLSLKKLGTEYVDLLLMHWPVPFKEPENSTLDAYKVPRGPDGKVTRDEEWDFVKTWHLMQKLLGTGKVKAIGVSNFSINNLEELLNAEGTTVVPAVNQVELHIRLPQLELVEYCQKKGIVVEAYSPLGSSSAPLLKDATVNKVAEKYGVTPAHVLLNYVANRGIVVLPKSVKESRIISNFEYFKMDEEDIKLLNDIHKKEGVQRFVDPDFSPFPLFQ

SEQ ID NO: 37098 - protein, 164 aa, Vitis amurensis
GEGGFGRVYRGTLPNSQTPIAVKRISHDSKQGMREFVSEIASIGRLRHRNLVQLLGWCRRYGNLMLVYDFMENGSLDKFLFDEPKLILSWEQRFNIIKGVASGLLYLHEGYEQVVIHRDIKASNVLLDNELNGRVGDFGLARLYEHGSNPGTTRVVATLVTSRQ

SEQ ID NO: 37099 - protein, 94 aa, Clostridium perfringens
MSIKPLGDRVVIKRLEAEETTKSGIIVTGTAKERPQEAEVVAVGPGAIVDGKRTEMEVKIGDKVLYSKYAGTEVKFEGEEYTILRQDDILAIVE

SEQ ID NO: 37100 - protein, 228 aa, Schizosaccharomyces pombe
DRCGLLLERHAKIATDGQKPFLKKDSDFKEVPSGDIDLETAISLIKPTVLLGCSGQPGKFTEKAIREMSKHVKHPIIFPISNPTTLMEAKPVQIDEWSNGKALMATGSPLPPLTRNGKEYVISQCNNALLYPALGVACVLSRCKLLSDGMLKAASDALATVPRSLFVADEALLPDLDNAREISRHIVFAVLKQAISEGMSTVDLPKDDAKLKEWIIEREWNPEYRNFV

SEQ ID NO: 37101 - protein, 539 aa, Clostridium perfringens
MAKTLLFGEEARRSMQAGVDKLANTVKVTLGPKGRNVILDKKFGSPLITNDGVTIAREIELEDAYENMGAQLVKEVATKTNDVAGDGTTTATLLAQAIIREGLKNVTAGANPILIRNGIKTAVEKAVEEIQKISKPVNGKEDIARVAAISAADEKIGKLIADAMEKVGNEGVITVEESKSMGTELDVVEGMQFDRGYVSAYMVTDTEKMEAVLDNPLVLITDKKISNIQDLLPLLEQIVQAGKKLLIIADDIEGEAMTTLVVNKLRGTFTCVGVKAPGFGDRRKEMLQDIATLTGGVVISDEVGGDLKEATLDMLGEAESVKVTKESTTIVNGRGNSEEIKNRINQIKLQLEATTSEFDKEKLQERLAKLAGGVAVVKVGAATETELKESKLRIEDALAATKAAVEEGIVPGGGTAYVNVINEVAKLTSDIQDEQVGINIIVRSLEEPMRQIAHNAGLEGSVIIEKVKNSDAGVGFDALRGEYKDMIKAGIVDPTKVTRSALQNAASVASTFLTTEAAVADIPEKEMPQGAGMGMDGMY

SEQ ID NO: 37102 - protein, 644 aa, Deinococcus radiodurans R1
MLTPDLAARLRLAFDDDRDAETFRLRLERYGPELADNLRAVYGNHADALIGELLEVMLHAYHARPADLKRLDEARLLRPDWLQGPEMVGYVAYVDRFAGTLRGVGERLEYLEGLGVTYLHLLPLLRPRDGENDGGYAVQDYRSVRPDLGTIDDLSALARELRGRGISLVLDLVLNHVAEEHEWAVRATAGEAAYRDYFHIFPDRTQPDAYERTLPEIFPDFAPGNFTWNGEAGGWVWTTFNRSQWDVNWGNPAVFREYLDLILTLANRGVEVFRLDAIAFLWKRLGTDCQNQPEVHRLTHALRAATRIVAPAVAFKAEAIVAPGDLIHYLGSRDHHGRVSDMAYHNSLMVQLWSSLASRDTRLLTAALAAFPPKPTNTTWGVYVRCHDDIGWAIADEDAARVGLSGPAHRHFLSDFYSGEFPGSFARGLVFQHHPQTGDRRISGTAASLAGLDLALETGDAERVNDALARLLLLHAVMLGFGGVPLLYMGDELALLNDTDFAAVPAHAADNRWVHRPQMDWELVASAQADAATGQPVTPAGRMFAGLRHLLAVRRRTPHLHASTESRPLPSPDPCVLLLRREHPTGVLLQVYNFSEHHITFPTWPLQEQLGAVAHDLLGESQFHLGGPDLALEPYRALWLVAGG

SEQ ID NO: 37103 - protein, 213 aa, Chlamydomonas reinhardtii
MSKISNDVLRESVSALVEGAKTKPRKFQETVELQIGLKNYDPQKDKRFSGSVRLPFVPRPRMRVRAGDVKHCEQAGAIGVDAKGVEDLKKLNKNKKLVKKLAQAYHAFLASDSVIKQIPRLLGPGLNKAGKFPAPINKNLEEMVLDTKCSIKFQLKKVLCMGVAVANVGMTEGEIRTNIMYAINFLVSLLKKNWQNVRCLYIKSTMGKPIRIY

SEQ ID NO: 37104 - protein, 164 aa, Vitis amurensis
GQGVFGRVYRGVLPTSKLEIAVKKISHESRQGMKEFVAEIVSIGRLRHRNIVSLLGYCRRKGELLLVYDYMPNGSLDKYLYDQPKVSLNWSQRFRVLKGVASGLSYLHGEWEQVVVHRDVKASNVLLDGELNGRLGDFGLARLYDHGTDPQTTHVVGTLGYIAR

SEQ ID NO: 37105 - protein, 413 aa, Wolinella succinogenes
MRRVVVTGIGMINALGNNRGDSFKAIVEGKCGIKRISCFDVEDFPVKIAAEITDFDPSLVMDPKEVKKADRFIQLGIKAANEAMHDSGLLGSDHRLLPEIDGDRFGISSASGIGGLQNIEKNSVINAERGPKRISPFFIPSSLVNMLGGFVSIDYGVKGPNLSSVTACAAGTHAIIEAAKTIMLDGADRMLVVASEAAICAVGIGGFAAMKALSDLNDEPLKASRPFDANRNGFVMGEGAASLVLEEYEAAKKRGATIYGELIGFGESGDANHITTPAPEGEGALRAMRAALRMANTSIDYVNAHGTSTKYNDMYETMALKSAFGSKEAVPPVSSTKGQTGHCLGAAGAIEAVISLMSMQEGILPPTINYETPDPDCDLDYIPNTAREAKPTTVMSNSFGFGGTNGVVIFKKL

SEQ ID NO: 37106 - protein, 236 aa, Streptomyces avermitilis MA-4680
MTITTERGSQQYAYTDLPRLMGLMTGDEKHGPAATSTLDALWVLYDRVLRVAPERVDEPGRDRFLLSKGHGPMAYYAVLAAKGFLPVDWLPDFGSYDSPLGHHPDRVLVPGAEIGSGSLGHGLPIAVGTALGLRAQGLGEPRVWVLTGDAELDEGSNHEAIAYAGAAGLERLHTIVIDNSSATHALTGGIAARFEAAGWATTTVDGHDHEALHAAFTAPHEGRPLAVVARVRPKDA

SEQ ID NO: 37107 - protein, 416 aa, Symbiobacterium thermophilum IAM 14863
MVDMAFVGRVGAYAVAAVGVATQPLWLTFGLAGALGVGIIAVVSRLAGARDDEGVERAASTASWLGLGLALLLGAGLYFGAPWIVKVMGAPPDVYPHGVIYLQVLVPGLIGHYWFSAMSAALRAVGETRIPMLLALVANAVNVVLDWLLIFGNLGFPALGLAGAALASSVARFTEAAGLLVVLLVRSGPVALRWRTLWRFSPDLSARIVRVAVPSAVERSASTLSLVVFAILINRLGTVAIATQQIAYVVEDLIWLVAFGLGTSCATLIGQSLGAQDPERARLAMLEGLRVGAAFTLTVAASFLLMPGVYMRIFTTDAQVIALGTMALRVAAAADIPMGLVLILSGGLQGAGDTRAAAVITLVGSWGVRLTLAYLMIDVLGWGLYGAWTAAACDWALRLALFWNRFARGRWKEMAV

SEQ ID NO: 37108 - protein, 102 aa, Chlamydophila caviae
MSDQATTLRIKPLGDRILVKREEEDSTARGGIILPDTAKKKQDRAEVLVLGTGKRDKDGNVLPFEVTVGDTVLIDKYAGQELTVDGEEYVIVQESEVMAVLK

SEQ ID NO: 37109 - protein, 398 aa, Streptomyces avermitilis MA-4680
MMFDSVRDDLRTTLDEIRTAGLHKPERVIGTPQSATVSVTAGGRPGEVLNFCANNYLGLADHPEVIAAAHEALDRWGYGMASVRFICGTQEVHKELERRLSAFLGQEDTILYSSCFDANGGVFETLLGAEDAVISDALNHASIIDGIRLSKARRFRYANRDMADLERQLKEASGARRRLIVTDGVFSMDGYVAPLREICDLADRYDAMVMVDDSHAVGFVGPGGRGTPELHGVMDRVDIITGTLGKALGGASGGYVAARAEIVALLRQRSRPYLFSNTLAPVIAAASLKVLDLLESADDLRVRLAENTALFRSRMTEEGFDILPGDHAIAPVMIGDAAVAGRLAELLLERGVYVIGFSYPVVPQGQARIRVQLSAAHSTDDVNRAVDAFVSARAELEA

SEQ ID NO: 37110 - protein, 544 aa, Chlamydophila caviae
MAAKNIKYNEDARKKIHKGVKTLAEAVKVTLGPKGRHVVIDKSFGSPQVTKDGVTVAKEIELEDKHENMGAQMVKEVASKTADKAGDGTTTATVLAEAIYSEGLRNVTAGANPMDLKRGIDKAVKVVVDEIKKISKPVQHHKEIAQVATISANNDAEIGNLIAEAMEKVGKNGSITVEEAKGFETVLDVVEGMNFNRGYLSSYFSTNPETQECVLEEALVLIYDKKISGIKDFLPVLQQVAESGRPLLIIAEDIEGEALATLVVNRLRAGFRVCAVKAPGFGDRRKAMLEDIAILTGGQLISEELGMKLENTTLAMLGKAKKVIVSKEDTTIVEGLGSKEDIESRCESIKKQIEDSTSDYDKEKLQERLAKLSGGVAVIRVGAATEIEMKEKKDRVDDAQHATLAAVEEGILPGGGTALVRCIPTLEAFIPILTNEDEQIGARIVLKALSAPLKQIAANAGKEGAIICQQVLSRSSSEGYDALRDAYTDMIEAGILDPTKVTRCALESAASVAGLLLTTEALIADIPEEKSSSAPAMPGAGMDY

SEQ ID NO: 37111 - protein, 574 aa, Lotus corniculatus var. japonicus
MEGKGYTLDGTVDLAGRPVLSSLTGKQKACTYILVYRVLERFAYYGVGANLVNFMTTQLNKDVVSSITSFNNWSGLATLTPILGAYIADTYTGRFWTITFSLLIYAIGLVLLVLTTTLKSLRPACENGICREASNLQVALFYTSLYTIAVGSGAVKPNMSTFGADQFDDFRHEEKEQKVSFFNWWAFNGACGSLMATLFVVYIQEKNGWGLAYSLSAIGFLLSSIIFFWGSPVYRHKSRQARSPSMNFIRVPLVAFRNRKLQLPCNPSELHEFQLNYYISSGARKIHHTSHFSFLDRAAIRESNTDLSNPPCTVTQVEGTKLVLGMFQIWLLMLIPTNCWALESTIFVRQGTTMDRTLGPKFRLPAASLWCFIVLTTLICLPIYDHYFIPFMRRRTGNHRGIKLLQRVGIGMAIQVIAMAVTYAVETQRMSVIKKHHIAGPEETVPMSIFWLLPQNIILGVSFAFLATGMLEFFYDQSPEEMKGLGTTLCTSCVAAGSYINTFLVTMIDKLNWIGNNLNDSQSRITIMPFFSVISALNFGVFLWVSSGYIYKKENTSTTEVHDIEMSAEKTVKY

SEQ ID NO: 37112 - protein, 362 aa, Xanthomonas campestris pv. vesicatoria str. 85-10
MSVAAQFQIDYLQYMDADGQWVRDDLPADAANPQQLLALFKRMLFVRTFDTKSVALQRTGKLGTYAACIGHEATHVGIGASMRSGDVFAPSYREYGTMFERGVRPRDVLLYWGGDERGSDYPRDADAAIDFPICVPISTQCLHAAGSALSFKLQGKPQVAVACCGDGGSSKTDFYAALNSAGAYKLPLILCVINNGWAISVPRSAQTGAQTLAQKGLAGGLQCLQVDGNDLVAVLEAMRQARVRALAGDGGTVIEFLTYRLSDHTTADDARRYRGEEEVKQGWAREPLLRLRRYLTAQGLWDAAQEDAWKAECSARVDEEVNAYLNTPVQPVEAMFDYLYGDPPAELLAQRAEVMALESRHG

SEQ ID NO: 37113 - protein, 138 aa, Eucalyptus globulus subsp. globulus
MAKSIPRTGSRRNVRSGSRKSTRRIPKGVIHVQASFNNTIVTVTDVRGRVISWSSAGTCGFNGTRRGTPFAAQTAAGNAIRTVVDQGMQRAEVMIKGPGLGRDAALRAIRRSGILLSFVRDVTPMPHNGCRPPKKRRV

SEQ ID NO: 37114 - protein, 234 aa, Mesorhizobium sp. BNC1
MKAYIAEVFGTFCLVFIGCGSVVLGGFGPLIPTGGALGIAVAFGVAVLAMAYAIGPVSGAHLNPAVTLGAFLAGRLPAKDVAPYMIAQVAGGILGALVLWIIASGKTGGAPANLAANGWSEYTTSAAFLGEVVATFIFVMVILGATSERHTTVMAGAVIGLTLTAIHICFIAVTGTSVNPARSIGPALFSGGAAISKLWLFIVAPLIGGALAGLVYKSHALENTQADLLKKAKA

SEQ ID NO: 37115 - protein, 150 aa, Lupinus luteus
MSRRKVRDTKEETVTLGPAVSDGEHVFGVARIFASFNDTFIHVTDLSGRETLVRITGGMKVKADRDESSPYAAMLAAQDVATRCKELGITALHIKLRATGGNKTKTPGRGAQSALRALARSGMKIGRIEDVTPIPSDSTRRKSGRRGRRL

SEQ ID NO: 37116 - protein, 308 aa, Arabidopsis thaliana
MPLEAVVYPQDPFGYLSNCKDFMFHDLYSQEEFVAQDTKNNIDKLGHEQSFVEQGKEDDHQWRDYHQYPLLIPSLGEELGLTAIDVESHPPPQHRRKRRRTRNCKNKEEIENQRMTHIAVERNRRKQMNEYLAVLRSLMPSSYAQRGDQASIVGGAINYVKELEHILQSMEPKRTRTHDPKGDKTSTISLVGPFTDFFSFPQYSTKSSSDVPESSSSPAEIEVTVAESHANIKIMTKKKPRQLLKLITSLQSLRLTLLHLNVTTLHNSILYSISVRVEEGSQLNTVDDIATALNQTIRRIQEETLFSK

SEQ ID NO: 37117 - protein, 52 aa, Triticum aestivum
KKGVLILPDILANSGGVMVSYFEWVQNIEGSMWDEEKVNRELKTYMTRASNI

SEQ ID NO: 37118 - protein, 500 aa, Bacillus halodurans C-125
MKKSYGVMGGVLAVFFAIAGCSSDDHSEMDHGNNQQDEQNEGTFEDGKKVFNLEVTETHWMFNDEVMMDAWTYNGTLPGQEIRVQEGDEVVINVKNSLNVPTALHLHGFPVPNEMDGVPGVTQNAIMPGEEFTYEYQANVPGTYWYHSHQDGATQVDRGLYGVFIVEPVDPESYDTDVAIVIDEFASMGMGMGMDHSTMDHGDMEHDGNDDMSHSEMMNEMYDTMVINGKADPQIESINVVEGNRVKLRFVNAGLFTQVVSIPEHSFKITHYDGQPVNEPDVLQDTAFRIAPAERYDLEIIMDNPGAWGIQVFAEENQERLQALIPLVYEEYEDEELQTVDSISSFFDLTTYGIPKELDIGDITKEYDMLLGSDDGGDTFTINGKKFPNHEIYDVEEGDMVKFTIINDTDFDHPMHLHGDFFHVISKGGKAIQGSPVLKDTLNVRPGETYEIVFEAKNPGNWMFHCHEFHHASGGMVAEIHYEGFELPFTPDPNIPNMPE

SEQ ID NO: 37119 - protein, 163 aa, Vitis amurensis
GEGGFGRVYRGFLRERSSYIAVKRISRRSKQGMKEYASEVKIISRLRHRNLVQLMGWCHKKGELLMVYEFMPNNSLDSCLFEAKTLLRWAMRYKIAVGLALAVLYLHEEWEQCVVHRDIKSSNVMLDSDFNAKLGDFGLARFVDHGKGSQTTVLAGTLGYIAR

SEQ ID NO: 37120 - protein, 335 aa, Saccharomyces castellii
MSEPAQKKQKTTGSSLEQLKASGTVVVADTGDFASIAKFTPQDSTTNPSLILAAAKQPAYAKLIDVAVSYGKKNGKTTDEKVELAVDRLLVEFGKEILKIVPGRVSTEVDARLSFDKEATIAKALEIIKLYEDLGISRERVLIKIASTWEGIQAARELESKHKIHCNLTLLFSFSQAVACAEAKVTLISPFVGRIMDWYKAKTGETYNGRNDPGVLSVHKIYNYYKKHGYKTIVMGASFRNVDEIKNLAGVDYLTISPNLLDELLNSNDHVPRVLDVATAKKEGAEKISYIDDEATFRFSLNEDAMGTEKLAEGIRKFSADIVTLFDMIEKKVTA

SEQ ID NO: 37121 - protein, 346 aa, Sinorhizobium meliloti
MAKALVLEKKGQLSLRDIPVRRDLSPTDVLIGIRTVGVCGSDVHYYTHGKIGPFVVNEPMILGHEAAGVVLEVGSQVRHLKKGDRVCMEPGIPDLSSRSSKLGIYNVDPSVRFWATPPVHGCLTPEVVHPAAFTYRLPDHVSFAEGAMVEPFAIGVQAALRAGIRPGDVGAVMGAGPIGMMTALAALAGGCSKVYVADLAQPKLDVIGAYEGIETINVRQQAVSEALAGATGGWGADVVFECSGAAPAILALPSLARPGGTVVLVGMPVEPVPFDIVGMQAKELRIETVFRYANVYDRAIELIASGKVDLKPLISATIPFDESIAAFDRAVEARPTDVKIQIEMPA

SEQ ID NO: 37122 - protein, 270 aa, Deinococcus radiodurans R1
MTATPETATNRGVQRLHAAFARAEAEGRAAFIPFMTGGYPDAARFGEVAGDLLARADIMEVGIPYSDPLGDGPTIQRASEQALAGGTSTRRTLELVRELRQKDDTPIVIMTYINPIYAVGPAEFMRLAQEAGVDGLILPDLPPDQDLEIADLAAQHGLAVTFLIAPTSTPERVKLVAEACTGFLYAVSVTGVTGAREGAALGEVPRMLDLARQYAQRPVVVGFGVKDAATAQQVAQVADGVVVGSAFINAVAAGRDVGALADELAAGCRR

SEQ ID NO: 37123 - protein, 418 aa, Streptomyces sp.
MNRRVVITGMGVVAPGAIGIKSFWELLLSGTTATRAITTFDATPFRSRIAAECDFDPVAAGLSAEQARRLDRAGQFALVAGQEALTDSGLRIGEDSAHRVGVCVGTAVGCTQKLESEYVALSAGGANWVVDPHRGAPELYDYFVPSSLAAEVAWLAGAEGPVNIVSAGCTSGIDSIGYACELIREGTVDVMLAGGVDAPIAPITVACFDAIRVTSDHNDTPETLAPFSRSRNGFVLGEGGAIVVLEEAEAAVRRGARIYAEIGGYASRGNAYHMTGLRADGAEMAAAITAALDEARRDPSDVDYVNAHGTATRQNDRHETSAFKRSLGDHAYRVPISSVKSMIGHSLGAAGSLEVAATALAVEYGAIPPTANLHDPDPELDLDYVPLTAREKRVRHALTVGSGFGGFQSAMLLSRPER

SEQ ID NO: 37124 - protein, 447 aa, Nicotiana tabacum
MGKEKVHINIVVIGHVDSGKSTTTGHLIYLGGIDKRVIERFEKEAAEMHKRSFKYAWVLDKLKAERDRGITIDIALWKFETTKYYCTVIDRPGHRDFIKNMITGTSRACRVLIVASTTGFAQAGNLKDGQTRERLLIDSTTGNTLGVTQMICCCNKMDATTPKYSKARYDEIVKEVSSYLKKVGYNPDKIPFVPISGLEGDNMLERSTNLDWYKGPTLLDALDQINEPKRPTDKPLRLPLQDVYKIGGIGTVPVGRVETGVLKPGMVVTFGPTGLTTEVGSVEMHHEALQEALPGDNVGFNVKNVAVKDLKRGFVASNSGCPSNGCFSFTSQAIIMNHSGQIGNGYAPVLDCHTSHAVSAEILTNIARRSGQEIAKEPRFLLNGCAGFVMMIPTLPMVVARILSAYPPLERFAFRSMRQTVAVGVIKNVVKKDPTGAMVTKAAQKKK

SEQ ID NO: 37125 - protein, 264 aa, Haemophilus influenzae R2846
MDKSLKANCIGEFLGTALLIFFGVGCVAALKVAGASFGLWEISIMWGMGVALAVYATAGLSGAHLNPAVTIALWKFACFDGKKVIPYIISQILGAFFAAALVYALYRNVFIDYETVHNIVRGTQESLSLAGTFSTYPHPSLSIGGAFAVEFVITAILMALIMALTDDGNGVPRGPLAPLLIGILIAVIGGAMGPLTGFAMNPARDFGPKFFAYLAGWGELALTGGREIPYFIVPMVAPVLGALAGAWLYKKAIGGNLPCNCGCE

SEQ ID NO: 37126 - protein, 130 aa, Vitis vinifera
DSSNTGSVSEANAQFYQQEASKLRRQIRDIQNLNRHILGEALSSLNFKELKNLETRLEKGISRIRSKKNELLFAEIEYMQKREIELQNSNLFLRAQIAENERAQQQMNLMPGSQYESVPQQPYDSQNLLP

SEQ ID NO: 37127 - protein, 156 aa, Brassica napus
MSMIPSFFGNNRRGGSSFFDPFSLDVWDPFKDFPSSSSFSRENSAIVNARVDWRETPDAHVFKADLPGMKKEEVKVEIEDDSVLKISGERHVEKEDKNDTWHRVERSSGQFTRKFRLPENVKMDQVKAAMENGVLTVTVPKAEMKKPDVKSIQISG

SEQ ID NO: 37128 - protein, 398 aa, Monilinia fructicola
MREIVHLQTGQCGNQIGAAFWQTISGEHGLDGSGVYNGTSDLQLERMNVYFNEASGNKYVPRAVLVDLEPGTMDAVRAGPFGQLFRPDNFVFGQSGAGNNWAKGHYTEGAELVDQVLDVVRREAEGCDCLQGFQITHSLGGGTGAGMGTLLISKIREEFPDRMMATFSVVPSPKVSDTVVEPYNATLSVHQLVENSDETFCIDNEALYDICMRTLKLSNPSYGDLNHLVSAVMSGVTTCLRFPGQLNSDLRKLAVNMVPFPRLHFFMVGFAPLTSRGAHSFRAVTVPELTQQMYDPKNMMAASDFRNGRYLTCSAIFRGKVSMKEVEDQMRNVQNKNSSYFVEWIPNNVQTALCSIPPRGLKMSSTFVGNSTSIQELFKRVGDQFTAMFRRKAFLHWY

SEQ ID NO: 37129 - protein, 728 aa, Candida tropicalis
MSKKSNSTNNPGDPRVKKNAFVHKLYTMLNDPNLSHLIWWTTNNVEGNTFALYPGKEFANCLTRYFKHGNVASFVRQLHMYGFHKVSDPHNSSSSSSALSINHINSPYSMNIVHQHQNNAGGAHNNKDVPPIWEFKHSSGKFKKGDEKSLALIKRRSSSNSSSGSRNNSYNETLTLQNHVHPVPQQPMYQEYPIPQQNITYDPYNLNMNFQQQQPPPPPPQPFMYYNNQPQPVPPPLPPPPPLAANQQQLPTPQFVYGQPYFQYPGSIIPPQSQPQPVPQPPPQAAAPPVPSGVTQFTNFSQFPSPSPQQPISQMMNLQPSQNSASNTPQIQQPTPQHVEPPTKRQDCTPDHVKLESLSKSPHQNSAGYNATLQFRKIWDDNNGPVARQRNPSLLYDPLTTIPPTTTPQQQSKSNEGSSSESILPPPSQLNRSSSLNSVPLPLTSSQPSIMAATPPEMFRRSTTPLLHSLSHSSYNNGNTTSRLSNSIPRNSSPLALSSTTAESTPTPNIVSSSSSQPSTSSGLNIPNVTKKPSLFSSSLQERLRPSVFDIHHNHNHQSGIKSPSTIQDTYSKKNSIVSNTSSIFSNKSSISSIASTNQHGINNNRPSLSSITNSHVKEEVEEEVKREEIVIKNGKSILNNDNSKSWTPMNGNASVAQDREQRSLTESPNLKSEICVPENKKVSVNSLLKDDDNEDKTKMGAKNHHLDFNDNNEVHKSRIVTIEKEEN

SEQ ID NO: 37130 - protein, 330 aa, Agrobacterium tumefaciens str. C58
MTKFDVLTVGNAIVDIISRCDDRFLNDNAITKGAMNLIDAERAELLYSLMGPALEASGGSAGNTAAGVANFGGKAAYFGKVAEDQLGEIFQHDIRAQGVYFETKPEGTFPPTARSMIFVTEDGERSMNTYLGACVDLGPEDVEDDVVAKTKVTYFEGYLWDPPRAKDAIRECARIAHENGREVSMTLSDSFCVGRYRDEFLDLMRSGTVDIVFANKQEALSLYETEDFELALTKIAADCKIAAVTMSEEGAVILRGTERVKVEAYPVHDVVDTTGAGDLFAAGFLFGYTQDRSLEDCGKLGCLAAAAVIQQVGPRPMSSLKALGEKHGLI

SEQ ID NO: 37131 - protein, 436 aa, Kluyveromyces lactis NRRL Y-1140
MLSGKEARIVTLLVIDTTFFFIELISGYMVHSLALIADSFHMLNDIISLVIALWAVNVAKNKNPDAKYTYGWKRAEILGALVNAVFLIALCVSILIEAIQRFFQPQEITNPKLVLIVGCFGLVSNFIGLALFHSDGGHGHGHSHGGAPDLEHGEEEDDDNEHGHGHSHGHSHQTNGLDEGSDYEPETIEDMMPHSIVERTFSPKSTPVDSSYDDEDDESTGLLTEQHLNKTLAKVKKQKKSKQRSMNMHGVFLHVLGDALGNVGVIATALFIWKTDFSWRFYTDPAVSLLISLIIFSSAIPLSLKASRILLQATPSNVSADDVKHDILSLPGVVSVHDFHIWNLTESLYIASVHVEIQSNPEEFMNIAQVIRSIFHRYGIHSATVQPEFVGSGAVTEDIARRFSRIAGGGVYGSTTNLTGCTIDENAQCNSETCLQ

SEQ ID NO: 37132 - protein, 392 aa, Streptomyces avermitilis MA-4680
MTAPLMTLAWTDHVTGRQGYLVVDRLVRGVSSGGLRMRPGCTLDEVAGLARGMTMKEALHYNPEGRYIPLGGAKGGIDCDPRSPEAYGLLVRYLRAMRPYIESCWTTGEDLGLTQDLVDRAAAEAGLVSSIQAVYPLLDDEATARKRLADAFAVEVDGIGLDELVGGCGVAESLLAALDRAAVPYAGTRVAVQGLGTMGGATARFLARAGLTIVAVADVKGTIANPEGLDVEALLAARDAYGTVDRSALRPGDRELPGEAWLSVEAEVLVPAAVSYVVDTTNQRRIGARWIVEAANMPVLPEAEALLTERGITVLPDVVVNSGTNAWWWWTLFGDIDADADEAFARTRRSMRALTDLMLARAEADGTTPRAAAHAIVADRLPVIAERFGWYR

SEQ ID NO: 37133 - protein, 460 aa, Schizosaccharomyces pombe
TGALLHHTLGDGDFRTFMDMFKKVSAYSIMIDNGNDAAEKIDEALSICYKKARPVYIGIPSDAGYFKASSSNLGKRLKLEEDTNDPAVEQEVINHISEMVVNAKKPVILIDACAVRHRVVPEVHELIKLTHFPTYVTPMGKSAIDETSQFFDGVYVGSISDPEVKDRIESTDLLLSIGALKSDFNTGSFSYHLSQKNAVEFHSDHMRIRYALYPNVAMKYILRKLLKVLDASMCHSKAAPTIGYNIKPKHAEGYSSNEITHCWFWPKFSEFLKPRDVLITETGTANFGVLDCRFPKDVTAISQVLWGSIGYSVGAMFGAVLAVHDSKEPDRRTILVVGDGSLQLTITEISTCIRHNLKPIIFIINNDGYTIERLIHGLHASYNEINTKWGYQQIPKFFGAAENHFRTYCVKTPTDVEKLFSDKEFANADVIQVVELVMPMLDAPRVLVEQAKLTSKINKQ

SEQ ID NO: 37134 - protein, 164 aa, Oryza sativa (japonica cultivar-group)
MESCVPPGFRFHPTDEELVGYYLRKKVASQKIDLDVIRDVDLYRIEPWDLQEHCRIGYEEQSEWYFFSYKDRKYPTGTRTNRATMTGFWKATGRDKAVRERSRLIGMRKTLVFYKGRAPNGHKTDWIVHEYRLESDENAPPQARSPFISLSINKIDLQFLEKIN

SEQ ID NO: 37135 - protein, 198 aa, Arabidopsis thaliana
  misc_feature (40)..(40): Xaa can be any naturally occurring amino acid
  misc_feature (58)..(58): Xaa can be any naturally occurring amino acid
  misc_feature (114)..(114): Xaa can be any naturally occurring amino acid
  misc_feature (123)..(123): Xaa can be any naturally occurring amino acid
  misc_feature (127)..(127): Xaa can be any naturally occurring amino acid
  unsure (1)..(198): unsure at all Xaa locations
FYKLIIKTRLTSFFSLQAYIYALLAAIQSTTNPIQIKKLXIKNLIPNNQRIFNLLKHXIMHLMNLELFIAREEELKKKAILHKAVYKVPQMRCHSKDGCNYLEFCIGATFNSDXTTKTEPYPXKICXLITGLPANYRDPNTGLPNATRDASKAIRERFMDEHDSLRKKMQMEEASKTPVAKAHATKQKRTNTPKNNKS

SEQ ID NO: 37136 - protein, 977 aa, Synechococcus elongatus PCC 7942
MKLRRQFLLFGVGTTFTAIAAISLSDVITNTRLSESSREEVQSLLQREQESILSRTYTVVRVQGTSIEKQLSRQIQVLDEALQRAGGLRTGSRLVRWQAKNQYTGAIQPVELPELQLGGRWLDQVSRFDQAVPVIDTVSRQMGGTVTIFQRINDRGDMLRVATTVPNQDKQRAIGTYIPVTNPSGDPNPVIAAVLKGQTYRGPAYIVNDWYIAIYQPLKDAQGRVIGMIYAGQRQDQTGELARSFQDLRFGQTGSAFVFLGQGSQRGETILTSDPSLQKKNFWDAKDASGQFFLRTSIADAIRQPGAFIRVRYLARPWTEGLQSTQPARQEQMLLVYYRPWNWVIGIRQDEQEFAEPFRRLEAIQQRSLYIQLLLGVIIAVLGAIAARGWAAHLGMRIEQLAHAADAMASGQLQQQIPTSGRDELTVLAQAFNRMAVTLRELLVSLEHRVQERTAALRETNDRLEQAREQAEAANQAKSAFLANMSHELRTPLNAIIGYSEMMMEEAEDGIEVEELLPDFRKINNAGKHLLELINSILDLSKIEAGRMELYLESFSLPELINGVKSIIKPLIEKNQNQLLVDCPADIGLMTADVTKLRQTLLNLLSNASKFTHQGTIQLQVAAQGDQVVFKVVDSGIGMSPEQIDRIFEAFAQADDSTTRKFGGTGLGLSISRHFIEMMGGKITVESVLGEGSTFTITLPRQVQPPQSIPAVDPVLTDEAIATATEQEDQNQPVVLVVDDEPSARELLRRMLEKEGYRVVTAAGGAEGLQRAQELRPALITLDLMMPQVDGWSVLTALKADPMLAEIPVVMVSMVEGRSLSYALGAADYLHKPIDRDQLRRILERYTHPDRQPLALVIEDDPVNRSLLRQLLERDGWQVAEANQGQQGLAVLESLEQPPDLILLDLMMPQMDGFAFVDALRANGNWQTLPVIVVTAKDLTEQDRQRLQGRVSQVIAKGNLAIDRLLAEIRQVGANRV

SEQ ID NO: 37137 - protein, 560 aa, Chromobacterium violaceum ATCC 12472
MIRETLIAMRDLPRLREISGILIRHGLGEFAQRLKLPRAMEKAGEWLNLSLPEGESGRPTAVRVRLAFEELGPTFIKLGQILSTRVDVFPPDWIDEFEKLQNRVPPLPPAMVRKMIVDTLGAEADQLFAEFDMQPIGSASIAQVHRARLKDGREVAVKLRRPGIADKVEADLRILAHLAHLLELEFPELRRYQPSGIAAQFARSLRRELDLAIEARNMERFAKDFVDDPFVMVPQVHWEYTNAAVNVQTFVDGVPASDLSRLKDSGLDPVLLAQRGADAVLKMILINGFFHADPHPGNVFFLAEHRIAFIDFGMVGRISHARRDEIVDLLSAVAERNEHGIIDVLVEWTGSAPVDMQKFADEVGEFMFQYEHLPLKGLNISQLISDIMALIRNHGIVLPPDMAMLFKALVTLEGLGRQLNPDFQLVAHITPFVKELIVARYHPAALLKRGRQTLSEGLEMITGLPRDLVRIGRDMRHGKFRVNLDLQRLDSFGKQLDRSSNRLTMGIVTGCLIIGSSIVMTVNAGPKLFGLPFFGFFGFMLALFNSVWLVWSIWRSGKDL

SEQ ID NO: 37138 - protein, 172 aa, Arabidopsis thaliana
MAILIPASFGRLTITSREKVRVRFSASANQRTIRRDSVDWVKETSSFFEEDKRPIMLFDGVCNLCNGGVKFVRDHDRNRSIRFEALQSEAGKKLLLRSGRAPDDISSVVLVENDRSYIKSEAVLKIMKYIDLPFPQLAFFLQFAPLFVRDFLYENVANNRYAMFGRSDSCEL

SEQ ID NO: 37139 - protein, 3574 aa, Aeromicrobium erythreum
MNEQDPQDRTAALLRRATTELRAARRRVQQLESDPVAVVSMACRLPAGIDTPEKLWDLLDAGRETLSDFPDDRGWDLTGLFDPDPDHPGTSYVDQAGFLDDATGFDPELFGIAPREAEAMDPQHRILLESCWELFERAGMDPLGLRGSATGVFVGAAKFGYGEGDVGDPDGYAVTGTAPSVASGRLSYTFGLEGPSLTVDTACSSSLVALHLAVDSLRKGESSLAVVGGAAVMGSPDVFVDFSRQRALAADGRSKAFGAGADGFGFSEGVSLVLLERLSDAQRLGHPVLAVVRGSAVNQDGASNGLSAPSGRAQRRVLRAALERCGLEPADVDVVEAHGTGTALGDPIEAGALLEVYGQDRSEPLALGSVKSNLGHTQAAAGTTGLLKVVLALQHECLPRTLHVEEPSTHVDWTSGAVRLLDQARPWPRSDRPRRAGLSAIGISGTNAHVIVEEAPATEEESGPVDREPVSGPVLLPMSARTPEALVEQAHRVAGLLRAESVDLADLAVSLGTTRAHLEHRAVVVASTPAAALDALATVGRDQPDGDVVRGTADAGGRTTAFVFPGQGSQWPEMGRELMATSALFAEAVDACDAAMRPWQDWSVADVLRQEPGAPGLERVDVVQPVLFTVMVALARLWRSRGVEPAAVVGHSQGEIAAAHVAGILTLDGAARLVVLRSQALRRLSSQGGMVAVACDEDAARERISAWGSALSVAAVNGPRSVVVSGDRDALADLVATCERDGLAARTVDVDYASHSAHVDAVREEVLRHAREVRPRDGEIAFYSTVTAGPLAGSRLDAEYWFRNLRERVRLHETVDLMVDQGYDAFVEVGPHPVLLPALTATVESGSGGDGAVVLATLRRGEGGPTGFARAVAAAYVAGVEIAWSTVAPGGRGRALPVTYPFQHRRFWRSERRGGARPAGLVHHVEWSTLDRSDSTAAPAGTWLVVTPDDAAEGWSDVVLDAVGRAGGTAQVVSTAVVDAWADGTAEVPDGLAGTVVLPPSPGQDAVAVAEWGRSTVQALARTTSGAPLWLLTAGAVAAAPGEVPAHPEQATLHGIGHVARLELGDAWGGVVDLPASASEEVAASLADAWGRRRESVMAVRGGRLLGRRLRDGGARTSDRWRPRGTVLVSGAATPVGAVLARWVAQHGADRLVLVGRAPDPQLVRELEEGGVRVSTSPVDLADLRAAIGEDEPTAVVHAESDPVFAPVVEADADGFRRTVSARSSLPDLLDELLDGARLEREVLCSSVAATWGGAGMAAYAAGAAYLEATAARRRSQGHATSVVTWTPWDLPAGHHAAPDLSGSALRALAVPRALEAWESILAAAPSDVVVADADWPALADEFSAARPTALFDGLAQPAAPAAAGPTPSGPTHDAGSEELRAVAALGGEERREAARVLVADVAADVLGQDQASRVSRTRALREQGLDSLGTLALRKSLVARTGLTLPASLVYDHPSVNAIADHLLALVDPEAGAQDERPVARGAAEEPIAIIGVGCRFPGGIRSPEGLWDLLRTGADVTGSFPDDRGWDVEGLYDPEGLRPGTTYVDRGGFLDDVASFDPGFFGITPREALAMDPQQRLVLETSWEAMERAGIDPEAVRGSDVGVYLGMNGQSYASLLDGEGDRVDGYKGLGNAASVLSGRVAYTFGWEGPALTVDTACSASLVAVHLAVRALRSGECSMALAGGVTVMTDPYTFVDFSSQQGLARDGRCKAFSADADGFALADGVATMLLVPLSRAAELGYPVLGVVRGTAVNQDGASNGLAAPNGPSQERVVRAALADAGLGPQDVDVVEAHGTGTQLGDPIEAGALLSTYGRDPGRPVHVGSVKSNLGHTQAAAGAAGMLKVLLALRHGVVPRTLHADEPTPHVDWASGGLRLAQDDVPWPRGERPRRAGVSSFGVSGTNAHVVLEEAPDAGTVERPGADAARAVPLVLSGRSEGAVRGAARQLASRLADGTHDVRDVAWTLSRGRSAMEWRAAVPADDVPAAVAALEALADGSPTADGVGPTLSRPRRAVLVFPGQGSQWDGMARDLLATSTVFRQSMQECAQALSAHVTWDLFDVVEGRADVDPERVDVLQPVLFSMMVSLARTWRGHGLVPAAVVGHSQGEIAAACVAGALSLDEAARVVALRSRALREIDGDGGMVSVAVAADEAERLLAPWADQLAVAAVNGPRMVVVAGPVEQLDAFCAAVEQAGHEPRRVAVGYGSHSGEVERVRAQVVDALGDVRVRTSEVPVYSTVTAERIDSASMDAGYWYDNLRGRVRFTETVEALVRDGHDLFVEASPHPVLLGGVQDVADDLGADVDVVATLRRDRPGARELARATGEAFAHGASVEPATTVPDGRLVDLPTYPFQRERFWPRRHRPAPVTDSGLPGVEHPVLSTVVEVPGSGERVLVGRLDPHAHPWLAEHVVEGRRLVPGSVLVELALATGELVGLPVLEELLLQEPLELPAAGGLRLRLVVGPDDGGRCDLQVHAAPDGMQDPTWTLQASGVLGADASTSRPTSGGSAWPPADADAIELAGHYDTLAGLGFEYGPAFRGLRRAWRAGERVLAEVEVPAARHGFVVDPVLLDVVAQTLGVAAAESGRLPFAWNGVRVHGPVVGALRVVLGGDPRSDASLEVVTPAGVPVLTVDGIVVRDASAGTDLRSGTLQSLTWVPAQPDGPAPTVTTVEVTTLDELDAPGRPDADLVVLRHVDDDPDPITATRRAVAWAAEVVRRWGATDRRRARLVVVTDGAARVGADDPPARPGPAAVWGVLRAAQAESPNRFLLVDGALDVPARPDLPQVAVRDGLTLVPRLQDRPTSWVPGAGQRVAPGSGSIDGLVLEKVPASQLQPGPGEVRVAVCATGLNFRDVMLALQVYPDAALMGTEAAGVVEAVGEGVTSVEVGDRVLGLFAGAYAERAVTDARLVAPLPPGWSFAEGAAVPIAFTTAYYALHDLAGVQRGQTVLVHAAAGGVGMAAVSLALHAGADVLATASPAKHDAVQARGLPADQVRSSRTSGFAEAFLGHTRGRGVDVVLNSLTGPLLDETIRLVAPDGVVVELGKADLRDPADVAARYLPFDLGEVGPDRLGEILRTVVDLLAGGRVPPVPVSARPLADLRAALTEMSRGGHVGKLVVEQSRPAPLEGTVLVVGGTGTLGSLVARHLVSTRGVRHLLLVSRRGPDAPGAADLVAELEAEGARVDVVACEATDRARLAEVVRGVPAEHPLVGVVHAAGVLADSFVVSIDADAVETVVAPKVDVVQHLDELTADLDLGLFAVFSSAASVLAGPGQGVYAAANAVVEACVARRASRGARATALGWGLWQDSSDLTRGLEDQIARTGVAPLSRARALELLDEALGSDEPVLYPMALDVDALAEADVVPEVLRARVAPRDRVVPTRGRRGTGPDRDERGADWASRLRGLDADARRTEVLDLVRAHAAAVAGFSSAAQLPEQRAFRDLGFDSLAAVELRNRLRDATSVRLPSTLVFDYPTAEAVAERLLEDLEPVVEHDASSLEEQLAALERAVRDATPDQLPADLGSRVRGLLDVLPAGEVEGRAWDGGAAAAALVDDDTSDDELFSLLDARLGAEGDQDR

SEQ ID NO: 37140 - protein, 339 aa, Saccharomyces castellii
MVGPKTKKQKVANAGGSTSLDLLKKTGTTVVADTGDFATIDKYKPQDATTNPSLILAASKKEDYSSLVDNAVAYGKENGETIDEQVECAIDKLLVEFGTEILKIVPGKVSTEVDARLSFDKDATIKKALQLIHLYEKAGISKDRVYIKVASTWEGIQAAKVLEQEHGITTNLTLLFSFTQAVACAEAGVSLISPFVARITDYYKAQTGKDYSPEDDPGIHSVKKIYNYYKKHGYHTIIMAASLRTTGQVKQLAGIDNLTLSPKVLDELVASTDEVPKLLDPKKAAKQGDEKISFLDDEPKFRYSLNDDAMATEKLADGIRKFAADAITLSNAIKEKLQK

SEQ ID NO: 37141 - protein, 459 aa, Neurospora crassa
MSSTSSSRVDLRDHVQDQDLSEEYLSSSSRDYSAGSSPLTTPALSDEEFDFDVPSEDALFAPTQAPADGSEKYIMVIGGLGYIGSHTTLELLREGHNVIVVDNLSNSYKTVLKNVRMLAAHHCKVNNTPMPRLRFFRIDYRSKAMHVLLERYSNLVMTVDATSGKQVVSYQSRIAGVIHFAAYKSVVESIQQPLRYYRNNVCGLVNLLQELERFNIRNFIFSSSATVYGSKANAGLPLKEEDLIHHQVKTQNEAGETTIVEPTIEGLSCPYARTKYFGEAILADVAEADPDWRIVALRYFNPVGCDPSGVLGESPRGEPTNLFPVLTQVLKGDRSNLNVFGSDWPTRDGTAIRDFIHVLDVARGHIAALNWNSKKGNGFSTFNLGSGTGTTVLEAVRSLEQAAGREIPLALVDRRPGDVGMCVASTERAAKELGWSTRESITKCAADLWNYVSKVALRS

SEQ ID NO: 37142 - protein, 442 aa, Arabidopsis thaliana
MADICYEDETSACESRPLWSSRKWRIGVQRFRMSPSEMNPTASTTEEEDKSEGIYNKRNKQEEYDFMNCASSSPSQSSPEEESVSLEDSDVSISDGNSSVNDVAVIPSKKTVKETDLRPRYGVASVCGRRRDMEDAVALHPSFVRKQTEFSRTRWHYFGVYDGHGCSHVAARCKERLHELVQEEALSDKKEEWKKMMERSFTRMDKEVVRWGETVMSANCRCELQTPDCDAVGSTAVVSVITPEKIIVANCGDSRAVLCRNGKAVPLSTDHKPDRPDELDRIQEAGGRVIYWDGARVLGVLAMSRAIGDNYLKPYVTSEPEVTVTDRTEEDEFLILATDGLWDVVTNEAACTMVRMCLNRKSGRGRRRGETQTPGRRSEEEGKEEEEKVVGSRKNGKRGEITDKACTEASVLLTKLALAKHSSDNVSVVVIDLRRRRKRHVA

SEQ ID NO: 37143 - protein, 138 aa, Nicotiana sylvestris
MAKAIPKISSRRNGRIGSRKGARRIPKGVIHVQASFNNTIVTVTDVRGRVVSWSSAGTSGFKGTRRGTPFAAQTAAANAIRTVVDQGMQRAEVMIKGPGLGRDAALRAIRRSGILLTFVRDVTPMPHNGCRPPKKRRV

SEQ ID NO: 37144 - protein, 583 aa, Deinococcus radiodurans R1
MHHRYDVIVVGAGGAGLMSALYAAKGGVSVACISKLYPTRSHTGAAQGGIGAALGNIQEDHWEWHMFDTIKGGDYLTDQDAAEVFSKDIIEVVYELEHMGLPFSRTPEGKIAQRKFGGHTRDFGKAAVERSCYAKDRTGHMILQTLYQQNVKAGTLFFNEFHVTDLIIEDGRCRGVVAYDLATGELHTFHAKAVILAAGGYGRVFKITSNALTLTGDLMSIYYRKGLPLQDMEFYQFHPTGLAKLGILVTEGIRGEGGILRNSNGERFMERYAPTIKDLAPRDIVARSMTTEIREGRGVGKDKDAIHIDLTHLPREVIEGKLAEITDLARTYLGQDPVKDLVMVQPTAHYAMGGIPTDLNGLCLSDGNGGSIEGLYAAGEQACVSLHGANRLGTNSLGDLVVFGRRAGRYAAEYAKQVEYAEMPENAEAESRRVFDDLRAASGKDNAAAIRKELQETMMRNVGIFRNGPDMAKQVEIIKELKTRYKNVGVSDTNARYNSELVEALELGFMLDCAEAMASSAVNRTESRGAHDREDFHQRDDVNWLKHTMAYRDMNNPGNVLIGYKDVALKGFTRSFEPKPRVY

SEQ ID NO: 37145 - protein, 586 aa, Vibrio parahaemolyticus RIMD 2210633
MSRKNNKNLSILLKLNTFIAPYKWRVAAALVALVATASLTLSVGYGVRILIDQGFAQQSLQELTNAIQFIVGVTLCIAIGTFFRFYLVSSVGERVSADIRLAVFNHVITLHPSYFETNSSGDIMSRLTTDTTLLQSIIGSSFSMAMRSALMCFGAIIMLFATNVKLTLIVLASVPLVLVPILFYGRRVRALSRQSQDSMSDVGSYAGEAIEHIKTVQSFSSEPYERAAFAVEVEKAYEVGRQRVKQRAILISGVIVIVFSAIAGMLWIGGSDVIHGKMSAGDLAAFVFYAIMVASSTATISEVMGELQRAAGATERLIEILQVESDIKAPSNHLPVRSDMSAEVSFKSVNFNYPSRPNQPAVKGLNLTAEQGKVLALAGPSGAGKTTLFELLQRFYDPQQGQVLFGGEDIRQFDPNELRRQMALVPQQPALFSHDVFHNIRYGNPEATDEQVIEAAKKAHAHEFIEKLPEGYYSFLGERGVRLSGGQKQRIAIARAILKDPKILLLDEATSALDSESEHHVQQALEALMKGRTTLIIAHRLSTIQHADKIAVLDNGELVDVGNHQSLMQSCELYQRLVALQFKHLE

SEQ ID NO: 37146 - protein, 398 aa, Monilinia fructicola
MREIVYLQTGQCGNQIGAAFWQTISGEHGLDGSGVYNGTSDLQLERMNVYFNEASGNKYVPRAVLVDLEPGTMDAVRAGPFGQLFRPDNFVFGQSGAGNNWAKGHYTEGAELVDQVLDVVRREAEGCDCLQGFQITHSLGGGTGAGMGTLLISKIREEFPDRMMATFSVVPSPKVSDTVVEPYNATLSVHQLVENSDETFCIDNEALYDICMRTLKLSNPSYGDLNHLVSAVMSGVTTCLRFPGQLNSDLRKLAVNMVPFPRLHFFMVGFAPLTSRGAHSFRAVTVPELTQQMYDPKNMMAASDFRNGRYLTCSAIFRGKVSMKEVEDQMRNVQNKNSSYFVEWIPNNVQTALCSIPPRGLKMSSTFVGNSTSIQELFKRVGDQFTAMFRRKAFLHWY

SEQ ID NO: 37147 - protein, 498 aa, Ashbya gossypii ATCC 10895
MSAQMFIGGAAAAVAAAAVYHQEKDHHTVSNIAHGTTSHLKWNAGNIRDGLHDDLASFKDAVVHCLTFRSGQSRDYRHQSSMFGNGSAGSAKSGSWFGGATDSRDGLLERGREAGREAGREASSWFRGDSRTEDSGRSWFGRDARDTRDTRSDRSWFGRDAPEARTDGTWLNGERDRSWFGREKHATLDESDRVFRNGGRLGVDTHALGADARGKVDDIKQAGADLGRSAQAKVDDFKQAGADLGRSAQDRLQRGVADAKQTLSGAASTVSGAAASAAGASRDAASSAADKTQSLFNWGYNKAEKSKAIAIGEYDKANKDYQQALDAYNRSKRLLADGDQHLRTALESAQAQLRDCRDKLDAISAEFDHYARENISDISRRLDHEDRDSRGSGLFSWFRSKAPAVEIDPREAHRAAADAKAGVAGAAADVRDGAARLATKLGSADAHAHFDSLHRPTEDEILAANAARALRGWGETAASLANEELEEERSRAGRFWRK

SEQ ID NO: 37148 - protein, 253 aa, Bordetella parapertussis 12822
MNRLEGKVVFITGGGAGIGRASALLFAREGARVVIAERDADAGRQTVELIAGQGGPRALFVPTDVTEADSVEQAVARTVAEYGRFDVLYNNAGGSTVRDSRVTDTPVEEFWAKMKLDLFGTWLGCRYGIQAMIDAGHGGAVINSTSIFALIGTHGKDAYTAAKGAVSALTRSMAVEYAQHRIRVNAVAPGATATERVLKLLQEDGVTSKSLDGQLFGLVQPEDIAHAALYLASDESKSTTGHILAVDGGLTIS

SEQ ID NO: 37149 - protein, 549 aa, Spiroplasma citri
MNKINFQEAIVYEIHPQSFYDSNHDGVGDLQGIIQKLDYLAMLGVNYLWLNPIYVSPQKDNGYDVSDYKNINPLFGTMNDFEMLVTEAGKRNIYIMMDMIFNHCSTEHEWFQKAQTGNLDYLQRFFFLPGDKAKCPNNWQSKFGGSVWEYHDELKMFYLHLFDKTQVDLNWKNESLRQHIYQIVNYWLQKGVRGLRFDVINLIGKPNIFENDLTGDGRKYYTDTPQVHTYLQEMAQNTYLKTNDIITVGELSSTSIKQAILYTKPVSQELNMAFTFHHLKIDYLNNEKWKLAPYDPAKLVAKIKEWQIPVQAAGGWLANFLNNHDQPRALSRFGDPENYRFESATALAAVVLLLRGTPYLYQGEEFGMENNNYTKIEQLKDVESINYYHILQKEGEQPNAILEVLSARSRDNARTPMQWNNQQFAGFSTHKPWIDVNTNYLKINWEKDYHSSQSIFKAYQMLIQLRKNNLAFSYGEIEFVEIDPTILSFYRYYEKNKFLVLINLSDQTIMIPDNLLSEKTIYNNYSTFEKKINPYQVIVFDYLMAKSFK

SEQ ID NO: 37150 - protein, 46 aa, Pseudotsuga menziesii
LRRFRLPDNAKVEEIKAAMENGVLTVTVPKQPEPQPPQPKSIEISG

SEQ ID NO: 37151 - protein, 281 aa, Desulfovibrio vulgaris subsp. vulgaris str. Hildenborough
MWDYTDKVREHFLNPRNVGSLDDANAIGEVGSLACGDALKLYLKIDDEGRIQDARFQTFGCASAIASSSALTELIKGMLVEDALKISNKDIAAHLGGLPKEKMHCSVMGQEALEAAIRNWRGEPAVEHAHEGKLVCKCFGITDEQIIRAIRENNLKTVEDITHFTKAGGGCGDCLEEIRHILDVELGKEPECLTPLEPPKKLTNVQRMQLVMKVLDGEIRPRLQQDGGDIELVDMNGTEVMVALRGMCTSCPSSQLTLKEFVERTLRDHVDQEIVVREVSA

SEQ ID NO: 37152 - protein, 572 aa, Saccharomyces cerevisiae
MCGIFAAFKHEDIHNFKPKALQLSKKIRHRGPDWSGNAVMNSTIFVHERLAIVGLDSGAQPITSADGEYMLGVNGEIYNHIQLREMCSDYKFQTFSDCEPIIPLYLEHDIDAPKYLDGMFAFCLYDSKKDRIVAARDPIGVVTLYMGRSSQSPETVYFASELKCLTDVCDSIISFPPGHVYDSETDKITRYFTPDWLDEKRIPSTPVDYHAIRHSLEKAVRKRLMAEVPYGVLLSGGLDSSLIAAIAARETEKANADANEDNNVDEKQLAGIDDQGHLHTSGWSRLHSFAIGLPNAPDLQAARKVAKFIGSIHHEHTFTLQEGLDALDDVIYHLETYDVTTIRASTPMFLLSRKIKAQGVKMVLSGEGSDEIFGGYLYFAQAPSAAEFHTESVQRVKNLHLADCLRANKSTMAWGLEARVPFLDKDFLQLCMNIDPNEKMIKPKEGRIEKYILRKAFDTTDEPDVKPYLPEEILWRQKEQFSDGVGYSWIDGLRDTAERAISDAMFANPKADWGDDIPTTKEAYWYRLKFDAWFPQKTAADTVMRWIPKADWGCAEDPSGRYAKIHEKHVSA

SEQ ID NO: 37153 - protein, 536 aa, Nocardioides sp. JS614
MTVDRRDQGRVASRVGRRSVLFGAGGLGVLAAGGIGILKATGGPSSGDAVDAGSAAVRRAEAERRPAGQRTVTADLRVQSATVSLGGLVVPTWAYGDSVPGPLIRATAGDLLKVNVDNALGSETSVHWHGIALRNDMDGVPGITQRPIAAGSRFTYEFTVPDPGTYFYHPHTGVQLDRGLYGVLVVDDPAEPGAYDQEWVVVLDDWVDGTGTTPDAILEELLATTGSSGMDGMDGMDGMDGMDGMDGMDGMDGMDGMEGMHGMPGMGEAMQSPLLGGAGDVTYPHYLVNGRTPGAPATLTGEPGQRVRIRIINAGSDTAFRLAIGGHRLTVTHSDGFPVQEQATDALLIGMGERYDVVVTLADGAFPLVASAEGKAGQGLAVVRTGSGRAPRGDVRVAELDGQVLLGTDLVATEASRLPSREVDRSIDLVLGGTMAPYRWTINGEVFPDARPLEVVEGERIRLRFENRTMMFHPMHLHGHTYGQVRGGARKDTTIVRPMQTVEVDFDATNPGQWAAHCHNIYHAESGMMTTVSYRT

SEQ ID NO: 37154 - protein, 167 aa, Eucalyptus globulus subsp. globulus
MFPMVTGFMNYGQQTVRAARYIGQGFMITLSHANRLPVTIQYPYEKLITSERFRGRIHFEFDKCIACEVCVRVCPIDLPVVDWKLETGIRKKRLLNYSIDFGICIFCGNCVEYCPTNCLSMTEEYELSTYDRHELNYNQIALGRLPMSVINDYTIRTISNSPQIIIK

SEQ ID NO: 37155 - protein, 362 aa, Xanthomonas axonopodis pv. citri str. 306
MSVAAQFQIDYLQYMDADGQWVRDDLPADAANPQHLLALFKRMLFVRTFDTKSVALQRTGKLGTYAACIGHEATHVGIGASMRSGDVFAPSYREYGTMFERGVRPRDVLLYWGGDERGSDYPRDADAAIDFPICVPISTQCLHAAGSALSFKLQGKQHVAVACCGDGGSSKTDFYAALNSAGAYKLPLILCVINNGWAISVPRSAQTGAQTLAQKGLAGGLHCLQVDGNDLVAVLEAMRQARVRALAGEGGTVIEFLTYRLSDHTTADDARRYRGEEEVKQGWAREPLLRLRRYLTAQGLWDEAQEDAWKADCSARVDEEVNAYLNTPVQPVEAMFDYLYGDPPAELLAQRAEVMALESRHG

SEQ ID NO: 37156 - protein, 507 aa, Pirellula sp. 1
MNALLPHDEHNQQLEANVHPTDWQNPSPKQPYHLVVIGAGTAGLVTAAGAAGLGARVALIERDLMGGDCLNVGCVPSKGVISAARVAATVKNASDFSVHVPNGVEIDFDGVMSRMRELRAKISQNDSAKRFQDLGVDVYFGQASFTDSQTIDVQGTKLQYKRAVIATGARAAAPPIKGLDQVDYLTNETVFSLTKLPKRIGIIGAGPIGCEMAQTFAQLGSEVFLIESQHGILPKEDREAADIVQKAMLADGVQLLCCGHDLEIKNEGGIRLTLNSHGNQYDQPVDQLLVAVGRAPNVEKLNLDAVGVKFDKNGVEVNDNLQTTNPNIFAAGDVSSKYQFTHVADFLARIVIQNSLFAIGPFGKKKASELIIPWATYTSPEIAHVGMYEQDAKDAGIEIDTYVQHFREVDRAILEGEEEGFVRIHTKKGTDKIVGTTIVAKNAGDMISEITVAMNNNVGLGAIANAIHPYPTQAEAIRKLGDQYNRTRLTPFSKTMLHALMRWNVGR

SEQ ID NO: 37157 - protein, 197 aa, Nicotiana tabacum
MSAPRFIKCVTVGDGAVGKTCLLISYTSNTFPMDYVPTVFDNFSANVVVNGSTVNLGLWDTAGQEDYNRLRPLSYRGADVFILAFSLISKASYENVSKKWIPELKHYAPGVPIVLVGTKLDLRDDKQFFIDHPGAVPITTAQGEELRKTIGAPAYIECSSKTQQNVKAVFDAAIKVVLQPPKTKKKKGKSQKSCSIL

SEQ ID NO: 37158 - protein, 452 aa, Acinetobacter sp. ADP1
MNNDSSKLQRGLKNRHIQLIAMGGAIGTGLFLGSAQVIQSAGPSIILGYAIGGLIAFLIMRQLGEMIVHEPVAGSFSHFAYKYWGKFPGFLAGWNYWVLYILVAMTELTAVGKYINYWWPQIPAWQSVLFFFVVITLVNLTNVKFYGESEFWLAIIKVVAVISMIIFGLYLLFTADSSSTASFSNLWAHGGFFPNGFEGLFYMLAFLMFAFGGIELIGMAAAEAENPAKTIPKAINQVVFRILVFYVGSLTILLSLVPWNQLDLGGLDKSPFVMIFSQLGIGWAAHLLNFIILTAALSVYNSGMFANSRMLFGLAQQGNAPKIFTKVNKQGVPIPAVLFSALLIFGCVLLNYFVPEDALGHLMYVVVGALVLNWAMISLTHLKFKAAVKKLKLNVTFPALWAPVSNYLVLIFIALVLFIMWQQGFKESVIMIPVWIVLMFGLFHLLTNKDHT

SEQ ID NO: 37159 - protein, 737 aa, Pyrobaculum aerophilum str. IM2
MRLIIVSNRLPVVLTVGERGMEIREAVGGLATAVKSFIKATENGKALGFSEVVWAGWSGIKAEQESEDLKSRLREMGLLPVSLTAEEVNFFYEGFCNSTLWPLFHGFTVYTVFESKYWEAYVKVNQKYAETVASVANTGDFVWIHDYHLMLMPAMLREMSPDVSIGFFLHIPFPPAEMYQLMPPPWRTALLDGVLASDLVGFHIHEYVNNFVRAVSKFLGYRTEAGVIYAGRRKVHVGAFPIGIDFDFFYNSSLDPEVAGQIEELRQKLRGLKIIFSIDRLDYTKGVINRVHAWERFLKEHPQWRGKASFILIVVPSRIGVPQYDAMKREIEREVGRINGELGDVNWTPIVYISRFIPTPTLLALYNIADVALITPLRDGMNLVSKEYVATKRDCKGVLILSETAGASHELLEALIVNPNDESGVVEAIAKALTMEPEEQCRRIKAMQEKLRQQNVVKWAVDFLHSLMLAYRENTESFTTSSKLLDREAIEEIVKIFHGARSRLLLLDYDGTLVPHYPYAYQAVPDGELKRLLNSLAFQPNTYVAVVSGRGRDFLEAWLGDLPIYIVAEHGAFIRDPGGNWSQLFPFDTSWKISVRKIMEEFTRLTPGSYIEEKEISLAWHYRNVEPEIGEKAANRLADALTGLLESSPANIIRGVKVVEVRAAGVNKGVAAKLLYDKLRPELVIIAGDDYTDEEMMKALPEAITIKVGKGETSAKYMAPSYRRIRELLQALLTAQR

SEQ ID NO: 37160 - protein, 458 aa, Bacillus halodurans C-125; identical to SEQ ID NO: 758

SEQ ID NO: 37161 - protein, 754 aa, Arabidopsis thaliana
MRKNANLLILFMIFMFFFCGLSSVSAKPPPVKIVSGLVTNVASILWKWLWSLQTSTTTTTTTKSGVSSRSMVKYESGYNMETVFDGSKLGIEPYAIEVSPNGGELIVLDSENSNIHKISMPLSRYGKPKLLSGSQEGYTGHVDGKLKEARMNRPRGLAMDDRGNIYVADTINMAIRKISDDGVSTIAAGGRWSGGSKEESMRFSDDFDLIYVSSSCSLLVIDRGNQLIKEIQLHDHDCSQPEPDTDSLHLGTALLVAAVFFGYMLALLVRRVRSLFSSSSHDTKSKRHVATPSMTMAPYQRYPRPVRQPLIPPQHESEKEEGFLGSLGKLVVKTGSSVSEMMSGSRNVIPPNFHQYHHQQEPNQWPVQESFAIPEEDGPPALEPRSGTNPDKPYLRAQGTNQNRSYYQDYDQYQNQQKRNVNDTASFEDNREKNEIVFGAVQEQDGRREAMVIKAVDFNEAINDQRNLRPRINYMGYSSQLPGLTAYCTDLTSYTMRSDHLIFNKSTGSISVHISKTDGQYEREIEDEEEEGDFLQEKEKIRVRVAEKQRGRRIRRIQIQALYSSLSLSLNLYDLSQNQSHCFMGLESFPISEMDATDEMHEAMFAKRGCCFILPCLGSSQPSGPNGSVWWQRIRTVDKLEPDERWWVSGWMKMREWSEIVAGPKWKTFIRRFGRNHCCNGGIDGGCNRPEHVSFRYDSWSYSLNFDDGKQTGHFEDEFPYRDYSMRFAAPSLPVSTKCSIDFDNDNHAPSLFK

SEQ ID NO: 37162 - protein, 573 aa, Pseudomonas syringae pv. syringae B728a
MSRRKRRLEKMTKTSRPLYISYAGPSLLEMPLLNKGSAFTPQERVEFNLIGLLPQNVETIEEQVTRVYSQYKQCASDLDKHIYLRSIQDNNETLFFRLLDSHLDEMLPIIYTPTVGQACQEFSKIYRTHRGLFISYPERDRIDDILRSATKDRIKIIVVTDSERILGLGDQGIGGMGIPIGKLSLYTACGGISPAYTLPIVLDVGTNNRELLDDPMYMGWRHERVSGKEYEDFIALFIDAVQRRWPDVLLQFEDFAQSNAMPLLEKYRDELCCFNDDIQGTASVAVGTLLAACKAKNETLGQQKVVFVGAGSAGCGIAEHIIAAMRIEGLSESEARKRIFMVDRFGLLTESMDNLLDFQKRLAQKTADVSGWTAGSEAFPQLLDVVTHAGATVMIGVSGQRGLFTEQVIRELHKHCAKPLVMPLSNPTSKVEATPEEILRWTDGNALVATGSPFAPVEINGRTVHIAQCNNSYIFPGIGLGVVACKASRITDRMLMAASNALAECSPMVTGKGDAVLPPLKEIQQVSRKIALAVAREAQAEGLALETTEEALLEAIERNFWLPGYRAYRRRSV

SEQ ID NO: 37163 - protein, 476 aa, Saccharomyces cerevisiae
MSFRRINSRYFENRKGSSMEEKKAKVPPNVNLSLWRKNTVESDVHRFNSLPSKISGALTREQIYSYQVMFRIQEITIKLRTNDFVPPSRKNRSPSPPPVYDAQGKRTNTREQRYRKKLEDERIKLVEIALKTIPYFVPPDDYKRPTKFQDKYYIPVDQYPDVNFVGLLLGPRGRTLRKLQEDSNCKIAIRGRGSVKEGKNASDLPPGAMNFEDPLHCLIIADSEDKIQKGIKVCQNIVIKAVTSPEGQNDLKRGQLRELAELNGTLREDNRPCPICGLKDHKRYDCPNRKIPNIQGIVCKICGQTGHFSRDCNSSSQRMSRFDRNATVNNSAPIQSNDVHYNSNTHPIQAPKRSRYDNNSTEPPLKFPASSRYAPSPSPPASHISRQAQNVTPTPPPGLTSSSFSSGVPGIAPPPLQSPPESEQPKFSLPPPPGMTTVQSSIAPPPGLSGPPGFSNNMGNDINKPTPPGLQGPPGL

SEQ ID NO: 37164 - protein, 937 aa, Pirellula sp. 1
MQLDCRRSLPFSTQRTVTMVSANILALDVDQLNRDWQWMLSALQSVLQRGGDEKLAELLPVPGCKLDPAKAPADSVQLTQAYSIAFQLLSMAEQSSAAQFRDRIESESGMADLPALWGESLQQLIDRGWTADMIAAELPSMRVELVLTAHPTEAKRATVLAHHRRLFRRFQLRHQTDLPPWRRSENEEAIESVLSILWRTGEIYLDKPDLQSERRNVMDYLTVVFPKALQPLDQRLRQAWREVGLSEKAIADPLALPRLTFGTWVGGDRDGHPLVTPEVTEETLMQLRRGAVELMREELIQLARLTSVSAYWLPPTSDFLTRIAERAHAMGPAGAAAIARNPNEPWRQFINLMLASLPSEKTMMSGKEQHTYQRSRELLADLRCLHESLVAVDLGDVATSAVAPTMRIAQTFGFHLAVLDIRQNSAKHDTAIEQLLRAAGMADWKFASWDEDKRMKFLNEELANSRPLTHPDSSAGEEADAVLGALRVVTQYRSKHGADGLGALIVSMTRKTSDLLAVYLLAREVGLLQRTESGAVCPLPVVPLFETIDDLERSPEIYDGFLQHPITRNSLTAIAQREGATAPVGQVMIGYSDSNKDGGILASLVGLRHAQRKLTQVARSHGVRARFFHGRGGTISRGAGPTHRFIKSLPDHTIAGDMRLTEQGETIAQKYAHEPTAIYNLELFLAGVTRKSLADSRSEEPDHPLEPTLVKLAAWARTTYHELLHSDGFVEFFREATPIDAIEQSRIGSRPARRTGQQTLDDLRAIPWVFSWGQARCYLSGWYGVGTALKKLQTECPDEFDAVKEALRDWAPLHYLISNVATSVTAVDIEVMKQYAALVENPALRERFVTDIETQWKLACEMVEAVYGGPMESQRPNVQRMIALRSEGLRLLHRQQISLLQRWRSYNKMGEHTQADALLPALLLSVNAIASGLGTTG

SEQ ID NO: 37165 - protein, 398 aa, Monilinia fructicola
MREIVHLQTGQCGNQIGAAFWQTISGEHGLDGSGVYNGTSDLQLERMNVYFNEASGNKYVPRAVLVDLEPGTMDAVRAGPFGQLFRPDNFVFGQSGAGNNWAKGHYTEGAELVDQVLDVVRREAEGCDCLQGFQITHSLGGGTGAGMGTLLISKIREEFPDRMMATFSVVPSPKVSDTVVEPYNATLSVHQLVENSDATFCIDNEALYDICMRTLKLSNPSYGDLNHLVSAVMSGVTTCLRFPGQLNSDLRKLAVNMVPFPRLHFFMVGFAPLTSRGAHSFRAVTVPELTQQMYDPKNMMAASDFRNGRYLTCSAIFRGKVSMKEVEDQMRNVQNKNSSYFVEWIPNNVQTALCSIPPRGLKMSSTFVGNSTSIQELFKRVGDQFTAMFRRKAFLHWY

SEQ ID NO: 37166 - protein, 422 aa, Zea mays
IHFPFPPHQSLPRSSHQPAAVYLLPLRLLMASPTAGDAPLASPSPSPAADATDAALAAAAAVPDPDISFGFLRPELGKEKLVGTVGFHERHVFLCYKGPDLWPSHLEASESDRLPRLLAAAIKARKPNLKKTIKLTICEGEDGTESSNGDVLIFPDMIRYKGLTHFDVDNFVEEVLVKDIDWLPRSPEPMSGSYIFVCSHGSRDKRCGVCGPALIKRFKEEINELGLDDQVAVSACSHVGGHKYAGNVIIFSSDAKGEVTGHWYGYVVPDDVPVLLHKHIGQGEVVDHLWRGQMGLSVEQQKRALELRNMVNGGEESLEETRTDGASFNPAAAGGCCQGNGGFTCCQTDLPKEKQDKSIIAEQNPKSSDKEGGAGSKKGDTKTCPVPIWFETWERADTYAALAVVAAAAAVLVSFRIYKNLN

SEQ ID NO: 37167 - protein, 598 aa, Haemophilus influenzae R2846
MKNFKYFAQSYVDWVIRLGRLRFSLLGVMILAVLALCTQILFSLFIVHQISWVDIFRSVTFGLLTAPFVIYFFTLLVEKLEHSRLDLSSSVNRLENEIAERIAAQKKLSQALEKLEKNSRDKSTLLATISHEFRTPLNGIVGLSQILLDDELDDLQRNYLKTINISAVSLGYIFSDIIDLEKIDASRIELNRQPTDFPALLNDIYNFASFLAKQKNLIFSLELEPNLPNWLNLDRVRLSQILWNLISNAVKFTDQGNIILKIMRNQDCYHFIVKDTGMGISPEEQKHIFEMYYQVKESRQQSAGSGIGLAISKNLAQLMEGDLTVESERGKGATFHLTLHAQEISEKESVKKNILFLNILLVEDVDLNIMVAKTILEKLGHHVDVATNGKQAITLFEKNVYDILLLDIKLPDMSGFEIAQYLRENYENGIYDFLPPMIAFTANVMQSEQEYLEMGMDGVLRKPISIKDLHHCLQQFFADESESIIEMNDDNELSEQFDLALIETLGKKQILENLSLFKQTMPNYLAQLSKDNMKETEDTAHKIKGAAASVGLNHLRQLADTLESAAKNSDVFNCGELIDEIGNLWLEDVEDLLKFCKF

SEQ ID NO: 37168 - protein, 244 aa, Ralstonia metallidurans CH34
MHEIERLLKGFERFQRRYFEARPELFDALRTGQKPQTLLIGCSDSRVDPGLLLDCDPGELFTVRNVANLVPPCGDGASGRLHGVSAAIQFAVEQLHVVRIIVMGHAGCGGIRALLAHPQNDDTNAPQDFIGPWVRIAGPARRMVEQTLPNASPAERQRACEQAAILVSLRNLESFPFVREACERGALTLHGWYFDLQAGALLAYSERADDFLPLVCPLTPEARPHRQPSNRPSIDSGQAEMLGS

SEQ ID NO: 37169 - protein, 238 aa, Leptospira interrogans serovar lai str. 56601
MGSPILGEFLGTFVLILLGNGVVAGVLLEKSKSKDGGWIVITAGWAFAVMIGVFVSNAFGSLDAHLNPAVTLAFAIQSGDYTKLIFYIPAQIAGAFLGAVFNYLHYLPHWKETKDPGKILAVFSTEPEISHNVYNFFSEFLGTFLLILGIVSIFSPKLQGLSVHFGTFLVGVLVWSIGLSMGGTTGYAINPARDLGPRLAHFILPIAGKGTSNWKYAWLPVFAPLSGAACAGILIRFL

SEQ ID NO: 37170 - protein, 367 aa, Kluyveromyces lactis NRRL Y-1140
MSDLLLIPGPIMVSSAVEEAASIQSLAHTSPEFVKIFQGALQKLRTVFQTSNAGDQPIVISGSGTLGWDIVGNNLLKSGDSALTISTGFFSDSFAECLKTYGADVDVLKSEPGKVVALDKIESQLKSKKYQLITLTHVDTSTATLLDLPSITSLVKKVSPETFIIVDGVCSIGCEEFKFSEWSVDFVLTASQKALSCPSGLSVSLISERALSYALSNESTHGFYANLKKWIPIMKAYEAGVGQYFATPSIQLVNALNVSLGEILSYGLEARIAKNKKTSDQFKNNLKQLGLTLVSEDSNSAHGLTAVYVDQPGKVISSLKSKGIVIAGGILPGIKDKYIRIGHMGISAIDDNLHHIDKVFEAIKESI

SEQ ID NO: 37171 - protein, 392 aa, Ralstonia eutropha JMP134
MNEAVIVSTARTGLAKSWKGAFNMTHGATLGGHAVEHAIARAKIEAGEVEDVLMGCANPEGATGSNIARQIALRAGCPVTVPGATVNRFCSSGLQTIAMAAQRVIADEGDIFVAGGVESISCVQAEMNRHMLADPWLVKNKPEIYWNMLQTAENVAKRYNISKDRQDEYGVRSQQRAAAAQEAGKFKDEIVPITVLAGVADKSTGQLVTKEVTLDRDEGIRGDTTLEAVSKIRTAVPGGVVTAGNASQFSDGASAAVVMNARVAAAKGLQPLGVFRGFAVAGCEPDEMGIGPVFAVPKLLKKAGLKVDDIGLWELNEAFAVQVLYCADKLGIPMDRLNVNGGAIAVGHPYGVSGARLVGHALIEGKRRGVKYVVVTMCIGGGQGAAGLFEVL

SEQ ID NO: 37172 - protein, 153 aa, Photorhabdus luminescens
MLPAWLGAGAALQKVVNDGKQDVLAEMCRNWPFFTTRIGMLEMVFAKADLWLAEYYDHRLVDKNLWPLGQKLREQLSADIKTVLTISKDEHLMADLPWIAESIALRNVYTDPLNVLQAELLLRSRQQQHPDPQVEQALMVTIAGIAAGMRNTG

SEQ ID NO: 37173 - protein, 354 aa, Glycine max
ELLAGIRKEVEAGSLPANVAAGMEEVYNNYKNAVIRSGDPKAKEIVLSNMIALLDRVFLDVTDPFVFQPHHKAKREPFDYYVFGQNYIRPLVDLKNSYVGNMPLFIEMEEKLKQGHNIILMSNHQTEADPAIIALLLETRIPYIAESMTYVAGDRVITDPLSKPFSIGRNLICVYSKKHMLDDPALIEMKRNANIRALKEMAMLLRSGSQIVWIAPSGGRDRPDPHTGEWAPAPFDTSSVDNMRRLVEHSGPPGHVYPLAILCHDIMPPPLKVEKEIGEKRIISFHGAGISVAPALSFSETTATSENPEKAKELFSKALYDSVTEQYNVLKSAIHGKKGFEASTPVVSLSQPWK

SEQ ID NO: 37174 - protein, 209 aa, Photorhabdus luminescens
IPHNWQPSTETQEVFATCKVIAKSPQDAIAAYVISMAKVPSDVLAVHLLLKEAGCPFTLPVAPLFETLDDLNNAENVIQQLMDIKWYRKLIQDKQMVMIGYSDSAKDAGVMAAAWAQYRAQDALIKVCEKEGVTLTLFHGRGGTIGRGGAPAHAALLSQPPGSLKGGLRVTEQGEMIRFKFGLPQVTISSLALYASAILEANLLPPPEA

SEQ ID NO: 37175 - protein, 628 aa, Burkholderia fungorum LB400
MEKAVHVSMEQDSREMQLRALMKLGKERGFLTHTEIVDHLPDCVAQADAIEGIVKAFNDVGIAVRDFAPTGDALLLGDAAQQSAPDDVAEDETATALTIAISEPGPAADPMRAYLREMGATPLLTREGEIAVARRIEACLREMLEVIALRPATVDAILSRADRVAAGELDIDDLVDGFLEQQPDEMLPAMQGATAEGAAGSKADSGVPTSASESAGAIEADEARIARLTAGCNAIFSQVREQLASWRAAVAGRTGQREEAQSTLVLIASTLGQIRFSARTIGELSADVRRAVEEIRGIERNVLRLAVNQGGMARDMFVETFVGSETDPEWLARAAAAAPACSAALMRCAPSIHSQQEKLAQIEAREGLSLQELKWISRKMNVADRELQDARRAMIEANLRLVVSVAKKYVQSGMPLLDLVQEGNIGLMKAVDRFEYRRGFKFSTYATWWIRQSVSRAIADYGRTIRVPVHMADAMHRVKRVAGEMRQETGRPARSSELAARLGMSEEKVRSVQRVTRQPVSLDVPIGEEADTTLGEMVEDSSTLAPLDALLQADLRVAIDAALGVLTPREAKVIKLRFGVDAVSEHTLEELGDQFDVTRERVRQIQNKALQKLRHSDGISTLKNYLDH

SEQ ID NO: 37176 - protein, 212 aa, Triticum aestivum
  misc_feature (97)..(97): Xaa can be any naturally occurring amino acid
  misc_feature (118)..(118): Xaa can be any naturally occurring amino acid
  misc_feature (128)..(128): Xaa can be any naturally occurring amino acid
  misc_feature (161)..(161): Xaa can be any naturally occurring amino acid
  unsure (1)..(212): unsure at all Xaa locations
ELICCDNLYCRLFKSCVGYVCEDPVRIIEDIPLQPIFLARSLLCGQDETTFTAVGVIEGFLDNRICLRQLVSFWREEIPPKGLMQHIIPQAPASRTXPHYQNRLTVLPAISVLCPGMXAEVTCQKLLXVVINSSNDRVPNIKFHAAKPLRTLVPTLDRSAXEKTDETCLRYLKRDPDEDVRYYADQELQARDQIFMSSSLSYCTARVFISYF

SEQ ID NO: 37177 - protein, 443 aa, Glycine max
MMPPKPSPPPAPPAYAGQPPPPPPPFISSSGGSGSNNSGGEFLPPPSPGISLGFSKSTFTYEELARATDGFSDANLLGQGGFGYVHRGILPNGKEVAVKQLKAGSGQGEREFQAEVEIISRVHHKHLVSLVGYCITGSQRLLVYEFVPNNTLEFHLHGKGRPTMDWPTRLRIALGSAKGLAYLHEDCHPKIIHRDIKSANILLDFKFEAKVADFGLAKFSSDVNTHVSTRVMGTFGYLAPEYASSGKLTDKSDVFSYGIMLLELITGRRPVDKNQTYMEDSLVDWARPLLTRALEEDDFDSIIDPRLQNDYDPHEMARMVASAAACIRHSAKRRPRMSQVVRALEGDVSLADLNEGIRPGHSTMYSSHESSDYDTAQYKEDMKKFRKMALGTQEYGASSEYSAATSEYGLNPSGSSSEAQSRQTTREMEMRKMKNNQGFSGSS

SEQ ID NO: 37178 - protein, 384 aa, Triticum aestivum
  misc_feature (188)..(188): Xaa can be any naturally occurring amino acid
  misc_feature (287)..(287): Xaa can be any naturally occurring amino acid
  misc_feature (311)..(311): Xaa can be any naturally occurring amino acid
  unsure (1)..(384): unsure at all Xaa locations
MQIFVKTLTGKTITLEVESSDTIDNVKAKIQDKEGIPPDQQRLIFAGKQLEDGRTLADYNIQKESTLHLVLRLRGGMQIFVKTLTGKTITLEVESSDTIDNVKAKIQDKEGIPPDQQRLIFAGKQLEDGRTLADYNIQKESTLHLVLRLRGGMQIFVKTLTGKTITLEVESSDTIDNVKAKIQDKGGXIPRDQQRLIFAGKQLEDGRTLADYNIQKESTLHLVLRLRGGMQIFVKTLTGKTITLEVESSDTIDNVKAKIQDKEGIPPDQQRLIFAGKQLEDGRTLAXDYNIQKESTLHLVLRLRGGMQIFXVKTLTGKTITLEVESSDTIDNVKAKIQDKEGIPPDQQRLIFAGKQLEDGRTLADYNIQKESTLHLVLRLRGGQ

SEQ ID NO: 37179 - protein, 567 aa, Oryza sativa (japonica cultivar-group)
MDDPSSTSKGKRKRGRKHKAAAENHAPASPVASTAADNPAPAAAGRRGRKSRRHEAPADADGSRPPSPPRRGEAKPVANGGGDAVVEAGGPVGWDEVARVVPSMDAVVKVFCVHTEPNFSLPWQRKRQYSSSSSGFIIGGRRVLTNAHSVEHYTQVKLKKRGSDTKYLATVLAIGTECDIALLTVDDDEFWEGVLPVEFGSLPALQDAVTVVGYPIGGDTISVTSGVVSRIEILSYVHGSTELLGLQIDAAINSGNSGGPAFNDRGKCVGIAFQSLKHEDAENIGYVIPTPVIMHFIQDYEKSGEYTGFPILGIEWQKMENPDLRKAMGMKPDQKGVRVRRVEPTAPESGCLQPSDIILSFDGIDIANDGTVPFRHGERIGFSYLVSQKYTGEKALVKVLRNSKVHEFKIKLATHKRLVAAHVKGRPPSYYIVAGFVFAAVSVPYLRSEYGKDYEYDAPVKLLVKHLHAMAQSPDEQLVVVSQVLVADINIGYEEIVNTQVLAFNGQPVKNLKNLVSMVENCKDEFLKFDLEYDQIVVLETKTAKAATQDILTTHCIPSAMSDDLKT

SEQ ID NO: 37180 - protein, 222 aa, Neisseria meningitidis MC58
MTTHLSNVAPDLQNYLNAIGEPEHPVLTRLREKTGHHRMGKMAIAREQAAVLVWLAKLIRAEKYLEIGVFTGYSSTALALALPEHGRITACDINVTFTDTARQVWNEAGVAHKISLHLQPALLTLDDLIAQGEAGSYDLALIDADKPPTPQYFERCLKLVRQGGIIAIDNILLNGRVMREAASDAPPSVGILKDFNQNLPNDPRIVPITLPVGDGLTLLLKK

SEQ ID NO: 37181 - protein, 333 aa, Bacteroides fragilis YCH46
MEFLTNEKLTIVGAAGMIGSNMAQTALMMKLTPNICLYDPYAPALEGVAEELYHCAFEGVNLTYTSDIKEALSGAKYIVSSGGAARKAGMTREDLLKGNAEIAAQFGKDIRQYCPDVKHVVVVFNPADITGLIVLLYAGLKPSQVSTLAALDSTRLQNELVKYLHIPASEIVNCRTYGGHGEQMAVFASTTKVQGEALTKIIDTPRMPMQDWEDLKVRVIQGGKHIIDLRGRSSFQSPAYLSIEMIAAAMGGQPFRWPAGTYVSDKKFDHILMAMETSITKEGVSYKEIQGTPEEQKEMEESYTHLCKLRDEVIAMGILPEINKWHELNKHIN

SEQ ID NO: 37182 - protein, 585 aa, Oryza sativa (japonica cultivar-group)
MERVAAAKKFIENHYRSQMKNIQERKERRFRLERQLESSQVPREQQINLLKDLERKETEYMRLKRHKICVDDFELLTIIGRGAFGEVRLCREKTSSNIYAMKKLKKSDMVVRGQVEHVRAERNLLAEVASHCIVKLYYSFQDSEYLYLIMEYLPGGDIMTLLMREDTLTEHVARFYIAETILAIESIHKHNYIHRDIKPDNLLLDKNGHMKLSDFGLCKPIDCSKLSTLNEDEPMGDDNLRESMDIDSSFSETTNGRRWRSQHEQLQHWQMNRRKLAFSTVGTPDYIAPEVLLKKGYGMECDWWSLGAIMYEMLVGYPPFYSDDPITTCRKIVHWRNHLKFPEDSKVSPEARDLICRLLCDVDHRIGSAGADQIKAHPWFRGVAWEKLYEMEAAFKPQVNDELDTQNFMKFEEMDNAPTRTGSGPSRKMMLNSKDLSFVGYTYKNFDAVKGLKHSDCFMKKEHRRTNKGATNSTAGRDVRKNAKCEDARIARCGCENVRWLPNDSRHVHARLDLATEAIARVLDSAFIQKATLKKKLVYSYLYYIKNSELRRWLADNKFDWRMAIDDVLVPLRMDHICNSQSHRK

SEQ ID NO: 37183 - protein, 422 aa, Streptomyces chartreusis
MDYCVAITGIGVRAPGGIGTNAFWELLTSGRTATRTISFFDPSPFRSRVAAECDFDARAEGFTPKELRRMDRAAQLGVAAAREALADSGLGGGGLDPADVSVTVGSAVGCTMGLEQEYSTVSDGGRQWLVDHTYAVPHLYGHFVPSSLAAEVAWAVAAEGPVSVVSTGCTSGLDAIGHACGLLREGAGKVAVAGATDAPISPITVACFDAIKATTARNDDPEHASRPFDRSRDGFVLGEGSAFFVLEPLEDARRRGAHVYATIRGFASRSNAYHMTGLRPDGREMAEAITAALGQARLRPDDIDYVNAHGSGTRQNDRHETAAVKRSLGAHAFDVPVSSIKSMIGHSLGAIGAIEIAACALAIEHDVIPPTANLEEPDPDCDLDYVPKTAREQRTDAVLTVGSGFGGFQSAMVLAAPGAAAR

SEQ ID NO: 37184 - protein, 408 aa, Streptomyces chartreusis
MSAKVVVTGLGVAAPNGLGTRAYWEATLRGRSGIAPLKRFDARGYPARLAGEVPGFEPAEHLPGRLLPQTDHMTRMALVAADWALADARADPERLAEFSMGVVTASSSGGFEFGQRELEKLWSKGSRYVSSYQSFAWFYAVNTGQISIRNGMRGPSGVLVSDQAGGLDAVAQARRLVREGLALVVSGGVDASLCPWGWVAQLSTGRLSTGDDPRSAYLPFSAAARGYVPGEGGAILVLEEEGAAARRRPGAPYGEIAGYGATFDPHPDSGRPPRLRDAIEIALGDAGLDPSDVDVLFADAAGLPDLDRVEAEAISDVFGPRGVPVTAPKTMTGRLYSGGAALDLAAALLSLNEGVVPPTVNVGRPAPEYAIDLVVRPRPAPLRVALVLARGHGGFNAAMVVRAPHARD

SEQ ID NO: 37185 - protein, 328 aa, Arabidopsis thaliana
MRPILMKGHERPLTFLRYNREGDLLFSCAKDHTPTLWFADNGERLGTYRGHNGAVWCCDVSRDSSRLITGSADQTAKLWDVKSGKELFTFKFNAPTRSVDFAVGDRLAVITTDHFVDRTAAIHVKAYCEDPEEQDAESVLVLHCPDGKKRINRAVWGPLNQTIVSCGEDKVIRIWDAETGKLLKQSDEEVGHKKDITSLCKAADDSHFLTGSLDKTAKLWDMRTLTLLKTYTTVVPVNAVSLSPLLNHVVLGGGEDASAVTTTDHRAGKFEAKFCDKILQEEIGGVKGHFGPINALAFNPDGKSFSSGGEGGYVRLHHFDSDYFNIKI

SEQ ID NO: 37186 - protein, 569 aa, Saccharomyces cerevisiae
MKLKTVRSAVLSSLFASQVLGKIIPAANKRDDDSNSKFVKLPFHKLYGDSLENVGSDKKPEVRLLKRADGYEEIIITNQQSFYSVDLEVGTPPQNVTVLVDTGSSDLWIMGSDNPYCSSNSMGSSRRRVIDKRDDSSSGGSLINDINPFGWLTGTGSAIGPTATGLGGGSGTATQSVPASEATMDCQQYGTFSTSGSSTFRSNNTYFSISYGDGTFASGTFGTDVLDLSDLNVTGLSFAVANETNSTMGVLGIGLPELEVTYSGSTASHSGKAYKYDNFPIVLKNSGAIKSNTYSLYLNDSDAMHGTILFGAVDHSKYTGTLYTIPIVNTLSASGFSSPIQFDVTINGIGISDSGSSNKTLTTTKIPALLDSGTTLTYLPQTVVSMIATELGAQYSSRIGYYVLDCPSDDSMEIVFDFGGFHINAPLSSFILSTGTTCLLGIIPTSDDTGTILGDSFLTNAYVVYDLENLEISMAQARYNTTSENIEIITSSVPSAVKAPGYTNTWSTSASIVTGGNIFTVNSSQTASFSGNLTTSTASATSTSSKRNVGDHIVPSLPLTLISLLFAFI

SEQ ID NO: 37187 - protein, 592 aa, Pseudomonas syringae pv. syringae B728a
MPTRTSRRTFVKGLAASGLLGGLGLWRSPAWAVANPGQPNGLSGTEFDLYIGETQVNITGNAKTAQTINGGIPGPLLRWREGDTVTLRVKNRLDEATSIHWHGIILPANMDGVPGLSFDGIAPDGMYVYRFKVRQHGTYWYHSHSGFQEQSGVYGPLVIDPKEPEPFEYDREHVIMLSDWTDEEPVQLMKTLKKQSDYYNNNQRTVGDFINDVGEKGWSETTRDRWMWAQMRMDPTDLADVSGATYTYLMNGQAPNMNWTGLFKPGERIRLRLINGSAMTYFDVRIPGLKMTVVASDGLHVKPVTVDELRIAVAETFDVIVEPAEGAYTLFAQSMDRTGYARGTLASRPGLQAAVPPLDPRPLSSMDDMGMAGMEHGSMNHAAAPATHDMSGMDHSKMGHDAMPGMDHAQTPAQKTPTPQSHPESENNNPLVDMQAMSTSPKLDDPGIGLRGNGRRVLTYADLRSTFEDPDGREPSRTIELHLTGHMEKYAWSFDGVKFSDAKPLMLKYGERVRVVLVNDTMMTHPIHLHGMWSDLEDENGQFMVRKHTIDMPPGSRRSYRVTADALGRWAYHCHMLYHMEMGMFREVRVEE

SEQ ID NO: 37188 - protein, 501 aa, Saccharomyces kluyveri
MESRLGWLTELQTETGANLRRTSIIGTIGPKTNNPETLVALRKAGLNIVRMNFSHGSYEYHQSVIDNARKSEELYPGRPLAIALDTKGPEIRTGTTTNEVDYPIPPNHEMIFSIDDKYAKACDDKVMYIDYKNITKVIEKGKIIYVDDGVLSFEVLEVVDEQTLKVKSLNAGKICSHKGVNLPGTDVDLPALSEKDKSDLRFGVKNGVHMVFASFIRTAQDVLTIREVLGEDGKDVKIIVKIENQQGVNNFDEILKVTDGVMVARGDLGIEIPAPQVFAVQKKLIAKCNLAGKPVICATQMLESMTYNPRPTRAEVSDVGNAVLDGADCVMLSGETAKGNYPINAVTIMAETALIAEQAIPYVATYDDLRNFTPKPTSTTETIAAAAVSSVFEQKAKAIIVLSTTGDTPRLVSKYKPNVPIVMVTRNPRAARFSHLYRGVFPFVYESDTESEWTKDVESRLNFGIAKAKEFGMLKEGDTIVTIQGFAAGVGHSNTLRVLTV

SEQ ID NO: 37189 - protein, 134 aa, Mesorhizobium loti MAFF303099
MDTHTYPVTRTDAEWRARLTPEQYAVMRNHGTERPGSCALLYEKRAGTFSCVGCDQPLFESKLKFESGTGWPSFNDPVPGSIETTVDRSYGMVRTECHCSRCGSHLGHVFEDGPPPTGLRYCINGVALNFEPAA

SEQ ID NO: 37190 - protein, 411 aa, Mucor circinelloides
MREVISIHVGQAGVQIGNACWELYCLEHGIQPDGHIPEELNTGDNSFDTFFSETSSGKHVPRTVMVDLEPTVVDEVRTGAYRQLFHPEQLITGKEDAANNYARGHYTVGKELVDSVLDRIRKLADNCTGLQGFLVFHSFGGGTGSGFGALLMERLSVDYGKKSKLEFSVYPAPQVATSVVEPYNSILTTHTTLEHSDVCFMVDNQAIYDICRRNLDIERPSYTNLNRLIAQLVSSITVSLRFDRSLNVDLNEFQTNLVPYPCIHFPLVHYAPLISSAKAYHEQLCVQEITHACFEPNNQMVKCDPRHGKYMSLCLLYRGDVVPKDTNAAISTIKTKRTIQFVDWCPTGFKVGINCRAPAAVPGGDLATVQRALCMLSNTTAIAEAWARLDHKFDLMYAKRAFVHWYVGEGM

SEQ ID NO: 37191 - protein, 128 aa, Brassica napus
SGRVGLGRRVVKILREKGPFLVLHLRYEMDMLAFSGCSHGCNRYEEEELTRMRYAYPWWKEKVINSELKRKEGLCPLTPEETALTLSALGIDRNVQIYIAAGEIYGGKRRLKALTDVFPNVVKKETPP

SEQ ID NO: 37192 - protein, 421 aa, Arabidopsis thaliana
MDGSMNFKNNNLGNEPPGDGGGGGGLTRQGSIYSLTFDEFQSSVGKDFGSMNMDELLKNIWSAEETQAMASGVVPVLGGGQEGLQLQRQGSLTLPRTLSQKTVDQVWKDLSKVGSSGVGGSNLSQVAQAQSQSQSQRQQTLGEVTLEEFLVRAGVVREEAQVAARAQIAENNKGGYFGNDANTGFSVEFQQPSPRVVAAGVMGNLGAETANSLQVQGSSLPLNVNGARTTYQQSQQQQPIMPKQPGFGYGTQMGQLNSPGIRGGGLVGLGDQSLTNNVGFVQGASAAIPGALGVGAVSPVTPLSSEGIGKSNGDSSSLSPSPYMFNGGVRGRKSGTVEKVVERRQRRMIKNRESAARSRARKQAYTVELEAEVAKLKEENDELQRKQARIMEMQKNQETEMRNLLQGGPKKKLRRTESGPW

SEQ ID NO: 37193 - protein, 201 aa, Triticum aestivum
PHWKHGSYPIKLFYTSNMPIILHSALITNLYFISQLLYRKYSGNFLVNLLGIWKESEYSGHSIPVGGLAYYVTAPSSMADILANPFHALFYVVFMLSACALFSKTWIEVSGSSAKDVAKQLKEQQMVMPGHRESNLQKELNRYIPTAAAFGGVCIGALTVLADFMGAIGSGTGILLAVTIIYQYFETFEKERATELGFFGF

SEQ ID NO: 37194 - protein, 484 aa, Staphylococcus aureus subsp. aureus MSSA476
MEDNKMNRSLNSRHISMIAIGGAIGTGLFVATGNIISQAGPGGAILAYLVIGVMLYFLMSSIGELATFYPVSGSFSSYSTRFIDSSLGFTMGWLYWALWSLVTSVDVIVASNVLYFWDTFKFFHPITWSLIFITILLLLNIFSVKSFGETEFWLSLIKVLTIIVFVIFGFLMIFGILGGHTYGFENYTKGQAPFVGGISGFLGVLLVAGFSVGGTEVVAVTAGESDDPKKSMPKAIKQVFWRILLFYVLSIAVIGAIIPYTDPSLLRASSSISQSPFTIVFDRVGIAFAASVINAVILTSLLSAANSGVYTTGRMLYSLSSDKKAPQFLSKLNKTTKLPLRALLTTYAVVVIVIIYANFNSNAVFNLLEIIGSMIIVVWGSSIWSQIRLRQAIKKQGQDPNKVLPYKAPFYPLGPIIVITTLLFLLFGGSVEYILKDQWLNAFKNFLPLIILALIYFIHKIIHKTKFVKLETINLKPHDYDNQK

SEQ ID NO: 37195 - protein, 667 aa, Desulfovibrio vulgaris subsp. vulgaris str. Hildenborough
MPNLRIIVVDDEQIVALDLRRTLEGLGYIVPAVETDADGAIDAAKRLRPDLVLMDIRLRRGDGVDAAHVITNQFDIPVVFLTAFSDEATLSRAMKAGPFGFLVKPFAERELYSTIEVALLKHRAVREIDEARQAAEHASLAKTSFLAGMSHEIRNTLNGIVGMTELVLDTPLSGEQRESLNTVLASSETLLTLLHDVLDFSRLEARQLRLVERPFSLDRLLKQVVQASRSEAERKNISLDFRVTPDVPDRLTGDATRLTQVLANLVGNAVKFTHKGSVIIEVSAIPQDQTLLESLFPDGPPSSLTLLFSIRDTGIGIADEHLRTIFEAFSQGAEETVQRYGGTGLGLAICRNLVEIMGGSIWARSSEGQGSSFHFTCRLRPETPAINTPSEHAQAPTSSATPASGARPLRVLVVDDDATGRTITCKMLRKRGHVCACAHDGATALQRLTADRFDLVLLDVKMHPMGGLELLRRIRNAQYPGVDRNIPVVAVTAHALKGDRERFLASGMTDYIAKPINARAFNAMLDRFALSASSARDIPVIPDRSALLAPSEVVRRHGGDHNLVEPVWKAFCDEAPRHFALLAGALEEGDAQQAARFNKRLRLASEHAGAVALAMLTERVGLCLVEDDTAGARQLVPRLESLLSRTIGLILSGMGTTEVPPIEHTTD

SEQ ID NO: 37196 - protein, 318 aa, Ralstonia metallidurans CH34
MNELEQLRQFTTVVADTGDFQLMKQYKPQDATTNPSLIFKAVQKPEYRPLLEQAVRDHHGNSGLDGVMDQLLIAFGCEILAIVPGRVSTEVDARLSFDTEATVAKARHLIGLYEQRGVARERVLIKIASTWEGIRAAEVLQRENIRCNMTLLFSLAQAVACAEAGAQLISPFVGRILDWYKKQAGEKWDPVANGGENDPGVRSVRQIYDYYKKFGYATEVMGASFRGTDQILSLAGCDLLTISPELLEQLAGGQSAVALKLSVEQAQAGNVARIAADEPAFRWQLNEDAMATEKLSEGIRLFAADAVKLEKLVGELAS

SEQ ID NO: 37197 - protein, 505 aa, Staphylococcus aureus subsp. aureus MSSA476
MSQQDKKLTGVFGHPVSDRENSMTAGPRGPLLMQDIYFLEQMSQFDREVIPERRMHAKGSGAFGTFTVTKDITKYTNAKIFSEIGKQTEMFARFSTVAGERGAADAERDIRGFALKFYTEEGNWDLVGNNTPVFFFRDPKLFVSLNRAVKRDPRTNMRDAQNNWDFWTGLPEALHQVTILMSDRGIPKDLRHMHGFGSHTYSMYNDSGERVWVKFHFRTQQGIENLTDEEAAEIIATDRDSSQRDLFEAIEKGDYPKWTMYIQVMTEEQAKNHKDNPFDLTKVWYHDEYPLIEVGEFELNRNPDNYFMDVEQAAFAPTNIIPGLDFSPDKMLQGRLFSYGDAQRYRLGVNHWQIPVNQPKGVGIENICPFSRDGQMRVVDNNQGGGTHYYPNNHGKFDSQPEYKKPPFPTDGYGYEYNQRQDDDNYFEQPGKLFRLQSEDAKERIFTNTANAMEGVTDDVKRRHIRHCYKADPEYGKGVAKALGIDINSIDLETENDETYENFEK

SEQ ID NO: 37198 - protein, 385 aa, Staphylococcus xylosus
MSNMQQTTGYVYANELLQYRFSNKHPFNQMRLKLTTELLMELGQLKQHHIISPRIATDDELSLIHAYDYIQAIRHASHGILSENEAKKYGLDGEDTLQFRMMHKHSARIVGGALNLADQIMSGTLTNGCHLGGGLHHSLPGRANGFCIYNDVAITISYLMQKYNQRVLCIDTDAHHGDGTQWSFYTNDQALIYSIHETGKFLFPGSGHYTERGAEKGFGYTVNIPLEPYTEDQSFLDVFKQTIEPVVASFKPDIIVSVHGVDVHYLDPLTHMSCTLNTLYEIPYIVKSLADTYTQGKVIMFGGGGYNIWKVVPRAWSHVFLALIGEQPPTGSLPERWLTKWQPYATCTLPTNWSDDKENYIEIPRRKEISEINMKQAQKVLSWFE

SEQ ID NO: 37199 - protein, 426 aa, Vibrio sp. Ex25
MDLAFDRQHIWHPYTSTLTPLTCYPVASANGVHIKLEDGTELVDGMSSWWSTIHGYNHPHLNQAAHQQIDQVSHVMFGGITHQPAISLCKKLLSLAPSNLEHVFLADSGSVAVEVSLKMALQYWHAKGERRPKFLTLRHGYHGDTFAAMSVTDPDNSMHSLYKGFLPEHIFAESPTCGFWDEWKSEDLADFEHKIETHHQELAAVILEPIVQGAGGMRIYHPEFLKGVRRLCDKHGLLLIADEIATGFGRTGKLLACEHADIQPDILCVGKALTGGYMTLSATLASKHVADTVCGGDADCFMHGPTFMGNPLACAVATASLELIEQGDWKQQTQQIETLFSELLPKLEEYDLVKNTRWLGAIGVVETHRPVNMETIQALFVEHGVWIRPFGKLIYMMPPFISKPEDIEKLVNAIDAALQRKDCFAS

SEQ ID NO: 37200 - protein, 402 aa, Dechloromonas aromatica RCB
MSSSIFAAVEMAPRDPILGLNEAFNADARTTKVNLGVGVYFDDNGKIPLLAAVKAAEDVRVKAALPRGYQPIEGNPAYNTAVQNLLLGKDSALIANGQVITAQALGGTGALKIGADYLKRLNPNAKVYISDPSWENHRALFESAGFVVENYPYYDAATRGVNFEGMKACLKGLDAGSVIILHACCHNPTGADLSDAQWSEVVAICQERGLVPFLDMAYQGFADGIDADAVAVRAFSASGLQFFASSSFSKNFSLYGERVGALSIVTAGKEESARVMSQVKRVIRTNYSNPPTHGGALVAGVLASAELRQMWETELAGMRDRIRAMRTGLVDAIKAQGVAQDFSFVAQQRGMFSYTGLTAAQVERMREEFGIYAVSTGRICLAALNTKNLDYVAKAIAAVTKP

SEQ ID NO: 37201 - protein, 383 aa, Vibrio sp. Ex25
MPAFKSRIESALADRKAQGLNRSMNVVFSGNQSILEYEGRRYINFSSNDYLGLANDQALVRAWQQGLSVYGSGSGASPMVTGFSAAHSNLEAALTEWLSYDRAILFGSGFSANQALLFTLLEKSDVLIQDRLNHASLMEAGALSPAKMKRFKHNDIEHLKSLLNSEDNHLVVTEGVFSMDGDCAPLADIADVTGNHDAWLAVDDAHGIGVLGESGGGSCELAAVKPEILIVTFGKAFGMSGAAILCDHATGDFLTQFARHHVYSTAMPPAQAYALTHAVSMVQEQSWRREKLTELSEVYRDSLNDVEGFVETQTSIKPFVIGESDLALRVAGACRQNGIWVTAIRPPTVPKGTSRLRITLTANHTNEQVKTLSMALKQALGTQ

SEQ ID NO: 37202 - protein, 552 aa, Sulfolobus shibatae
MATATVATTPEGIPVIILKEGSSRTYGKEALRANIAAVKAIEEALKSTYGPRGMDKMFVDSLGDITITNDGATILDKMDLQHPTGKLLVQIAKGQDEETADGTKTAVILAGELAKKAEDLLYKEIHPTIIVSGYKKAEEIALKTIQDIAQPVSINDTDVLRKVALTSLGSKAVAGAREYLADLVVKAVAQVAELRGDKWYVDLDNVQIVKKHGGSINDTQLVYGIVVDKEVVHPGMPKRIENAKIALLDASLEVEKPELDAEIRINDPTQMHKFLEEEENILKEKVDKIAATGANVVICQKGIDEVAQHYLAKKGILAVRRAKKSDLEKLARATGGRVISNIDELTSQDLGYAALVEERKVGEDKMVFVEGAKNPKSVSILIRGGLERVVDETERALRDALGTVADVIRDGRAVAGGGAVEIEIAKRLRKYAPQVGGKEQLAIEAYANAIEGLIMILAENAGLDPIDKLMQLRSLHENETNKWYGLNLFTGNPEDMWKLGVIEPALVKMNAIKAATEAVTLVLRIDDIVAAGKKGGSEPGGKKEKEEKSSED

SEQ ID NO: 37203 - protein, 435 aa, Halobacterium salinarum
MTMASKSDSTHDESGDEAADSTEPESALETARRQLYHAASYLDIDQNIVERLKYPKKVHEVTIPIERDDGTVEVFTGYRAQHDSVRGPYKGGLRYHPDVTRDECVGLGMWMTWKCAVMDLPFGGAKGGVAVNPKELSPEEKERLTRRFTQEIRDVIGPNQDIPAPDMGTDPQTMAWLMDAYSMQEGETTPGVVTGKPPVVGGSEGREEAPGRSVAIITQLVCEYYDQPLDETTVAVQGYGSVGANAARLLDKWGATIVAISDVNGAMYEPDGIDTASVPSHDEEPEAVTTYADTVISNEELLTLDVDVLIPAALGNVITKENAEAIAADLVVEGANGPTTSTADSILADRDVAVIPDILANAGGVTVSYFEWLQDINRRAWSLERVNDELEAEMQAAWRAVKDEYENRDVTWRDAAYIVALSRIAEAHEARGLWP

SEQ ID NO: 37204 - protein, 741 aa, Magnaporthe grisea 70-15
MAPPATTLKGQPLDRGALDTILRRRMFYTPSFEIYGGVSGLYDYGPPGCALQANIIDAWRKHFVLEDDMLEVDCSVLTPADVLKTSGHVDKFADWMCKDPKTGDIFRADHFVEEVLEQRLKGDKEARGQKVEDKEEDPKKKKKKLKGAQEAVKLDDKLVQEYEEILAQIDNYDGEALGNLITKYDLKNPATGLLPTPPVSFNLMFSTSIGPSSNLPGYLRPETAQGQFLNFAKLLEYNNQQMPFASASIGKSYRNEISPRSGLLRVREFLMAEIEHFVDPESGKKHPRFAEVADIELELLDRETQLSGKTTTKKVAIGKAVKDGLVDNETLGYFLARIHLFLEKIGVDKSKLRFRQHMANEMAHYACDCWDAELLTSYGWIECVGCADRSAYDLSVHAKKTNAPLIVRQRLPEPKIVEEWTVEVDKKKFGPKFKKDAKAVETVLLELNQDQRGKLEKELKDNGSITVDVPGVGDGKVQVEKDLVSITWTKRTENTREFIPNVIEPSFGIGRILYCLLEHNYWTRASDGGDEARGVLSFTPVVAPTKVLIVPLSRHDDFVPFVQKISQKLRSVGVSSRVDDSSATIGRRYSRNDELGTPLGITVDFQTVKDGTITLRDRDTTVQVRADQDKIVEAIQELVSGNKVWKDVQAELPAFEGQEIEVYNKHPEFGQPTSTPAFENIATGCCLDLKVNASDRSLMKNCSNPKDCGLTQLGFSSEGWQLGSESKSFVRVLPDPWNCCV

SEQ ID NO: 37205 - protein, 662 aa, Staphylococcus aureus subsp. aureus MSSA476
MFNEKDQLAVDTLRALSIDTIEKANSGHPGLPMGAAPMAYTLWTRHLNFNPQSKDYFNRDRFVLSAGHGSALLYSLLHVSGSLELEELKQFRQWGSKTPGHPEYRHTDGVEVTTGPLGQGFAMSVGLALAEDHLAGKFNKEGYNVVDHYTYVLASDGDLMEGISHEAASFAGHNKLSKLVVLYDSNDISLDGELNKAFSENTKARFEAYGWNYLLVKDGNDLEEIDKAITTAKSQEGPTIIEVKTTIGFGSPNKAGTNGVHGAPLGEVERKLTFENYGLDPEKRFNVSEEVYEIFQNTMLKRANEDESQWNSLLEKYAETYPELAEEFKLAISGKLPKNYKDELPRFELGHNGASRADSGTVIQAISKTVPSFFGGSADLAGSNKSNVNDATDYSSETPEGKNVWFGVREFAMGAAVNGMAAHGGLHPYGATFFVFSDYLKPALRLSSIMGLNATFIFTHDSIAVGEDGPTHEPIEQLAGLRAIPNMNVIRPADGNETRVAWEVALESESTPTSLVLTRQNLPVLDVPEDVVEEGVRKGAYTVYGSEETPEFLLLASGSEVSLAVEAAKDLEKQGKSVRVVSMPNWNAFEQQSEEYKESVIPSSVTKRVAIEMASPLGWHKYVGTAGKVIAIDGFGASAPGDLVVEKYGFTKENILNQVMSL

SEQ ID NO: 37206 - protein, 600 aa, Pseudomonas fluorescens PfO-1
MTDSSPAASPSSLKIYFRLLGYVRPYISLFLISIVGFLIFASTQPMLGYILKYFVDGLSNPEAVLFPTVPYLRDLQLLQAVPLLIILIAAWQGLGSYLGNYFLAKVSLGLVHDLRVQLFNNLLVLPNRYFDKHNSGHLISRITFNVTMVTGAATDAIKVVIREGMTVIFLFASLLFMNWKLTLVMVAILPLIAVMVRTASKKFRKQSKKIQLAMGDVTHVASETIQGYRVVRSFGGEAYEEKRFLDASQGNTDKQLRMTRTGAIYTPLLQLVIYSAMAILMFLVLYLRGDASAGDMVAYITLAGLLPKPIRQLSEVSSTIQKGVAGAESIFEQLDVEPEVDTGTVERDSVSGRLDVRNLSFTYPGTERQVLDDISFSVEPGQMVALVGRSGSGKSTLANLIPRFYHHDKGEILIDGVEVEQYKLLNLRRHIAQVTQHVTLFSDTVANNIAYGDLAGAPREDIEKAARDAYAMDFIAQLPEGLDTQVGENGVLLSGGQRQRLAIARALLKNAPLLILDEATSALDTESERHIQAALDQVMKGRTTLVIAHRLSTIEKADLILVMDQGRIVERGTHDDLLAQNGYYARLNAMGLDAPAEDIA

SEQ ID NO: 37207 - protein, 493 aa, Rhodobacter sphaeroides 2.4.1
MQSHAITIARRIHPVPASVSRLFLALMLGLALALAQAVAVKAQNAPASFAGLAEKISPAVVNITTSTVVAAPTQNSPLVPEGSPFEDFFRDFMDPQNRGEGPRRSEALGSGFVISEDGYIVTNNHVIEGADDIQIEFFSGKKLEAKLVGTDPKTDIALLKVDGNQPLPFVSFGNSDLARVGDWVVAMGNPLGQGFSVSAGIVSARNRALSGTYDDYIQTDAAINRGNSGGPLFNMDGQVIGVNTAILSPNGGSIGIGFSMASNVVVKVVQQLREFGETRRGWLGVRIQDVTPDVAEAMGLTEAKGALVTDVPEGPAKEAGMQSGDVIVTFDSAPVADTRDLVRRVADAPIGEAVRVIVMREGKTRTLSVTLGRREEAENEGPEAPGATEPTEPSTADLLGLTVAPLTAEQAGELGLPGGTEGLAVTDVDPASEAYSKGLREGDVITEAGQQKVVSIKDLQDRVTEAREAGRKSLLLLIRRGGDPRFVALTVSE

SEQ ID NO: 37208 - protein, 451 aa, Pasteurella multocida subsp. multocida str. Pm70
MTKHYDYLAIGGGSGGIASINRAASYGKKCAIIEAKALGGTCVNVGCVPKKVMWYGAQIAEAIHQYAPDYGFDLQVNKFDFAKLVESRQAYISRIHTSYHNVLAKNNVDVIQGFAKFVNANTVEVNGEHITADHILIATGGRPSHPAIPGAEYGIDSDGVFALSELPKRVAVVGAGYIAVELAGVMNSFGVKTHLFVRQHAPLRHFDPLIVDTLLEVIQQDGIQLHTQAIPQEVVKNADGSLTIKLEDGRSQEVDCLIWAIGRHPATDTINLEASGVETNARGFVKVDKYQNTNVEGIYAVGDIIEGGIELTPVAVAAGRRLSERLFNNKPNEHLDYNLVPTVVFSHPPIGTIGLTEPKAIEQYGEENVKVYKSSFTPMYSAVTQHRQPCRMKLVCVGKEEKIVGLHGIGFGVDEMIQGFAVAIKMGATKADFDNTVAIHPTGSEEFVTMR

SEQ ID NO: 37209 - protein, 452 aa, Rhodobacter sphaeroides 2.4.1
MAFDYDLFVIGGGSGGVRAARIAASEGGATVALAEESRMGGTCVIRGCVPKKLMVFASGYPDAVEDARAYGWDASIGGFDWPAFRGKLDRELDRLEAAYRSGLTSAGVEIFDERATVADAHTVALASGRKVTAKHILIATGGRPFVPDFPGCELAMSSDDVFQLESLPTSILVVGGGYIASEFACILHGLGVEVCQFYRGAQILRGFDDEARGHVASAMIDRGIHIKCGTDVIRLEKTERGVRAVTTDGSDQEFGAVLYATGRRPNTRGLGLEALGIELGRHGQIPVDGWSQTSVPSIYAVGDVTDRINLTPVAIREGHAFADTVFKGEPRQADHELVASAVFTQPELGSVGLSEEAAREQEPIEVYAAAFRPMQSLFAGRPDRVLMKLIVSQASRKVLGCHIVAPNAGEMIQLAAIAVKMGATKEDFDRTVAVHPTMAEELVTLRKPIRTA

SEQ ID NO: 37210 - protein, 410 aa, Anaplasma marginale str. St. Maries
MAKCGLFPMMDYEKVFLEKIQAIKEEGRYREFTGFRRIPGKFPYAIECQTEKVITLWCSNDYLGMSQNEHVLSAARDVSVNVGAGGTRNISGTTKEVIELERSLADLHNKPAALAFVCGYVANQTSISTILSMIPDIVVFSDAKNHSSMIEGIRASNRERHIFRHNDVEHLESLLEAAGPGPKIILFESLYSMDGDIAPIREICDLADKYNAITYLDEVHAVGMYGARGGGISEREGLVDRISVIQGTLSKAFGVMGGYIAASKGLVDVVRSFAPGFIFTTAISPLIAASARASVEHLKVSNVERERHRQVVQKVKNAMLNAGIEFVMTETHIIPIIVGDAEICREISGALLRDHGIYIQSINYPTVPHGTERLRITPTPFHTDDMIEKLIDGLLQVLQRFSVSLVKSCV

SEQ ID NO: 37211 - protein, 622 aa, Pasteurella multocida subsp. multocida str. Pm70
MDQNPQSQLKLLIAQGKEQGYLTYAEVNDHLPEELVDAEQIEDIIQMINDMGIQVLESAPDADDLMLNETIADEDAVEEATQVLSSVEAEIGRTTDPVRMYMREMGSVELLTREGEIDIAKRIEEGINEVQSAIAFYPEAISYLLDQYALVEEGGVRLADLITGFVDPNAMTESDVAEIEDTFDEDEDSDSVSATLNEEEEEEEESEEESTTDDSDSDNSIDPEVAREKFLELKTQHAKAVAMIEKHGRTSKKSKDQIQALADVFTQFRLVPKQFDTLVNLMSNMMKSVRLQERSIQKIVVDKAKMPKEQFQKVFIGHENKDTWLVKALSSGKTWSEKLAKHEEEIRYYIDNILEIERQTNLTVSQIREVCERISAGELKARRAKKEMVEANLRLVISIAKKYTNRGLQFLDLIQEGNIGLMKAVDKFEYRRGYKFSTYATWWIRQAITRSIADQARTIRIPVHMIETINKLNRISRQMLQEMGREASPEELAERMGMPEDKIRKVLKIAKEPISMETPIGDDDDSHLGDFIEDSTLELPLDSATAQSLKVATHEVLEGLTPREAKVLRMRFGIDMNTDHTLEEVGKQFDVTRERIRQIEAKALRKLRHPSRSETLRSFLDE

SEQ ID NO: 37212 - protein, 668 aa, Pasteurella multocida subsp. multocida str. Pm70
MATRRELANAIRFLSMDAVQKAKSGHPGAPMGMADIAEVLWRDFLKHNPSNPHWADRDRFILSNGHGSMLIYSLLHLSGYDLSIEDLKQFRQLHSKTPGHPEYGYAPGVETTTGPLGQGITNAVGFAIAEKTLAHQFNRPGHEIVDHHTYVFLGDGCLMEGISHEACSLAGTLGLGKLIAFYDDNNISIDGHVDGWFTDDTQKRFEAYGWHVIPAVDGHNPEQILEAVKQAQAETTKPTLIICKTIIGYGSPNKANSHDCHGAPLGDDEIAAAREFLKWEHAPFEIPAEIYAQWDAKEKGQVAEKAWEEKLAAYAKAYPELAAEFTRRVNAELPANWAAESQAFIEHLQANPANIASRKASQNAIEAYAKLLPEFLGGSADLASSNLTLWSGSKPIRAVENADGNYINYGVREFGMSAIMNGIALHGGFIPYGATFLMFMEYAHNAVRMAALMKQRSLFVYTHDSIGLGEDGPTHQPVEQTSALRLIPNLETWRPCDQVESAVAWKAAVERKEGPSALIFTRQNLAQMDRTAEQLANVARGGYVLRHCCENQNCPDLILIATGSEVELAMKAADVLDAEGVKVRVVSMPSTNVFDKQDAAYRESVLPSHITKRVAIEAGIADFWYKYVGFEGRVVGMNSFGESAPADQLFKLFGFTVENIVEKAKAIL

SEQ ID NO: 37213 - protein, 142 aa, Streptococcus thermophilus
MLNKIQHRNLNTYSVTPFDFFEEFSRNLFNDFKPNFIKTDIHETDNEYLVEAELPGIPKEDIQVTYENGVLTISGQQQIDAVNEDKKGKLIRSERSLTSVQRQYLLENVKEDEIKASYSDGVLKVTLPKDSNKEIKKSISIE

SEQ ID NO: 37214 - protein, 455 aa, Zea mays
  misc_feature (380)..(380): Xaa can be any naturally occurring amino acid
  unsure (1)..(455): unsure at all Xaa locations
SNTTHYRESWYACRYRSGIPGSTHASADAWADAWAKTGLQRPIAWIDENGNRYFPESFVQDQKIFMKKDFGNGYHDYISVESNGTREMNDQLGTSESSAESSNFGSSTEDVSSPKRARAENNSIIKKYCDMGEAIGENEPCTLLPTACNLLPRQANLGEVSRAQRTIEAVEKLLLQGMGSVIESKDIIGIYRTPLLDDHGQVRYHNHEKHVQVTRCHRGNANVRYAWLPCSKSTVHEMMLNSSLQVHKPPIKCAAYGEGTFLTPANRSDACVKFSAVDENGIVHMMLCRVIMGNVEIVHPGSKQHQPSSDYFDSGVDDLKNPQHYIVWDMNLNRHIYPEFVVTVKLPSKTKDYFVSQEDCQNSSDLSLVLNSSSPDCISXAISTKVSPQIMDMVIGCYEEFKSKKISRCELIKELRHVVGDRVLISTIMRLQDKLPPVERREAPGASAAKMVAKP

SEQ ID NO: 37215 - protein, 373 aa, Oryza sativa (japonica cultivar-group)
MVGGGALRRVGKYEVGRTIGEGTFAKVKFAQNTESGESVAMKVVDRSSILKHKMADQIKREISIMKLVRHPNVVLASRKKIFIILEFITGGELFDKIIRHGRLNEADARRYFQQLIDGVDFCHSKGVYHRDLKPENLLLDSQGNLKISDFGLSAWPAQGGALLRTTCGTPNYVAPEVLSHKGYDGALADTWSCGVILYVLLAGYLPFDEVDLTTLYGKIESAEYSFPAWFPNGAKSLIHRILDPNPDKRIRIEEIRNDEWFKKNYEPTREIESEEVNLDDVNAAFDDPEEDADHTLDDEAGPLTLNAFDLIILSQGLNLAALFDRRQDYDKLQNRFLSRKPAKVIMSSMEVVAQSMGYKTHIRNYKTYRHEDL

SEQ ID NO: 37216 - protein, 290 aa, Oryza sativa (japonica cultivar-group)
MGQPRAQLLPSMSMAALYLILATSPVISDMTDSLDMLWGNTQVLYDSTGHQIVSLSLDRWTTSAFRSKTKYLFARIDMDIKLVAKDSAGTVTTLYMITEGLWDIHDEIDLEFLGNTTGEPYTLHTNIYARGTGGREKQYRLWFDPTEDFHTYTIIWNPQMILILVDGTPIRQMKNQLRNDIPFPLYQPMRLYASIWDADDWATQGGRIKTDWSQAPFTAFFRNYQANACIPYKTAWICSQGSNDSSWFTQDLDEEGKQKLKDVDDNYKIYDYCTDSRRYPNGYPPECGSQ

SEQ ID NO: 37217 - protein, 191 aa, Saccharomyces kluyveri
IENSPTNGSNHSPLSEPQIAYIVRETCRGLKFLHDKHIIHRDIKSDNVLLDRSARVKITDFGFCAKLTDKRSKRATMVGTPYWMAPEVVKQREYDEKVDVWSLGIMTIEMLEGEPPYLNEDPLKALYLIATNGTPKLKHPELLSLEIKRFLSVCLCVDVRYRASTEELLHHSFFDMSCEPKDLTTLLEWKK

SEQ ID NO: 37218 - protein, 577 aa, Saccharomyces kluyveri
MFTRGVNGANRDIDALADNIGQLSFDASDPNKFIFEPTTPSKYKENGSTTGTPSPTKSTLYDDNAGDVSKLSMMDIDERTQDEIDVTKSPKKLPLNFYAKASSSKTKRLVNVCQMYFLDYYCDMFDYVISRRERTRQVMKYLEQQRGQGIQPQQISNEWQGYLNKETNTLRKRRLKPKNKDFEMITQVGQGGYGQVYLARKKDTKEICALKILNKKLLVKLNETNHVLTERDILTTTRSDWLVKLLYAFQDPQSLYLAMEFVPGGDYRTLLINTRFLQAPHARFYISEMFCAVDALHQLGYTHRDLKPENFLIDSKGHIKLTDFGLAAGTVSMERIESMKLRLEEVKNLEFPEFKERSMDDRRRMYKKLRESDVNYASSTVGSPDYMALEVLEAKSYDFTVDYWSLGCIMFESLVGYTPFSGSSTNETYENLRRWKQVLRRPRCENGRYAFSDRTWDLITRLIADPVNRVRSFEHVKRMKYFAEIHFDSLRSMSPPFIPQLDSETDAGYFDDFSNEADMAKYADVFKRQDRLTAMMDDSSADSKLVGFTYRHRKGKNGSSGVLYGGAEHADPFATFY

SEQ ID NO: 37219 - protein, 460 aa, Glycine max
EELLPIVYTPVVGEACQKYGSIFKRPQGLFISLKEKGKVLEVLKNWPERSIQVIVVTDGERILGLGDLGCQGMGIPVGKLALYTALGGVRPSACLPITIDVGTNNEKLLNDEFYIGLRQKRATGQEYSELLQEFMTAVKQNYGEKVLIQFEDFANHNAFELLAKYGTTHLVFNDDIQGTASVVLAGVVAALKLIGGNLADHTFLFLGAGEAGTGIAELIALEMSKQTKTPIEETRKKIWLVDSKGLIVGSRKASLQHFKQPWAHEHEPVGSLLEAVKVIKPTVLIGSSGVGKTFTKEVIEAVTSINEKPLVLALSNPTSQSECTAEEAYEWSEGRAIFASGSPFDPVEYKGKVYYSGQANNAYIFPGFGLGLVISGAIRVHDDMLLAASEALAKLVTEENYEKGLIYPPFSNIRKISANIAASVAAKAYELGLATRLPRPQNLVKYAESCMYTPVYRNYR

SEQ ID NO: 37220 - protein, 694 aa, Ashbya gossypii ATCC 10895
MAANGDDSGFLVATRARRANAGNQLMKLLEREHNRELQMDDDDGDINLLFEEEEDDGEFLLADQRQRENDDLFSDSDEDSSESGSGDEDGELGRHERKRRHALQKRKPPVIKKSRDGSAAKRYKPSYEQPDAKSLLVETRRTSSRTSVVRNKMEVYEKLAQAEVRRKEIQERIKKQKEAQLEPELTQEDRLRIAEETERINLQSLNKYKEQEVSKKQSRLAIQQRQKMKFKAGETILTWLTTQWSVTPMMEVYDREYWEQMVSKRQKRKRKYVRRKKEKPLSDKEKPVDSTLAMQEQTPNPTAEEPASERDGKVATNVPTTIAAKNNPTGADKVTSSDDLDTPALVTDSAPLPAENTALQLTDSEPPRSTGAEAISRPQSSSPMLFENSMARHISFVEKDEVAIIHVDDPPSNISTSRDQSHELDTPAMDGDYKKFDEGSGSASQGHSPNAEASYTELSNGSLDNEFDESDAAQSGDSQKKDWVPPEDVETEEDVVYEGPDQLVGKNFLLFTVFPDEPYNIASINELKAPLFGDQWAKPLHSRAYNVESYAKISWESHPHKKEEPTLIPDLSILDKFPEFGEYDKKLSKDVTVTTNKEMKVDIRTEAPSGVFLPNGIRKRCLITNKDSQYFDPKNGVPYADVEAIKTIQDLQDAIGEGTKDDPRPRYKWFGYGRGGIYLDVQQRPAKGVPDGFS

SEQ ID NO: 37221 - protein, 237 aa, Glycine max
MEGRMGLLFLVVLGAAWACDARELAKPDLLSKLSRKPDACALCEEYSTKVLDYLNENKTQQEIIDILHNICHQTSSFKQKCITLVDYYAPLFFLEIVTIQPGEFCHKVNLCQLITYISLLVQEDTSGFCKDTVSTLSAKLKDSDTKLEIIETSLKVCNSVEKYANKCKRMVLEYGPLVFDNAEKFLESTDICTAIYAMQIFNSGWPANLSFRFLWKQRSNRFVMYLLQKIAIYITTQ

SEQ ID NO: 37222 - protein, 340 aa, Zea mays
QQQQQGGEEQGEREFEEMLLREHSVSTDMGSLDWKRMKIPPVLTSSQSARLFKTMQPMKAIFEAQESLREELQRDPTDAEVAEATGMTVHQLRRRLDVGRAARNKLIKHNLRLVPYALNKYYPDMGGDERFDELCQAGANGLITAIDRFEPRGGFRISTYALFWIRHSIVRAMTLSSFTRFPFAMESDRQEIGRAREELAFDRGRPPTDEEVRARVGLSPQRYRDVLRMARPTYSLHARNRVTQEELIGEVTDAEAVGVDAGGKHDALLRLAIDDLLDSLKPKESLVIRQRFGLDGRGRRTLSEVAGNLSISREMVRKYELKALMKLKHPTRVEYLRRYM

SEQ ID NO: 37223 - protein, 185 aa, Sandersonia aurantiaca
MSLLSDLVNLNLTDTTEKIIAEYIWIGGTGMDLRSKARTLPGPVSDPSKLPKWNYDGSSTGQAPGQDSEVILYPQAIFKDPFRRGNNILVMCDCYTPAGSPSHQQRHIAAKLFSHPDVVVEEPWYGIEQEYTLLQKDVKWPIGWPIGGYPGPQGPYYCAAGADKAFGRDVVDAHYKACLYAGINI

SEQ ID NO: 37224 - protein, 492 aa, Vibrio parahaemolyticus RIMD 2210633
MCKTKIVATLGPASESRETLTKLIRAGANVVRLNFSHGTAQEHIARANLVREIAAELDTYVGVLVDLQGPKIRISCFENGAVLLNQGDVFTLSGTLDAQSGTQEMVGLDYPELIQDVNEGDILLLDDGRIQLKVSQLHRDEQWIKTTVLNSGKLSNRKGINLLGGGLSAPALTAKDIQDIDTAAKLRADFLAISFPRNAQDIEYARSLAQKAGCHAKIVAKVERAEVVETKEAMDDVIKASDIIMVARGDLGVEIGDARLPMVQKSLINRSKHWGKPVITATQMLESMIENPLPTRAEVLDVANAIIDGTDAVMLSAESAAGKYPIEAVEAMVRIAQGAEHELECNHDCWDTLQHLCSNPGKSFALSSMISASRVHQDLGVAILTQHGETPLLMSRCQSKTKIWALSDNPALLAQMTILRGVEPLYFKAAESHVDLAPQLVECLRQKANEAHISSILMTQLDSIEGMGEINACRLLSLNVSSHMKPAEEIAA

SEQ ID NO: 37225 - protein, 664 aa, Sinorhizobium meliloti
MSDRRALANAIRFLTVDVVQKANSGHPGTAMGMADIAEVLWNDFLRHNPANPKWINRDRFVQSNGHGSMLTYSLLHLSGYGLTVQDLKDHRKLHSRTPGHPEYGITAGVETTTGPLGQGFATAAGMALAEKKLAQEFNRDGFPVVDHFTYVFVGDGCLMEGVAQEAASLAGTLKLNKLIAVYDDNRISIDGETPGWFADDTAARFRALGWNVIADVDGHDAEAITAAFDAARRSTDKPTMICCKTIIGYGSPNKQGREEVHGAPLGVEEVARTREHLGWKHEAFVVPDTVMRAWDARPRGERAEAEWNALFTAYEAKHPELAAELTRRTAGRLPDDFDAVVASEAERILAQEPVRQPIRKASNRVLGNLLASVPEVIGGSADVSMSTLAWTGAARSITPDDFSGNFVHYGVREFGMSAMMNGMAAHGGLIPYGACYLVFSDYSRNAVRLSALMGLKTIFLYTHDSIGVGEDGPTHQPCEQLVALRAIPNMSLWRPGSELEALVAWESALKREGPSVIVAARQDGAVFAHRSGDLDGIRRGGYVLQDAGGKPDIVLVATGSEIGLVLEAAAVLEGQGKAVRLVSIPNGNLFAAQDRDYQESVLAFGTPTVFVEAASPLYWYQFLKGPGTVVGVDRFGESAPGPEIYRVMNLTAERIVSEAGQFLC

SEQ ID NO: 37226 - protein, 233 aa, Oryza sativa (japonica cultivar-group)
MVRGRTELKRIENPTSRQVTFSKRRNGLLKKAFELSVLCDAEVALIVFSPRGRLYEFASAPSLQKTIDRYKAYTKDHVNNKTIQQDIQQVKDDTLGLAKKLEALDESRRKILGENLEGFSIEELRGLEMKLEKSLHKIRLKKTELLEQQIAKLKEKERTLLKDNENLRGKHRNLEAAALVANHMTTTTAPAAWPRDVPMTSSTAGAADAMDVETDLYIGLPGTERSSNRSETG

SEQ ID NO: 37227 - protein, 153 aa, Archaeoglobus fulgidus DSM 4304
MYSDKVFDHFQNPRNVGKIEDADGVGTVGNPVCGDLMTIYIKVKDNRIEDIKFQTFGCAAAIATSSMATEMAKGKTIEEALKITRDAVAEALGGLPKQKMHCSNLAADALRRAIVDYFRKNGKIDKIKELGLEKELEKMEKGEMDDHGEYCEA

SEQ ID NO: 37228 - protein, 119 aa, Zea mays
MARSSFKLEHPFERRQAEANRIREKYPDRIPVIVEKAERSDIPDIDKKKYLVPADLTVGQFVYVVRKRIKLSAEKAIFIFVKNTLPPTAALMSAIYEENKDEDGFLYMTYSGENTFGLL

SEQ ID NO: 37229 - protein, 356 aa, Kluyveromyces lactis NRRL Y-1140
MPDMTNESSSKPAQINIGINGFGRIGRLVLRAALTHPEVKVRLINNPSTTPEYAAYLFKYDSTHGKYRGEVEFDDERIIIQNDHVSAHIPLSHFREPERIPWASYNVDYVIDSTGVFKEVDTASRHKGVKKVIITAPSKTAPMYVYGVNHVKYNPLTDHVVSNASCTTNCLAPLVKALDDEFGIEEALMTTIHATTASQKTVDGTSSGGKDWRGGRSCQGNIIPSSTGAAKAVGKILPELNGKITGMSIRVPTINISLVDLTFRTAKKTSYDDIMKALEQRSRSDMKGVLGVTKDAVVSSDFTSDSRSSIVDAKAGIELNDHFFKVLSWYDNEYGYSSRVVDLSIFMAQKDFEAGV

SEQ ID NO: 37230 - protein, 203 aa, Pseudomonas fluorescens PfO-1
MNEALHSLATTPAISPYNLALPRQARAALNGQRPRCLWLTGLSGAGKSTLANSLELHLHQFGRHTFLLDGDNVRNGLCRDLGMDDAGRRENIRRMAEVARLMVDAGLIVIVAAISPFRAERDAARRLFAEGDFVEVHVSTSLTVCERRDPKGLYQAVRQGRIQHFTGIDSPYEAPLAAECRIDTEEIEPSEACERLAALLLEK

SEQ ID NO: 37231 - protein, 107 aa, Brassica napus
  misc_feature (6)..(6): Xaa can be any naturally occurring amino acid
  misc_feature (14)..(14): Xaa can be any naturally occurring amino acid
  misc_feature (19)..(19): Xaa can be any naturally occurring amino acid
  misc_feature (22)..(22): Xaa can be any naturally occurring amino acid
  misc_feature (25)..(25): Xaa can be any naturally occurring amino acid
  misc_feature (35)..(35): Xaa can be any naturally occurring amino acid
  misc_feature (42)..(42): Xaa can be any naturally occurring amino acid
  misc_feature (51)..(51): Xaa can be any naturally occurring amino acid
  misc_feature (58)..(58): Xaa can be any naturally occurring amino acid
  misc_feature (60)..(60): Xaa can be any naturally occurring amino acid
  misc_feature (68)..(68): Xaa can be any naturally occurring amino acid
  misc_feature (84)..(85): Xaa can be any naturally occurring amino acid
  misc_feature (90)..(90): Xaa can be any naturally occurring amino acid
  misc_feature (100)..(100): Xaa can be any naturally occurring amino acid
  unsure (1)..(107): unsure at all Xaa locations
MRTLTXIKTYTSGXPVNAXSMXPLXDHVVIGGGQXASAVTTXDHRAGNFEXKFYDKIXQXEIGGVKGXFGPINALAFNPDGRSXXSGGEXGYVRLHHFDXDYFNIKI

SEQ ID NO: 37232 - protein, 769 aa, Xanthomonas campestris pv. vesicatoria str. 85-10
MRERAAGLRAWSILAVLAALAAALGAGLQWSSLQGPWRAVSAVSAVLAVVCGLCAALAAHRAAQAQHALAQRLEEADLARERLQQELRRHGELEQELLRAKQAAEAATLAKGEFLATMSHEIRTPLNGIIPMLELISSGQLSVDQRDMLQTATGSSLQLLRIVDDILDYSKLEANKLELEITTFNLRELLDGVIQLLQRTAEGRQLRLSLDIEPSVRLLVRGDPIRLRQVLGNLIGNAIKFTERGSVDIQLRRLGETRAQHLLRFQVRDTGIGIAPDQQARLFRSFAQADASTTRLYGGTGLGLAICKRIIDLMGGRIGVESEPGRGSTFWFEIPLLKVIGDLQQATGADAARVMVISSDARLSQRLKRLLDSWGVSHVLMETTQEALERVRRHNDSEGFRCVIADHDTLRYSARAVHRALARPENANSARLIWLYGEEPVPAELQDHATLVPRQSPDETLRALVLPPEPKPAHVTTLASAMIPEPLPPPMANAREVRILLVEDNPVNLLVAQKLLAVLGFEADTATDGEAALASMESTRYDMVFMDCQMPVLDGYAATRRWRAMETESGGRPIPIVAMTANAMAGDRERCLAAGMDDYLSKPVAREQLDACLQRWLPRQALLPGPSSAGQATHDPESASAAAQARALPILDNNVIDELYEVAGADTITILQLFLEDAPLIIEQLEAAAANRDSMQLRDLAHTLKSSSANVGAQAVSNAARRIELAARTGTIERPSVMVALVIAEYARARLALLGQVARLQAAASTTNQ

SEQ ID NO: 37233 - protein, 767 aa, Arabidopsis thaliana
  misc_feature (75)..(75): Xaa can be any naturally occurring amino acid
  misc_feature (123)..(123): Xaa can be any naturally occurring amino acid
  unsure (1)..(767): unsure at all Xaa locations
MASHIVGYPRMGPKRELKFALESFWDGKSSADDLQKVSADLRSDIWKQMSAAGIKYIPSNTFSHYDQVLDTTAMXLGAVPSRYGFTSGEIGLDVYFSMARGNASVPAMEMTKWFDTNYHYIVXPELGPEVKFSYASHKAVNEYKEAKALGVETVPVLVGPVSYLLLSKLAKGVDKSFDLLSLLPKILPVYKEVIAELKAAGASWIQLDEPLFVMDLEGHKLQAFSGAYAELESTLSGLNVLVETYFADIPAEAYKTLTSLKGVTAFGFDLVRGTKTIDLIKSGFPQGKYLFAGVVDGRNIWANDLAASLITLQSLEGVVGKDKLVVSTSCSLLHTAVDLINETKLDAEIKSWLAFAAQKVVEVDALAKALAGQTNESFFTANADALSSRRSSPRVTNESVQKAAAALKGSDHRRTTEVSARLDAQQKKLNLPILPTTTIGSFPQTVELRRVRREYKAKKISEEDYVKAIKEEIKKVVDIQEDLDIDVLVHGEPERNDMVEYFGEQLSGFAFTANGWVQSYGSRCVKPPVIYGDVSRPKPMTVFWSSTAQSMTKRPMKGMLTGPVTILNWSFVRNDQPRHETCYQIALAIKDEVEDLEKGGIGVIQIDEAALREGLPLRKAEHSFYLDWAVHSFRITNCGVQDSTQIHTHMCYSNFNDIIHSIIDMDADVITIENSRSDEKLLSVFREGVKYGAGIGPGVYDIHSPRIPSTDEIADRINKMLAVLEQNILWVNPDCGLKTRKYTEVKPALKAMVDAAKLIRSQLGSAK

SEQ ID NO: 37234 - protein, 474 aa, Magnaporthe grisea 70-15
MRLIASLALAASLASSITNGSTIPRRASGTPAAPRVIGLETERQHIPNPLERDRLRRRAAVMATLDNEQTLYFVNVSIGTPPQKLRLHLDTGSSDLWVNTPDSKLCSVSSQPCRFAGTFSANSSSTYQYINSVFNISYVDGSGANGDYVSDMVTVGNTKIDRLQFGIGYTSSSAQGILGVGYEANEVQVGRAQLKPYRNLPSRMVEEGLIASNAYSLYLNDLQSNKGSILFGGIDTEQYTGTLQTVPIQPNGGRMAEFLITLTSVSLTSASIGGDKLALAVLLDSGSSLTYLPDDIVKNMYSAVGAQYDSNEGAAYVPCSLARDQANSLTFSFSGIPIVVPMNELVLDLVTSNGRRPSFRNGVPACLFGVAPAGKGTNVLGDTFLRSAYVVYDLENNAISLAQTSFNATKSNVKEIGKGSNPVPGAVAVSQPVAATSGLSQNGGNRSGSGAIARAVPTLLLVGGIFSGSLLTLF

SEQ ID NO: 37235 - protein, 411 aa, Dechloromonas aromatica RCB
MARRRVVITGLGLISPVGNSVEEGWQNIIAGRSGIAPVTRFDTSTFPVQFAGEVKNFDITQYISAKDARRMDRFIHYGLAAGIQAVRDAGLDKEGAADPERVGVAIGSGIGGLPLIEETKDEYIAGGVRKVSPFFVPGSIINMISGNLSIEYGFKGPNLAIVTACTTGTHSIGEAARIIEYGDADVMVAGGAESTVSPLGMGGFSAARALSTRNDDPTTASRPWDKDRDGFVLGEGAGVLVLEEYEHAKARGAKIYAEVAGYGRSADAYHITAPNMDGPRRSMVNALKNAGIAPSDVQYVNAHGTSTPLGDKNESDAIKAAFGDAAYKIVVNSTKSMTGHLLGGAGGVESLFTVLAIHHQISPPTINIFNQDPECDLDYCANKARPMKIDIALKNNFGFGGTNGSLVFKRV

SEQ ID NO: 37236 - protein, 436 aa, Thermoplasma acidophilum DSM 1728
MYDAIIIGSGPGGYAAAIRLGQRQKKVALIEKDKIGGECLNYGCIPSKALIELANSINYLREMPGVSLNYSIDMKKWQEWKWSMINRLTGGVETLCKGYGVDVIRGEAYIVDATHVKIGEKVIEGKNLVIATGSKPVRIKGIDDVMYNREVLDLDHIPESTAIIGGGYIGVEIGTALAKLGSKVTIIEMMPSILPGTDQELVRHVERRLSQLGVRVMTGKKVLNTQHGDKIRVNMEGGEYVEAEKVLMTVGRVPNTEGFGLENLKLEMDGRFIKTDAHKRTSVPNVYAIGDVSGQPMLAHKAYYDADIAADNICGMDSVVEYRAMPYVIYSDPEIAYTGSKSAKSTRFPVAANGRSLTMNESIGTFNIYYDEKGIVTGAGLAAPHASELISELSLAVESGLMAMDIGLTIHPHPTVSEGVKETAEEAYGKPLHFKI

SEQ ID NO: 37237 - protein, 124 aa, Glycine max
TVGDSYRHGPSKHDPMDYYETKYQLLEPLLLCYESLQLCGSGVLADGRLADLIRRVATFGMVLMKLDLRQESSRHAETIDAITRYLDMGTYSEWDEEKKLDFLTRELKGKRPLVPPSIEKLSVD

SEQ ID NO: 37238 - protein, 337 aa, Thermoplasma acidophilum DSM 1728
MTEVLDQDEKNLIVRGFTSMVLGRYFDKKIITAQRQGLVGFYTPMMGQEATQAGAAMALSKEDSVYGYYRDVTMLIYLGHPIEKIFDQIMGNAEDSAKGRQMPSHYSAKEINFMSVPSPVATNLPLAVGAAYAKKYRKQEGIVITTFGDGGTSTPDFHAAMNFAAVFDLPVVFLCENNGWAISLPVEKQTKAEIYKKAEAYGMKGVYVDGNDFIKTYRTVKDAVEYARSGNPILVEARSYRMGPHSTSDDPSKYRKNEVQENSDLDPLVIAEKLMISGGYLNQAEIDKIKDESKKMIDEKFEERLKIPAPDPETMFDDVYSEITWAIEEERGEILRR

SEQ ID NO: 37239 - protein, 330 aa, Glycine max
MAQLPPKIPNMTPNWPDFSSLHQKMPSLQTTSSNQNPSWVDEILEFSVARRGAPRRSVSDSVTFLEAPLLDHHHCKGGSVVGGGGGNNEFERFDDEQFMSMFSDEASGNNNNNNTMMAHTLSSSNPSTPSDHNSINDEKEMENKEEEEKKQLKNESEDEDKSQCKQEITQLPNNDDSNNTSNANATCSSEKITDPKRVKRILANRQSAQRSRVRKLQYISELERSVTSLQAEVSVLSPRVAFLDHQRLLLNVDNSALKQRIAALAQDKIFKDAHQEALKREIERLRQVYHQQNIKKMDNNAAASPPSQSPSPSPKPRCETHTEKEQLINV

SEQ ID NO: 37240 - protein, 589 aa, Streptomyces coelicolor A3(2)
MASSMEKPLDHRYRGEHPIRTLVYLFRADRRRLAGAVAVFTVKHSPIWLLPLVTAAIVDTVVQHGPITDLWTSTGLIMFILVVNYPLHLLYVRLLYGSVRRMGTALRSALCTRMQQLSIGYHSRVSAGVLQAKVVRDVETVEQMVQQTAETGLGAFTVLTGGLVIIGVRTPEFLPVFLVVVPAASLLVARLRARLRTHNERFRHEVETLSSRVTEMTRLIPVTRAHGLEGKALRRMDGTLDRLLTSGMRLDLVNGRFGSLSWVVLNVVGVVVLAGAALISYYDVWGVTAGDVVMLSAFLTTLTNSTTTLAGLAPVITKGLESVRSVGEVLQAPELEDNEGKKELTALRGAVAFEGVGHLYDSDGRPAVSDFTLSVEPGETIALVGASGAGKSTVLNLVIGFLRPTSGRLLLDGHDMNTLDLRTYRRFVSVVPQESILFDGTIRENVAYGMDEADEETVRGALRDANALEFVDRLPRGLDTLVGEHGARLSGGQRQRLAIARALIRDPRVLVLDEATSALDTRSEALVQQALARLLRGRTTFVVAHRLSTVRGADRIVVMGEGRIQEIGTHEELLAGGGAYAALHSGQVA

SEQ ID NO: 37241 - protein, 215 aa, Vibrio vulnificus CMCP6
MKFNAAIFDMDGLLLDTERVCMRIFKQACDVQNLPFYQETYLSIIGRNSAGIDAILRAAYGDDLDRLHAEWRKRYNQVVLHEAIPVKEGVIALLEWLKAHQIPAAVATSTQKDVALVKLKLAGLDHYFESITTGCEVTHGKPDPEIYLLAASRLNVPPAQCLAFEDSNNGVRAAVAANMMTYQIPDLVEPCEEVIAFGHRICPSLTEVLKELQPD

SEQ ID NO: 37242 - protein, 123 aa, Triticum aestivum
MVSALSHVIRATPDQQQAYYPAGSAAVSGEQQHQHDAAAAAAIAEEQGRKRHYRGVRQRPWGKWAAEIRGPQKAARVWLGTFDTAEDAAIAYDEAALRFRGTKGKLNFPERVQGRTDLGFVVT

SEQ ID NO: 37243 - protein, 461 aa, Oryza sativa (japonica cultivar-group); identical to SEQ ID NO: 927

SEQ ID NO: 37244 - protein, 146 aa, Glycine max
PFVVQLRYSFQTKYRLYLVLDFVNGGHLFFQLYHQGLFREDLARIYTAEIVCAVSHLHSNGIMHRDLKPENILLDADGHVMLTDFGLAKQFEESTRSNSMCGTLEYMAPEIILGKGHDKAADWWSVGILLFEMLTGKVCILFLVNL

SEQ ID NO: 37245 - protein, 503 aa, Bartonella henselae str. Houston-1
MVKKTFFTTLAAVSFSAALETALFFSGCGSSLWTTKAHANSVFSSLMQQQGFADIVSQVKPAVVSVQVKSNKKKKEWFFSDFFSTPGFDQLPDQHPLKKFFQDFYNRDKPSNKSLQRSHRLRPIAFGSGFFISSDGYIVTNNHVISDGTSYAVVLDDGTELNAKLIGTDPRTDLAVLKVNEKRKFSYVDFGDDSKLRVGDWVVAIGNPFGLGGTVTAGIVSARGRDIGTGVYDDFIQIDAAVNRGNSGGPTFDLNGKVVGVNTAIFSPSGGNVGIAFAIPAATANEVVQQLIEKGLVQRGWLGVQIQPVTKEISDSIGLKEAKGALITDPLKGPAAKAGIKAGDVIISVNGEKINDVRDLAKRIANMSPGETVTLGVWKSGKEENIKVKLDSMPEDENMKDGSKYSNEHGNSDETLEDYGLIVAPSDDGLGLVVTDVDPDSDAADKGIRPGDVIVTVNNKSVKKVSDITDTIKNAQKLGRKAILLQVRTNDQNRFVALPIFKK

SEQ ID NO: 37246 - protein, 449 aa, Haemophilus influenzae R2846
MSKVASLDAFLTKVAQRDGYQPEFLQAVREVFTSIWPFLEANPKYRSEALLERLVEPERAFQFRVAWTDDKGQVQVNRAFRVQFNSAIGPFKGGMRFHPSVNLSILKFLGFEQIFKNALTTLPMGGAKGGSDFDPKGKSDAEVMRFCQALMTELYRHVGADTDVPAGDIGVGGREVGYLAGYMKKLSNQSACVFTGRGLSFGGSLIRPEATGYGLVYFAQAMLAEKGDSFAGKVVSVSGSGNVAQYAIEKALSLGAKVVTCSDSSGYVYDPNGFTTEKLAALFDIKNTKRGRVKDYAEQFGLQYFEGKRPWEVQVDIALPCATQNELELSDAQRLIKNGVKLVAEGANMPTTIEATEALLAADVLFGPGKAANAGGVATSGLEMAQSSQRLYWTAEEVDAQLHRIMLDIHANCKKYGTIEGQENINYVVGANVAGFVKVADAMLAQGVY

SEQ ID NO: 37247 - protein, 319 aa, Candida glabrata CBS138
MSTLKLFILRHGQSDLNHENIFCGWIDAKLTDKGRSQAKNAGQLIAQHCKSNGITLPQIGFTSRLLRTEQTMDVILNELQLGKKDEVSGQFNNPVFVVFDYIYTLAEIRSYLLSEKEENPISNEIPVLRTWRLNERHYGAWQGQRKPKVLKEYGEEQYMYIRRDYNGRPPEVDLEKEMIQKHDLGAATGYEFKEPNRSLKYELEELNQNIKLPYSESLSDVVARLEPFLDEIILKVAKEFDLDSCLIVGHGSSVRSLLKILEGVSDEDIKGVDIPNGIPLVIELDKTNNFKFLRKYYLDPELAKINAEKVRKEGFEENP

SEQ ID NO: 37248 - protein, 167 aa, Vitis vinifera
KIRQRTDALDAAGNTTAAIGKGFAIGSAALVSLALFGAFVSRAGIETVDVLTPKVFIGLIVGAMLPYWFSAMTMKSVGSAALKMVEEVRRQFNTIPGLMEGRAKPDYATCVKISTDASLREMIPPGALVMLTPLIAGTLFGVETLAGVLAGSLVSGVQVAISASNTG

SEQ ID NO: 37249 - protein, 404 aa, Vibrio parahaemolyticus RIMD 2210633
MQDALAVILAGGMGSRLSPLTDDRAKPAVPFGGKYRIIDFTLTNCLNSGLRKILVLTQYKSHSLQKHLRDGWSIFNPELGEYITAVPPQMRKGGAWYEGTADAIYHNLWLLSRNDAKYVVVLSGDHIYRMDYAAMLEEHKEKGAKLTVACMDVPVKDASAFGVMGIAENGLVKSFVEKPENPPTLPDDNAKSLASMGIYIFDMDVLKEALTEDAKLETSSHDFGNDIIPKLIDTESVYAYKFCGSKGRVDKDCYWRDVGTIDSFYEANMDLLEPVPPMNLYQSNWAIRTYEPQFPPARTVSSATGNEGIFINSIIATGVINSGGSVQHSIISSNVRIQDSATVVDSIIFDDVEVGEGSQLVNCIVDKHVRIPPNTQIGINKVEDAKRFKISEKGIVVIPESYQF

SEQ ID NO: 37250 - protein, 294 aa, Zea mays
SARARVFTQKIHDLIGTHTDVPAPDMGTNAQTMAWMLDEYSKFHGHSPAVVTGKPIDLGGSLGRDAATGRGVMYATEALLAEYGKCISGSTFVIQGFGNVGSWAARLIHEKGGKIIAIGDVTGSIRNTAGIDIPALVKHRNEGHAMKDFDGAEVLDSTELLVHDCDVLVPCALGGVLNKDNAPDVKAKFVIEAANHPTDPDADEILAKKGVVVLPDIYANSGGVVVSYFEWVQNIQGFMWDEEKVNDELEKYMSSAFQHLKAMCKSLDCDLRMGAFTLGVNRVARATLLRGWEA

SEQ ID NO: 37251 - protein, 343 aa, Bacillus cereus G9241
MKKIGVGIVGFGFSSTTFHIPLLQTIEEYDIRAVLSSKEEVVKETLSNVNVVSTIDELVKRADIDLVVITSPNTTHFPYVKEAILNGKHVVVEKPFVVSIEEGEELISLAEQHNVVLSVYHNRRFDNDFLTIKKLLEKNRIGNLYAYEAHFDRFRPHVRDRWREKNLPGSGILYDLGSHLIDQALSLFGKPNAISADVIKQRPGAEIDDYFHVILHYGVKRITLHSSSYVKQAGPHFTLHGDKGSIVKYGMDSQEEQLKNGMKPGDNGYGVDIEENFATLETEEEFVRIPTEVGCYDMYYKGVRDSIVNGEKPPVTAQEGLEVIKLIQLAIESSETGRVITVK

SEQ ID NO: 37252 - protein, 605 aa, Zea mays
MASAFGTASTCGIKHAPAGVALAAPMKHLSLVSPSLVSLPRKMRPRRKYNFRVNAAKELHFNKDGSAIRKMQNGVNKLADLVGVTLGPKGRNVVLESKYGSPKIVNDGVTVAKEVELEDPVENIGAKLVRQAAAKTNDLAGDGTTTSVVLAQGMITEGVKVVAAGANPVQITRGIEKTAKALVSELQKMSKEVEDSELADVAAVSAGNNYEIGNMIAEAMKKVGRQGVVTLEEGKSAENNLYSVEGMQFDRGYISPYFVTDSEKMTVEYENCQLLLVDKKINNARALITILEDAIRSGYLILIVAEDIEQEALATLVVNRLRGALKIAAIKAPGFGERKSQYLDDIATLTGGTVIREEVGLSLDKADNAVLGTAAKVVVTKDSTTIVGDGTTQEEVNKRVTQIKNQIEATEQEYEREKLNERIAKLSGGVAVIQVGAQTETELKEKKLRVEDALNATKAAVEEGIVVGGGCTLLRLASKVDAIIETLENDEQKVGAEIVRKSLSYPLKLIAKNAGVNGSVVTEKVLANENFRYGYNAATGEYEDLMAAGIIDPTKVVRCCLEHAASVAKTFITSDAVVVDAKVAEQAPSSPANPMAMGGGSGFGF

SEQ ID NO: 37253 - protein, 141 aa, Ralstonia metallidurans CH34
MAIERTLSIIKPDAVAKNVIGQIYARFEAAGLKVVAAKMVHLSRGEAEQFYAVHKARPFFKDLVDFMVSGPVMIQALEGESAIAKNRDLMGATDPKKAEKGTIRADFADSIDANAVHGSDAPETAAVEVAFFFPGMNVYSR

SEQ ID NO: 37254 - protein, 544 aa, Campylobacter coli RM2228
MNKQTKYIFVTGGVLSSLGKGIAAASIATLLKNSGLKVSILKADPYINVDPGTMSPFEHGEVFVTDDGAETDLDLGHYERFLDESLSQDNNFTTGRVYQSVIEKERRGEYLGKTIQVIPHIVGEIKDRIKKAGEGKDILIVEIGGTVGDIEGLPFLEAIRALRLEVGKNNAMNIHLTLVPFIKAAGELKTKPTQHSVGELRRIGISPDMIICRSEKALDRDLKDKIAISCGVEKNCVIESVDAASIYQIPLNFLKQDILNPIASILDLKNLKPNMENWDILVKRVIAPSNEVKIAFVGKYVDLKESYKSLTEAIIHAGAALDTRVELQWVDSEKLENLESAEAFKNVSGILVAGGFGYRGVEGKIKAINYARENKIPFLGICLGMQLALVEFARHVLKIEDANSSEFDDKCSNPIVYLIDEFMDASGKKQIRTAKTPLGGTMRLGSYECKVKPNSLLAKVYNNAKNIKERHRHRYEANPKYRKEFEDKGLIVSGESEGLIEAVELNNHPFFLAVQFHPEFTSRLERVNPVICGFIKAAISYEDD

SEQ ID NO: 37255 - protein, 233 aa, Glycine max
MALETLNSPTTTAPSFPFDDPTIPWAKRKRSKRCSRDHPSEEEYLALCLIMLARGGTTRRVSTPPPQPTPDPSTKLSYKCSVCNKSFPSYQALGGHKASHRKLAASGGEDQPTTTSSAASSANTASGGRTHECSICHKSFPTGQALGGHKRCHYEGNSNGNNNNSNSSVTAASEGVGSTHTVSHGHHRDFDLNIPAFPDFSTKVGEDEVESPHPVMKKPRPFVIPKIEIPQYQ

SEQ ID NO: 37256 - protein, 547 aa, Rhodobacter sphaeroides 2.4.1
MARYVFITGGVVSSLGKGLASAALGALLQARGFSVRLRKLDPYLNVDPGTMSPFEHGEVFVTDDGAETDLDLGHYERFTGVSARKTDSVSSGRIYSNVLEKERRGDYLGKTIQVIPHVTNEIKDFLRVGEDEVDFMLCEIGGTVGDIEGLPFFEAIRQFAQDKPRGQCIFVHLTLLPYVSASGELKTKPTQHSVKELRSIGIAPDVLLLRSERAIPEKEREKIALFCNVRKEAVIAAYDLKTIYEAPLAYHREGLDQAVLDAFGISPAPKPNLDRWVDVMDRLENAEGEVRVAIVGKYTQLEDAYKSIAEALTHGGMANRTRVRAEWINAELFEREDPSPFLEGFHAILVPGGFGERGTEGKIRAAQYAREKAIPYLGICLGMQMAVIEAARNLAQVKDAGSEEFDHEVGKKRFTPVVYHLKEWIQGNHIVERKHDDDKGGTMRLGAYTAALTPGSRVSEIYHATEIEERHRHRYEVDVRYREALEGCGLTFSGMSPDGRLPEIVEIKDHPWFIGVQFHPELKSKPFAPHPLFADFVRAAVEVSRLV

SEQ ID NO: 37257 - protein, 473 aa, Trametes villosa
MSFSSLRRALVFLGACSSALASIGPVTELDIVNKVIAPDGVARDTVLAGGTFPGPLITGKKGDNFRINVVDKLVNQTMLTSTTIHWHGMFQHTTNWADGPAFVTQCPITTGDDFLYNFRVPDQTGTYWYHSHLALQYCDGLRGPLVIYDPHDPQAYLYDVDDESTVITLADWYHTPAPLLPPAATLINGLGRWPGNPTADLAVIEVQHGKRYRFRLVSTSCDPNYNFTIDGHTMTIIEADGQNTQPHQVDGLQIFAAQRYSFVLNANQAVNNYWIRANPNRANTTGFANGINSAILRYKGAPIKEPTTNQTTIRNFLWETDLHPLTDPRAPGLPFKGGVDHALNLNLTFNGSEFFINDAPFVPPTVPVLLQILNGTLDANDLLPPGSVYNLPPDSTIELSIPGGVTGGPHPFHLHGTDNPGPWFLHCHIDFHLQAGLAIVFAEDAQDTKLVNPVPEDWNKLCPTFDKAMNITV

SEQ ID NO: 37258 - protein, 473 aa, Dechloromonas aromatica RCB
MKRFVALCSLCFLCSLPVVAQTRGLPDFSELAEKQGPAVVNISTTQIVRGQAQMMPFPFDENDPAFEFFKRFIPRNPGGAVPRDFENKSLGSGFIISGDGYILTNAHVVDGADEVAVRLTDKREFKAKIIGADKRTDVALIKIEATGLPAAKLGDPGQIKVGEWVVAIGSPFGFDNSVTAGIVSAKGRSLPQENYVPFIQTDVAINPGNSGGPLFNMRGEVVGINSQIYSRSGGYMGVSFAIPIDVAMDIQNQLRASGKVSRGRLGVVIQEVNKELADSLGLTKPIGAVVNSVEKGGPAERAGIEAGDVILKFDGKTINNSADLPRMVGATRPGGRSVVQVWRKGATRDIGVTIGEVPDEKQANTKVPRGKLSEQTANRLGLVVSELTPDQKRELKMNSGLLIEDVRGQGARTDLRAGDIVIAVIAKGATTEVKTVDQFNKLLAQFEKGSNVTLLVRRGEMQTFITVKGLNGG

SEQ ID NO: 37259 - protein, 520 aa, Trametes villosa
MGRFSSLCALTAVIHSFGRVSAAIGPVTDLTISNGDVSPDGFTRAAVLANGVFPGPLITGNKGDNFQINVIDNLSNETMLKSTSIHWHGFFQKGTNWADGAAFVNQCPIATGNSFLYDFTATDQAGTFWYHSHLSTQYCDGLRGPMVVYDPSDPHADLYDVDDETTIITLSDWYHTAASLGAAFPIGSDSTLINGLGRFAGGDSTDLAVITVEQGKRYRMRLLSLSCDPNYVFSIDGHNMTIIEADAVNHEPLTVDSIQIYAGQRYSFVLTADQDIDNYFIRALPSAGTTSFDGGINSAILRYSGASEVDPTTTETTSVLPLDEANLVPLDSPAAPGDPNIGGVDYALNLDFNFDGTNFFINDVSFVSPTVPVLLQILSGTTSAADLLPSGSLFAVPSNSTIEISFPITATNAPGAPHPFHLHGHTFSIVRTAGSTDTNFVNPVRRDVVNTGTVGDNVTIRFTTDNPGPWFLHCHIDFHLEAGFAIVFSEDTADVSNTTTPSTAWEDLCPTYNALDSSDL

SEQ ID NO: 37260 - protein, 874 aa, Leptosphaeria maculans
MQAAATSSPPLSPMESKQNTTDSWETWPPPAFAMLSSRAAGPIQSLPPSIITIGRPSKEGQGGKRSTCDAAWPDLKHFVPLFLQPRTYRERVPVPSTYATCLIAANSKYLHHPPSPSQSTVQHRKAPHSTAQLAVSARSSPPPHSMSSQYSKPRRTSTALDPYAAPHVYYGESHSRKHIRARTYSANLEHSGRNAPITDGFPQGRRISHDEVPAQPRRFLVQVEPTLKTLLAREDSDSNCQITIDDKGPKVISLGTLASNAHNKFDVRGTYMLSNLLQELTLAQDYGRKTIVLDEARLNENPVNRLARLIEHSFWDGLTRRIDGSNIAKVGVDPKDWTDDPRPRIYIPQGAPEQHEYYSRIAREHPEMRLDVVWLQKDCDNEEYVRDLNKAPGLLAIAMEEWIDPETKKKDLRGLPFVVPGGRFNELYGWDSYMESLGLLVNNRVDLVKSMVIHFCFCIKHYNKILNANRTYYLCRSQPPFLTDMALRCYDRIKHEPGALDFLREAILAAIKEYHSVWMSAPRLDPVTGLSRYRPGGMGVPPETEATHFKHVLDPYAKKHGMTFEEFVDAYNYQRVHEPELDNYFLHDRAVRESGHDTSYRLEKVAADLAVVDVNALLYKYEVDIGRCIRNFFNDALEIPAEFCTGDMKPGQVEKSAAWERRARRRRAQVDKYLWDEEAGMYFDYNTVKQQRTGYESATTFWPMWSGLATPRQASILMEKALPKLEVFGGLVSGTEKSRGKVGLDRPNRQWDYPFGWAPQQILAWVGMQRYGYDVEAQRLAYRWLFMVTKAFVDFNGVVVEKYDVTRKIDPHKVEAEYGNQGSDFKGVPREGFGWVNASYIYGLTLLNAHERRALGALTDWDTYAKAIADLGLA

SEQ ID NO: 37261 - protein, 561 aa, Enterobacter cloacae
MTTLKITGMTCDSCAAHVKEALEKVPGVQSALVSYPKGTAQLAIEAGTSSDALTTAVAGLGYEATLADAPPTDNRAGLLDKMRGWIGAADKPSGNERPLQVVVIGSGGAAMAAALKAVEQGAQVTLIERGTIGGTCVNVGCVPSKIMIRVAHIAHLRRESPFDGGMPPTPPTILRERLLAQQQARVEELRHAKYEGILDGNSAITVLHGEARFKDDQSLIVSLNEGGERVVMFDRCLVATGASPAVPPIPGLKESPYWTSTEALASDTIPERLAVIGSSVVALELAQAFARLGSKVTALARNTLFFREDPAIGEAVTAAFRAEGIEVLEHTQASQVAHMDGEFVLTTTHGELRADKLLVATGRTPNTRSLALEAAGVAVNAQGAIVIDKGMRTSSPNIYAAGDCTDQPQFVYVAAAAGTRAAINMTGGDAALDLTAMPAVVFTDPQVATVGYSEAEAHHDGIETDSRLLTLDNVPRALANFDTRGFIKLVIEEGSGRLIGVQAVAPEAGELIQTAVLAIRNRMTVQELADQLFPYLTMVEGLKLAAQTFSKDVKQLSCCAG

SEQ ID NO: 37262 - protein, 412 aa, Triticum aestivum
MSSKEKPTLGGQRIKTRKRNIAAPLDPSSFSDAIVQIYLDNAGDLELVAKSIESSDLNFSRYGDTFFEVVFIGVRTQPGTIKPEEEGERHPYSLIDCAAQREAILPYVLFIQKTLRRRPFLIKSLENVMRKFLQSLEFFEENERQKLAIFTALAFSQKLSGLPPETVFQPLLKDNLVAKGIVLSFITEFFKEYLKENSLDDLIALLKKGKMEDNLLEFFPSGKRTSEALSEHFTKEGLTSLVEYNSKKMFEVKLKEIKSTLTTMINEEAEISEVTEVVKQQVKDAKFPDIEVVRMLWDVLMEAVQWSGKNQQQNSNSALRQVNAWAGLMNAFCTSGKLELELIYKVQTQCYEDAKLMKLFPEIIRSLYDQDVLAEDTILLWFRKGSNQKGRQSFVKALEPFVKWLEEAEEEE

SEQ ID NO: 37263 - protein, 596 aa, Cryptococcus neoformans var. neoformans B-3501A
MIPPLDDSSLVKAADKAWWKSATVYQVYPASFCDHADAGHGTLLGILTKVDYLQSLGVDIVWLSPIYESPQADMGYDISNYRQIDKRYGSLEDWDRLLAALHQRGMKLVMDLVVNHTSDQHPWFKESRSSRDNPKRDWYIWRPPRYNEKNERIPPNNWKGTFGQGSAWEFDETTNEYYLHLFLKEQPDLNWENPQVRAEVYDLMHWWLKRGADGFRMDVINFIAKAPGLPDAPVIDPGRTYQSFGMMSINRPEVHGWLKEMNRAVLSHYDCFAVGECPGDEAVVSYAPYSVPHNKELQMVFHFHHQSFDRAAGGLGRVHNPDWKLSELKRVFNTWQIEMAREGVLRITTSLGSSPGWHLTILRTGHGQELGMINVPRGWGLVEYKDVETIQNSEAEVQHRQVMCGHANPDISDLLESNRITARDNGRTPMQWDSSLNAGFSKGEPWMRIHDDYREGWNAAAQVNDPDSAWSFWKQMLRLRKKYDAMIYGKHKPSPFDSEGTINHPATQGDFIALDESNEETYAYIREHPPSGQKLLVVLNLSRGNDGRGAPSTFVLPSGLDTSGSKLLISNGEVQEGQRIEGNILLGPWEGRIYLL

SEQ ID NO: 37264 - protein, 897 aa, Haemophilus somnus 129PT
MGISTPSNKFVIFLSEDLMPQKYSTLKNNINMLGHFLGETISDAQGSDILDLIENIRVLSRDSRSGDEKAREKLLDTLSTISNENIIPVARAFSQFLNLTNIAEQYQTISRKHIDQVASDRSLEALFERLKAQNVPAEKVISTVEKLLIELVLTAHPTEVTRRSLLHKYVEINRCLSRLEHDDLTQSESTKLKRRLMQLIALAWHTNEIRTQRPTPVDEAKWGIAVIENSLWKAVPDFCRQLNLHLEKNFGVQHSVNLAPVKFSSWIGGDRDGNPFVTAETTRQVLIMNRWKAAELFLADIQVLSEELSVVHCTEEFRAKYGDHLEPYRVVVKNLRAKLVKTVAYYGEILENKPSTINTNDILTDDQQLWEPLYDCYQSLHQCGMRIIANGILLDCLRRIRCFGLSLSHLDIRQESLRHTKALSEITRYIGLGDYSQWMEDDKQAFLIRELSSRRPLLPRNWTPSLETQEILETCRVIAQQPEGVISCYIISMARTASDVLAVHLLLKEAGVTYYLPVVPLFETLDDLNASKEVMTQLFNVGWYRGVINNKQMVMIGYSDSAKDAGMMAASWAQYRAQEQLVNLCEKMGVELTLFHGRGGTIGRGGAPAHAALLSQPPRSLKNGLRVTEQGEMIRFKLGLPAVAVNSFDLYASAILEANLLPPPEPKESWRAIMNELSDSSCNIYRSVVRGDKDFVPYFRSATPEQELSKLPLGSRPSKRNPNGGVESLRAIPWIFAWMQNRLMLPAWLGASASIRQSIEKGNKETIEEMCKNWPFFSTRIGMLEMVFSKTDTWLSEHYDLNLVKKELWYLGQSLREQLQADIKTILSLSHEDELMSDLPWIAESIALRNIYTDPLNLLQVELLRRLRENPENPNPDVEQALMITITGIAAGMRNTG

SEQ ID NO: 37265 - protein, 357 aa, Burkholderia vietnamiensis G4
MDGAALYEALAAAEPDPSRRDVFMQLAEAEHEHAEIWHAKLQQRGVDVATTRPTFKTRALRMLIRSFGPRFVLPALAAAEFADRDKYATQTDAGALSADESTHAAVVAAVARSNPSGGVKGSDIARAESWHRGWSGNDLRAAVLGANDGLVSNFCLVMGVAGAGASNKTILLTGLAGLIAGASSMALGEWLSVTNARELAQTQIARESEELERTPKAELRELALIYQAKGLDRDDAHRVAEEMMRNRDKALDTLTREELGLDPEELGGNPWRAAGTSFGLFALGAIFPAVPFFWSHGLVGIGISVSFSVLCLTVIGVVTSLFNGRSPWFSVIRQIVIGCVAAAFTYGAGALLGVSMS

SEQ ID NO: 37266 - protein, 457 aa, Thermoplasma acidophilum DSM 1728
MDMQHDDLNYEYLYGTTYPLMKNAGKAVADAVMKNYPDARTVCVVAGTGNNGGDAIVAGSILSAKYDVRVLIVTEVRSELARRALSEYGGRVIGLDGMEECMKCDVIIDGIFGVGISGDPKDPYRSVIENINRSCSHVVSVDIPSGLGTRYAVKPEITVTFTMEKYGMNQDNSGKIIVADIGIPPDVRKYAGPGDLLYYPKPDPSSHKGMNGTLAIVGGWEFHGSSVIAALAAERIGLDLVRVFVSPRNYQIVSGYDPGIIVRQVEKLDEKKLSEIYGNSAILLGPGMGKGDDAMEAARKIVSDSRVPMVVDADALDAVGAYSGSFAGRKIIITPHKGEFRRISGFEPTEENAISYARKKGLIVVLKGQVDVITNGEEVHYAKGGNARMTMGGTGDLLAGIISAFLARSVDPMRACLMGTYLNKALGEAAYSKHGYWYTVTDMISEIPGVMGKYIKI

SEQ ID NO: 37267 - protein, 311 aa, Yarrowia lipolytica CLIB122
MQITIVGSLNYDLVTISNRLPNAGETMFSQGFETHCGGKGANQALATARLSSKVPDVNVKMYGKVGKDNFGTQLKNNLKDSGVDVSAIHELDTKSGVAVIFVDQDSGENRIMVYAGANGEWTEADLTDDLFDTDMLIFQNEIPIDIVYKAIEKAGSKKPKVVYNPSPVDERGNIPAAVLNSIDFLVVNVTEATLISGVEINEEASKEEIWKQADQAADTLFKMGIKEAVVVTLGGNGVIYKTKTDSGHVPSNKVEKIVDTTGAGDTFLGGFSTSIIQGKTVSEAIAFGNKAGGIAVTRRGAAEGIPYDHEL

SEQ ID NO: 37268 - protein, 308 aa, Staphylococcus aureus subsp. aureus COL
MKNNKDEKIRISIINGFLGSGKTTLLTHYISELLKNDEKIKIIMNEFGTFDIDSNSISNEIEVHSLINGCVCCDLKQELVYELKAIALKGDVNHVIIEATGIAHPLELLVACQDPQIVNFFEKPIIYGVLDATRFLERHQYTENTVSLMEDQLKLSDMIIINKIDLITDDSLEKIDKQLGMICASIPTYKTTYGKVSLEELDLTVKDREISSHHHHHHGIKSMTYTFTGPIDRHLFYQFIMKLPESVLRLKGYVSFRDQPNAIYEFQYAYGLPDYGIIGMQLPLTIVIIGETLDTNHIRNQLDMLQFT

SEQ ID NO: 37269 - protein, 399 aa, Bordetella pertussis Tohama I
MFEHVQAYPGDPILSLNEDFQKDPRVGKVNLTIGIYFDEAGRIPVMAAAREAEAALLADIGPRPYLPMAGLPAYRDLVQELVFGAGSAARRAGRIATVQTLGGSGALKVGADFLKRYFPKSEVWVSDPSWENHRTIFEGAGFAVHTYPYYDDASGGLRFDEMLATVGGLPAGSVVLLHACCHNPTGVDLDRAQWDALIPVLRERGLIAFVDMAYQGFGDGLDDDAYAVRALAEAGVTCVVANSFSKNFSLYGERCGGLSVVCETAEQAGCVLGQLTSTIRAIYSNPPTHGARIVAQVLGTPALRQSWEAELGAMRERIQAMRRAIHDGLAGRVEPRMLQRYLSQRGMFTYTGLGAEQVETLRRDQGVYLLRSGRMCVAGLNRDNVAVAADAIASVLARG

SEQ ID NO: 37270 - protein, 536 aa, Streptococcus mutans UA159
MTKYIFVTGGVVSSIGKGIVAASLGRLLKNRGLKVTIQKFDPYINIDPGTMSPYQHGEVYVTDDGAETDLDLGHYERFIDINLNKYSNVTTGKIYSEVLRKERKGEYLGATVQVIPHITDALKEKIKRAATTTDSDVIITEVGGTVGDIESLPFLEALRQMKADVGADNVMYIHTTLLPYLKAAGEMKTKPTQHSVKELRGLGIQPNMLVIRTEQPAGQGIKNKLAQFCDVAPEAVIESLDVDHLYQIPLNLQAQNMDQIVCDHLKLDVPVADMTEWSAMVDKVMNLKKKTKIALVGKYVELPDAYLSVVEALKHSGYVNDTAIDLNWINANEVTPETVTDLLGDADGIIVPGGFGHRGTEGKIEAIRYARENDVPMLGICLGMQLTCVEYARHVLNLEGANSAELDPDTKYPVIDIMRDQIDIEDMGGTLRLGLYPCKLKSGSKTASAYSNQEVVQRRHRHRYEFNNAFRQQFEEAGFVFSGVSPDNRLVEVVELSDKKFFVAAQYHPELQSRPNRPEELYTAFITAAVENSQAH

SEQ ID NO: 37271 - protein, 626 aa, Ashbya gossypii ATCC 10895
MKGLLSSVVLLAAAWTHVSAEEHVFHWKTGMGKANPDTLKERPVITCNGEYPWPAVRVKQGDKVSVLLENGFEKWNTSLHFHGMFQNGTNQMDGPEMVTQCPIPPGGSMWYNFTVEGNKGTFWYHSHTAGQFQDGMKGVFVIDEANSTFAYNFDKEMTLELSEWYHDVAVDKIPEFLHLYNPTGAEPIPQNLIINNTRNLTWKVEPDTTYLLRLVNTGGFVSQYFWIEDHEMEVVEVDGVYVEKNVTNMLYITSAQRYSVLVHTKNETSRNFAIMQKMDDTMLDVMPDDLQLNATSYMIYNDQLPNPEEHRVGELEFLDDIYLVPIDEHRVPMLEDATAKIEVTVDMDNLMDGRNYAFFNNITYTEPKVPTLMTVLSAGDKATNPLVYGTNTNAHVLEHNDIVEIVINNKDTGRHPFHLHGHVFQVVARGPTAADQDDLDAADPIEYPGEDEGREYPMTRDTVYVNGKSYVVLRFKADNPGVWFFHCHLEWHMIQGLSLTIIEAPLEIQRTASQKLTDSTIGACQAAHVPHIGNAAAHTEDLLDLSGQNVQQKSIPEGFTPKGIVAMFFSCLAAVLGLITIAVYGLMDMKDAEGRVIEDLGVDPVVLSKGSLADEGSVSTSSDVKK

SEQ ID NO: 37272 - protein, 457 aa, Staphylococcus aureus subsp. aureus COL
MAIAVLLNRMFRMEHNPLFEYIYQQKEDIDACYFIIPEEDMSSASDLKAQFYRGTLQRFYQSLHAEKLTPYVMSYDDIISFCKENNISEVVTAGDIMSYHLEEYDILHQRSLFNEARIAVTLIRGNHYFKASKTMNQQGEPYNVFTSFYKKWRPYLRHRDVYHYDLKSFEDFVIASPDDLVFDDIAFGSSQIIEQNKWQHFLDQDIQNYESGRDYLPEVLTSQLSVALAYGLLDIIEIFNDLLARYDEDEANYEAFIRELIFREFYYVLMTQYPETSYQAFKPKYRQIKWSQNEADFNAWCEGQTGFPIIDAAIMELTQTGFMHNRMRMVVSQFLTKDLFIDWTWGEKFFRKHLIDYDAASNIHGWQWSASTGTDAVPYFRMFNPIRQSERFDAKALYIKTYLPIFNQIDAKYLHDTQRNESNLFEQGIELGSHYPRQMVDHQEKRTQVLATFKALD

SEQ ID NO: 37273 - protein, 382 aa, Colwellia psychrerythraea 34H
MNFDFIQHDVIEQKTKSRYRQLVCNSTTSQSNEIIINGKSYLNFSSNDYLGLNNHAEINKALREGADRFGVCSSSSSLVTGYHYAHQALEADICQWLNKPKCLLFSSGFAANLALFQALGKNEESHFYLDKLSHASMIDGAYHSKAKVKRFNHNNIEHLTTLLSKTTKYQNKLIASEGVFSMDGCQAKVLELAQVAKSQQAWLYLDDAHSIGVIGNEGQGSNYFADIDITMATMGKAIGTSGAFLTCSDDLHEYMVNFSRHYIYSTAISPAIAWATKKSIELIQKEQWRREKISELSALFTQLLAPEIELVSTESSIHAIIIGDEKKALTLSDKLKKQGIWLTAIRPPTVAVNSSRLRVTICANHNIKDIMYLAECINKAIA

SEQ ID NO: 37274 - protein, 180 aa, Zea mays
MDHEQRRQRQQHSPRGNAPGSGRCGSSSRKHKGGGKKPIKVVYISNPVRVKTSAAGFRALVQELTGRDADPSKYSPEDLAGAAVAAGDPDCGAAQGLSPGDTTAASSDTIVAIPSPAAVDHLHEHDASPAAAPADGGDYYDDEEEDEGGFGSQLLEKYYTVFSPPTLLYDHHPHNKFPYG

SEQ ID NO: 37275 - protein, 300 aa, Escherichia coli K12
MTMIRVACVGITVMDRIYYVEGLPTESGKYVARNYTEVGGGPAATAAVAAARLGAQVDFIGRVGDDDTGNSLLAELESWGVNTRYTKRYNQAKSSQSAIMVDTKGERIIINYPSPDLLPDAEWLEEIDFSQWDVVLADVRWHDGAKKAFTLARQAGVMTVLDGDITPQDISELVALSDHAAFSEPGLARLTGVKEMASALKQAQTLTNGHVYVTQGSAGCDWLENGGRQHQPAFKVDVVDTTGAGDVFHGALAVALATSGDLAESVRFASGVAALKCTRPGGRAGIPDCDQTRSFLSLFV

SEQ ID NO: 37276 - protein, 386 aa, Ralstonia metallidurans CH34
MPRQKTVSSGVVSRTRRPKQPEGKAGVARPDGGIDTEMFGDDPAAELVPVADEPIAPVSRVGLRNTDLNADDADHDDGDEEESEEDEEEGSSETTAEPDDFRTVLHTELAADTVQHYLNRISIKPLLSAPEELHFSTLAKGGDFSARQVMIERNLRLVVSIAKGYLNRGVPLLDLIEEGNLGLMHAIEKFDPSRGFRFSTYATWWIRQSIERAIMNQARTVRLPVHVIRELNQVLRAKRHLEKGGTDGRDASLEDIAHLLGKTPDEVQDVLALNEHTTSLDTPFDLDPGSSLLDFLSDEHNAAPDQEVAHRELENLMKLWLARLSEKHRYVVERRFGLNHIEPATLEELAEEMGLTRERVRQIQQEALVKLKRHFASQGVRKDAVL

SEQ ID NO: 37277 - protein, 300 aa, Betula pendula
MAHKSKILIIGGTGYIGKFIVEASAKSGHPTFALVRESTVSDPVKGKLVEKFKGLGVTLLHGDLYDHESLVKAFKQVDVVISTVGHLQLADQVKIIAAIKEAGNIKRFFPSEFGNDVDRVHAVEPAKTAFATKAEIRRKTEAEGIPYTYVSSNFFAGYFLPTLAQPGLTSPPREKVVIFGDGNARAVFNKEDDIGTYTIRAVDDPRTLNKIVYIKPAKNIYSFNEIVALWEKKIGKTLEKIYVPEEKLLKDIQESPIPINVILAINHSVFVKGDHTNFEIEASFGVEASELYPDVKYTTV

SEQ ID NO: 37278 - protein, 70 aa, Brassica napus
  misc_feature (46)..(46): Xaa can be any naturally occurring amino acid
  unsure (1)..(70): unsure at all Xaa locations
SVGKDVDRHEAPFTEEMPTLKIENFYYTLEDVLSEEIKTKESVTWXVHRPNTIFGFSPICLMNIGLSALS

SEQ ID NO: 37279 - protein, 675 aa, Helicobacter pylori
MKKKANEEKAPKRAKQEAKTEATQENKAKESKIKEVKNKESKVKESKIKETKAKEPVPVKKLSFNEALEELFANSLSDCVSYESIIQISAKVPTLAQIKKIKELCQKYQKKLVSSSEYAKKLNAIDKIKKTEEKQKVLDEELEDGYDFLKEKDFLEWSRSDSPVRMYLREMGDIKLLSKDEEIELSKQIRLGEDIILDAICSVPYLIDFIYAYKDALINRERRVKELFRSFDDDDENSVSDSKKDDDSGEYEENEERKKVVSEKDKKRVEKVQESFKALDKAKKEWLKALEAPVDEKKDELVRLLTLAYKRQTLKDRLYDLEPTSKLINELVKTMETTLKSGDGFEKELKRLEYKLPLFNDTLIANHKKILANITNMTKEDIIAQVPEATMVSVYMDLKKLFLTKEASEEGFDLDPNKLKEILEQIKRGKLISDRAKNKMAKSNLRLVVSIAKRFTSRGLPFLDLIQEGNIGLMKAVDKFEHEKGFKFSTYATWWIKQAISRAIADQARTIRIPIHMIDTINRINKVMRKHIQENGKEPDLEVVAEEVGLSLDKVKNVIKVTKEPISLETPVGNDDDGKFGDFVEDKNIASSIDHIMREDLKAQIESVLDQLNEREKAVIRMRFGLLDDESDRTLEEIGKELNVTRERVRQIESSAIKKLRSPQYGRILRNYLRI

SEQ ID NO: 37280 - protein, 729 aa, Leptosphaeria maculans
MSSQYSKPRRTSTALDPYAAPHVYYGESHSRKHIRARTYSANLEHSGRNAPITDGFPQGRRISHDEVPAQPRRFLVQVEPTLKTLLAREDSDSNCQITIDDKGPKVISLGTLASNAHNKFDVRGTYMLSNLLQELTLAQDYGRKTIVLDEARLNENPVNRLARLIEHSFWDGLTRRIDGSNIAKVGVDPKDWTDDPRPRIYIPQGAPEQHEYYSRIAREHPEMRLDVVWLQKDCDNEEYVRDLNKAPGLLAIAMEEWIDPETKKKDLRGLPFVVPGGRFNELYGWDSYMESLGLLVNNRVDLVKSMVIHFCFCIKHYNKILNANRTYYLCRSQPPFLTDMALRCYDRIKHEPGALDFLREAILAAIKEYHSVWMSAPRLDPVTGLSRYRPGGMGVPPETEATHFKHVLDPYAKKHGMTFEEFVDAYNYQRVHEPELDNYFLHDRAVRESGHDTSYRLEKVAADLAVVDVNALLYKYEVDIGRCIRNFFNDALEIPAEFCTGDMKPGQVEKSAAWERRARRRRAQVDKYLWDEEAGMYFDYNTVKQQRTGYESATTFWPMWSGLATPRQASILMEKALPKLEVFGGLVSGTEKSRGKVGLDRPNRQWDYPFGWAPQQILAWVGMQRYGYDVEAQRLAYRWLFMVTKAFVDFNGVVVEKYDVTRKIDPHKVEAEYGNQGSDFKGVPREGFGWVNASYIYGLTLLNAHERRALGALTDWDTYAKAIADLGLA

SEQ ID NO: 37281 - protein, 602 aa, Vibrio parahaemolyticus RIMD 2210633
MAKLDFHIVKRIREQIANGGTRVALKHKVAGAWQGITWEQFGQQVDTLSLALLAQGLGVQDKIGIFSNNMPQWTIADFAALQLRGVTVPIYPTNTAAQSAYIIDNADVKVLFVGEQPQFDAAVSIFEQCEQLELIVAMSDDIELGDHDFAISWKDFVAKGDTSHQAELDERLEQAKVDDLLTLIYTSGTTGQPKGVMLDYGNIAAQLEGHDQRLSLSQDDVSLCFLPLSHVFERAWTFYVLYKGATNCYLQDTMQVRDALSEVRPTVMCAVPRFYEKIFSAIHEKVSRAPIHRKIMFTWAVNMGAKMALCHQEKRKPSMMLRKAHALADKLVLSKLRALLGGRINFMPCGGAKLDETIGRFFHAIGINVKLGYGMTETTATISCWDDKCFDPDSIGMSMPGAQVKIGENNEILVRGPMVMRGYYKMPEETEKTFDEHGFLKTGDAGHIDENGNLFITDRIKELMKTSGGKYIAPQMIEGAIGKDHFIEQIAVIADTRKFVSALIVPCFDSLEEYAKELNIAYHDRVELIKHHQVVEMLEKRVNELQKELAKFEQVKKFKLLPRAFSMDDGELTPTQKLRRKVINDKYQDEIEEMYNEKSDKK

SEQ ID NO: 37282 - protein, 455 aa, Rhodobacter sphaeroides 2.4.1
MRDDAPNSWESRADASSFYGFTDLPSVHQRGTVVLTHGKGPYIYDVHGRAYLDANSGLWNMVAGFDHPGLIEAAKAQYERFPGYHAFFGRMSDQTVMLSEKLVEVSPFARGRVFYTNSGSEANDTMVKMLWFLGAAEGHPERRKIITRVNSYHGVTAVSASMTGKPYNSLFGLPLPGFIHVGCPHYWRFGQAGETEAEFTQRLARELEATIIKEGPDTIAGFFAEPVMGAGGVIPPSEGYFQAVQPVLKRYGIPLIADEVICGFGRTGNTWGCQTYDFMPDGIISSKNITAGFFPMGAVILGPELADRLQAASEAVEEFPHGFTASGHPVGCAIALKAIDVVMNEGLAENVRALTPKFEAGLAYLAENPNIGEWRGKGLMGALEAVKDKATKTPFPGDLSVSERIANSCTDHGLICRPLGQSIVLCPPFIMTEAQMDEMFEKLGAALKKVFAEVA

SEQ ID NO: 37283 - protein, 769 aa, Xanthomonas axonopodis pv. citri str. 306
MRERAAGLRAWSILAVLAALAAALGAGLQWSSLQGPWRAVSAVSAALAVVCGLCAAFAAHRAAHAQHALAQRLEEADLARERLQQELRRHGELEQELLRAKQAAEAATLAKGEFLATMSHEIRTPLNGIIPMLELISSGQLSLDQRDMLQTATGSSLQLLRIVDDILDYSKLEANKLELEITTFNLRELLDGVIQLLQRTAEGRQLRLSLDIEPSVRLLVRGDPIRLRQVLGNLIGNAIKFTERGSVDIQLRRLGETRAQHLLRFQVRDTGIGIAPDQQARLFRSFAQADASTTRLYGGTGLGLAICKRIIDLMGGRIGVESEPGRGSTFWFEIPLLKVIGDLQQATGADAARVMVISSDARLSQRLKRLLDSWGVSHVLMETTQEALERVRRHSDGEGFRCVIADHDTLRYSARAVHRALARPENASSARLIWLYGEEPVPAELQDHATLVPRLSPDETLRALVLPPEPKPAHATTLASAMIPEPLPPPMANAREVRILLVEDNPVNLLVAQKLLAVLGFEADTATDGEAALARMESTRYDMVFMDCQMPVLDGYAATRRWRAMETESGGRPVPIVAMTANAMAGDRERCLAAGMDDYLSKPVAREQLDACLQRWLPRQALLPGPSPAGQATHDPESASAAAQARALPILDNSVIDELYEVAGADTITILQLFLEDAPLIIEQLEAAAANRDSMQLRDLSHTLKSSSANVGAQAVSNAARRIELAARTGTIERPSVMVALVIAEYARARLALLGQVARLQADASTTNH

SEQ ID NO: 37284 - protein, 382 aa, Methanococcus maripaludis S2
MKQMDTEKLLMIPGPTMVPSRVLNTMALPIIGHRTSDFGDLTGDTVDMMKKVFQTENDTYIITGSGTAVMDMAISNTLDKGDKVINITNGNFGERFYKISSVYKADTIKYEPEWGDLADPKKLRELLEENEGIKAVTVVHNETSTGAKNPIEDLGNVVKDFDAIYIVDTISSLGGDYVNVDKFNIDICVTGSQKCIAAPPGLAAITVGEKAWDVVSKTETKSFYLDLNAYKKSWDAKKETPYTPSVSLTYAMNEALEMVLEEGLENRFKRHDLLARATRAGLEAMGLELFAKERARSVTVTSAKYPEGIDDKKFRGLLAEKYNIRVAGGQSHLAGKIFRVGHMGSAKEYQVLGTLAAIELAFKELGYNAEGGVAAAKKVLSN

SEQ ID NO: 37285 - protein, 242 aa, Staphylococcus aureus subsp. aureus MSSA476
MTKLFIPYIMGNKDLIENATLLSENGADIIEIGVPFSDPVADGPVIMEAGQQAIKQGITIDYIFNQLEKHGDQIKCNYVLMTYYNIICHYGEQAFFEKCRDTGVYGLIIPDLPYELSQRLKQQFSHYGVKIISLVAMTTDDKRIKDIVSHAEGFIYTVTMNATTGQNGAFHPELKRKIESIKAIANVPVVAGFGIRTPQHVADIKEVADGIVIGSEIVKRFKSNTREEIIKYLQSIQQTLNN

SEQ ID NO: 37286 - protein, 160 aa, Bifidobacterium longum DJO10A
MNDTMFSDLFDDPFFEGWRNTDNTMSAVMPANMMTTDVRETDKGYDVDIDMPGFKKEDINLELNNGYLTVSASRCSEHEDKAPAAEDEASDSKCACASDSGKWLRRERYMGSCSRSFYVGEDVKESDIHASYRNGTLCIQVPKMQAQPQVESKHQIAIEG

SEQ ID NO: 37287 - protein, 492 aa, Oryza sativa
MDPCKFRPSSSFDTKTTTTNAGAPVWNDNEALTVGPRGPILLEDYHLIEKVAHFARERIPERVVHARGASAKGFFECTHDVTDITCADFLRSPGAQTPVIVRFSTVIHERGSPETIRDPRGFAVKFYTREGNWDLLGNNFPVFFIRDGIKFPDVIHAFKPNPRSHVQEYWRVFDFLSHHPESLHTFFFLFDDVGIPTDYRHMDGFGVNTYTFVTRDAKARYVKFHWKPTCGVSCLMDDEATLVGGKNHSHATQDLYDSIAAGNFPEWKLFVQVIDPEEEERFDFDPLDDTKTWPEDEVPLRPVGRLVLNRNVDNFFNENEQLAFGPGLVVPGIYYSDDKMLQCRVFAYADTQRYRLGPNYLMLPVNAPKCAHHNNHYDGAMNFMHRDEEVDYYPSRHAPLRHAPPTPITPRPVVGRRQKATIHKQNDFKQPGERYRSWAPDRQERFIRRFAGELAHPKVSPELRAIWVNYLSQCDESLGVKIANRLNVKPSM

SEQ ID NO: 37288 - protein, 559 aa, Pseudomonas sp.
MTELKIIGMTCASCVVHVKEALEKIPGVHRADVSYASGKAELKVDEGASREQMQAAVEALGYRAAFEDAMVQARPGLLDKARGWLSSTDAGKEGDKLHVAVIGSGGAAMAAALKVVEGGARVTLIERGIIGGTCVNVGCVPSKIMIRAAHVAHLRRESPFDAGLSAMTPTVLRERLLAQQQDRVAELRHAKYESILESTPAISVLRGTARFQDGHTLSVKLAEGGEHIVAFDRCLVATGASAAVPPIPGLKDTPYWTSDQALASDTIPKRLAVIGASVVAVELAQAFARLGSEVTILARSAMFFHEDPAIGAAVTEAFRMEGIEVLEQTQASQVSHANGEFVLATNHGELRADQLLVATGRTPNTQGLNLEAADVQLDERGGIQIDERMRTSAADIYAAGDCTDQPQFVYVAAAAGTRAAINMTGGEAKLNLDVMPAVVFTDPQVATVGYSEAEAQHAGIETDSRTLTLDNVPRALANFDTRGFIKLVAEAGSGRLLGVQAVAPEAGELIQTAVLAIRNRMTVQELADQLFPYLTMVEGLKLAAQTFNKDVKQLSCCAG

SEQ ID NO: 37289 - protein, 215 aa, Triticum aestivum
MAEDTETRPASAGAEEREEGEIADDGDGSSAAAAGRITAHPLENAWTFWFDNPQGKSRQVAWGSTIHPIHTFSTVEDFWGLYNNIHNPSKLNVGADFHCFKNKIEPKWEDPICANGGKWTISCGRGKSDTFWLHTLLAMIGEQFDFGDEICGAVVSVRQKQERVAIWTKNAANEAAQISIGKQWKEFLDYKDSIGFIVHEDAKRSDKGPKNRYTV

SEQ ID NO: 37290 - protein, 326 aa, Ralstonia eutropha JMP134
MGLLVNGQWQDKWYDTASTGGRFVRKDAAFRNWITADGAPGPSGNGGFAAQAGRYHLYVSLACPWAHRTLIMRRLKGLDDMIGVSVVHWLMREEGWTFSEGPGVVPDTVNHARVLHQVYTAADPQYTGRVTVPVLWDRQRATIVNNESSEILRMMNSAFDAIGARPGDYYPAELREEIDAVNARVYDTVNNGVYKAGFATMQQAYEEAVWPLFETLDWLDNRLSMQRYLVGNRLTEADIRLFTTLVRFDPVYVGHFKCNLRRIADYPALSAFVRDIYQHSGIAETVNVEHIKRHYYESHRTLNPAGIVPAGPVLDLDAPHGRETLA

SEQ ID NO: 37291 - protein, 479 aa, Bacteroides fragilis YCH46
MNIKTKLLFGIGILAGMIILLVILSVVNLQILTATEPDSPVAMPALERALLWISVTGGICILTGLVLLIWLPRSINRPVKELTCGILEIANHNYEKRLDMRGYEEFREVSDSFNRMAEKLTEYRDSTLADILSAKKFLEAVVNSIHEPIIGLNTEREILFINNEALNVLNMKRENVIRKSAEELSLKNDLLRRLIRELVTPGEKNEPLKIYADNKESYFQASYIPIENAAAEEGEARNLGDVILLKNITEFKELDSAKTTFISTISHELKTPISAIMMSLQLLEDKRVGSLNGEQEQLSKNIRDNSQRLLDITGELLNMTQVEAGKLQMMPKITKPIELIEYAIKANQVQADKFNIQIEVDYPQEKIPKLFVDSEKIAWVLTNLLSNAIRYSKENGRVVIGVRHKKEYIELYVQDFGKGIDPRYHQSIFDRYFRVPGTKVQGSGLGLSISKDFVEAHGGTLTVQSEPGKGSCFVIRLKA

SEQ ID NO: 37292 - protein, 380 aa, Vibrio vulnificus CMCP6
MKKLSKLLISAAIALPLMFTLLAKVGVADTMDKTAPNLASLPVATLAGGCFWCTESDLEKLNGVYDVVSGYSGGEMANPTYRQVSSGKTGHIEVIQFRYDPNVVSYEAVLDYFLRHIDPTDDKGSFVDRGPQYRPAIFYHTAEQKQIAERFLKEVDEAKIYPKPIKTELIEYTAFYPAEQYHQDYYKKSSLKYKYYRHASGRDQYLDKVFGDDRIEQPKTLRQLIDEKALTKNAKTYSRPSDKEIKAQLTDLQYYVTQKEGTERPFNNEYWDNKEAGIYVDIVSGEPLFSSTDKYKSGTGWPSFTKPISSAYIVTKTDYKLLYPRTEVRSKFADSHLGHVFDDGPAPTGLRYCMNSAAMKFIPVAQMEKMGYGEYLTLFQ

SEQ ID NO: 37293 - protein, 301 aa, Prochlorococcus marinus subsp. marinus str. CCMP1375
MTSVQAQEKNNLWTYMGHSVYCCSNSPDLSREALIKSPAVLLIHGFGASTDHWRHNLPVISTFCEVHAIDLLGFGRSSKPAGLEYGGPLWKDQVSAYVKEKIGRPTVLVGNSLGGYAALAAGCALGDEAAGVVLLNAAGRFSEEKVTVKGFWSTARKTFADIFLKNALFQRILFENLRQPSTIRRTLNQVYIDSSNVDDDLVESIRRPSLDKGAFGVFRSVFEPAGPQGRPLDELFAQLSSPLLLVWGNQDPWMNAPSKRAMYSRFTPASTKEVILDAGHCPHDEVPEKVNTALLEWLKTL

SEQ ID NO: 37294 - protein, 250 aa, Arabidopsis thaliana
MTKNYPTVSEDYKKAVEKCRRKLRGLIAEKNCAPIMVRLAWHSAGTFDCQSRTGGPFGTMRFDAEQAHGANSGIHIALRLLDPIREQFPTISFADFHQLAGVVAVEVTGGPDIPFHPGREDKPQPPPEGRLPDATKGCDHLRDVFAKQMGLSDKDIVALSGAHTLGRCHKDRSGFEGAWTSNPLIFDNSYFKELLSGEKEGLLQLVSDKALLDDPVFRPLVEKYAADEDAFFADYAEAHMKLSELGFADA

SEQ ID NO: 37295 - protein, 237 aa, Triticum aestivum
  misc_feature (167)..(167): Xaa can be any naturally occurring amino acid
  unsure (1)..(237): unsure at all Xaa locations
RPTLPAKVVGVDTSGSGVPLTVEPAAGGEQTVIEADVVLVSAGRVPYTAGIGLDAIGVETDKGGRVLVDNRFMTNVKGVYAIGDAIPGPMLAHKAEEDGVACVEFIAGKEGHVDYDTVPGVVYTHPEVASVGKTEEQVKASGVAYQVGKFPLLANSRAKAIDDAEGXVKVISEKETDRILGVHIMSPGAGEIIHEAVLALQYGASSEDIARTCHAHPTVSEALKEACMNTYDKAIHM

SEQ ID NO: 37296 - protein, 269 aa, Yarrowia lipolytica CLIB122
MYPRSVGCASFALWSPGVIPSSIPDHPYSRPGNPVQNLYILATPRKNKSPPNTNTHLFDKMSDATEKKDTAAPAAAAAPAAAATPSFGIPSASSSLSAMADKPKEEPKKEDDKEEKKEAEDEAPESPDVHFEPIVQLEKVEIKTEEEEEDVLYKTRAKLFRFDKEEKEWKERGTGDAKFLQHKESKKVRLLMRRDKTLKICANHIIAPEYELKPNVGSDRSWVYSVGADFADGEPTAELLAIRFANSDSANTFKEEFEKAQEENKKASK

SEQ ID NO: 37297 - protein, 326 aa, Ralstonia eutropha JMP134
MLTARVIRVHEFGPPEAMQLERMELPPPAEGEVVVRQTAMGFNFIDIYQRRGTYPLPPGTGLGHEAAGVVEAVGAGVRGFAPGDRVAYMNAGLGAYADYRNVPAAKLVRVPDSISDEQAAAVIFKGMTAQYLVRHTHAVKAGDAVLIHAAAGGVGQILSSWAKALGAYVIGTAGSPEKCELARRMGCDVAIDYRSGDWVKAVREATGGRGVRVVYDAVGKDTFLGSLDCAQQFGLVVLYGAASGPAPAIEPELLNKKGCLFLTRPSVFPHNADPDMFRANAKDLFDAVTAGHVKVEIGARFALQDVAKAHAAAESRATTGAIVLLP

SEQ ID NO: 37298 - protein, 338 aa, Ralstonia eutropha JMP134
MHTENLSSWTHSHVFDSGNHAAERGTRLVMAITAATMVVEIAAGWWFNSMALLADGWHMSSHALAIGMTAFAYAAARRYASDARFAFGTWKIEVLAGFASAIFLLGVAALMAIGSVERLFSPQAIHYREAMAVTALGLLVNLGCALILGGAHHHHDGHDHHGHHHGHAHDHHDHGHHHDINLRSAYLHVLADAATSVLAIVALAGGWWLGWSWLDPVMGLVGAALVGRWALGLLRQSGTVLLDREMDHPVVEEVREVLAAFEDAGDARDATRVTDLHVWRVGKQQFASIVCLVTHDATLTPQSVREALSVHEELVHVTVEISVCRDQHWHAASATQQV

SEQ ID NO: 37299 - protein, 381 aa, Zea mays
MDSTSCLLDDASSGASTGKNKPAPVPAPAAVTGKPLQRVGSSGASAVMDAAEPGAEADSDGARRAPGGVGGKLPSSKYKGVVPQPNGRWGAQIYERHQRVWLGTFTGEAEAARAYDVAAQRFRGRDAVTNFRPLAESDLDPDAAAELRFLASRSKAEVVDMLRKHTYGEELAHNRRAFAAASPAASPPPENNRRPPAASSSSSPAAAREHLFDKTVTPSDVGKLNRLVIPKQHAERHFPLRRVQGGRAPILSFEDAAGKAWRFRYSYWNSSQSYVLTKGWSRFVKEKGLHAGDAVGFYRSAAAGRQLFIDCKLRPKAVRLFGVDLLTEPPRSAAAVAQPEPEQEEIAVSKNKRARDAIAASATPVHIAFKKQRVDVALTTT

SEQ ID NO: 37300 - protein, 443 aa, Ralstonia eutropha JMP134
MDAAKTVIPDLDALWMPFTANRQYKAAPRLLASASGMYYTTHDGRQILDGCAGLWCVAAGHCRKEIAEAVARQAATLDYAPPFQMGHPLSFEAATKVAAIMPQGLDRIFFTNSGSESVDTALKIALAYHRARGEGQRTRFIGRERGYHGVGFGGMAVGGIGPNRKAFSANLMPGTDHLPATLNIAEAAFSKGQPTWGAHLADELERIVALHDPSTIAAVIVEPLAGSAGVLVPPVGYLDKLREITTKHGILLIFDEVITAFGRLGTATAAERFKVTPDLITMAKAINNAAVPMGAVAVRREVHDTVVNSAAPGAIELAHGYTYSGHPLAAAAAIATLDLYQRENLFGRAAELSPVFEAAVHSVRSAPHVKDIRNLGMVAGIELEPRPGQPGARAYEAFLKCLERGVLVRYTGDILAFSPPLIISEAQIAELFDTVKQALQEVQ

SEQ ID NO: 37301 - protein, 150 aa, Apium graveolens var. dulce
REFDFIAEYIWIGGTGVDVRSKSRTISKPVEHPSELPKWNYDGSSTGQAPGDDSEVILYPQAIFKDPFRGGNNILVICDTYTPQGEPIPTNKRHKAAQIFSDAKVLGEVPWFGIEQEYTLMQQNVNWPLGWPVGGYPGPQGPYYCAITSE

SEQ ID NO: 37302 - protein, 81 aa, Triticum aestivum
  misc_feature (21)..(21): Xaa can be any naturally occurring amino acid
  misc_feature (56)..(56): Xaa can be any naturally occurring amino acid
  unsure (1)..(81): unsure at all Xaa locations
MVNAIAGCPSKIWFRMPTEWXPHEQRWLGWTYRSHNWWEHAEPSRNTFERTAIGIXKWGRFTICPSAKQPPCVHQLMEHQP

SEQ ID NO: 37303 - protein, 401 aa, Neurospora crassa
MDDSCTPPDQAASGTGSDAAGVSPQASQPSTASAGNSNTDPNLNGPLTLRPGHELPFVAPSSYLRPKPSSRTMSDKTSNPLDKDQMQGLRGIREFLKVRTSYDVLPLSFRLVILDNDLLIRKSLNILIQNGIVSAPLWDSRNGTFAGLLTSTDYINVIQYYCQFPHEIDQVDQFRLSSLRDIERAIGVLPLETVSVHPMRPLYEACRRMLKTRARRIPLIDTDDETGRETVVSVITQYRILKFIAVNNEQHTMLLKKPVREIGLGTYTDLATANMNSSVLDVIHLMVKYNISAVPIVDKDNRVMNLFEAVDVIPCIKGGAYDELTATVGDALSQRAEDFGGIYTCSEEDRLDSIFETIRKSRVHRLIVVDDDSRLKGIISLSDILKYVLLYGEEEDDLQEY

SEQ ID NO: 37304 - protein, 820 aa, Triticum aestivum
  misc_feature (408)..(408): Xaa can be any naturally occurring amino acid
  unsure (1)..(820): unsure at all Xaa locations
MKAYLGDTIEQVCTKKQAGTGPEFPGYRRPTRPASPPPRCSPPSPSASAHPGKMASHIVGYPRMGPKRELKFALESFWDGKSSAEDLEKVATDLRASIWKQMADAGIKYIPSNTFSYYDQVLDTTAMLGAVPDRYSWTGGEINLSTYFSMARGNATVPAMEMTKWFDTNYHFIVPELAPSTKFSYSSHKAINEYKEAKALGVDTVPVLVGPVSYLLLSKAAKGVEKSFSPLSLLSSILPVYKEVIAELKAAGASWIQFDEPTLVKDLESHQLSAFSAAYSELESALSGLNVLVETYFADVPADSYKILTSLSSVTAYGFDLERGTKTLELVKSGFPAGKYLFAGVVDGRNIWADDLAASLATLQSLEAVVGKDKLVVSTSCSLMHTAVDLVNETKLDDEIKSWLAFAXAQKVVEVNALAQGHWAGQKDEAYFSANAAALASRRSSPRVTNEEVQKAATALKGSDHRRATTVSARLDAQQKKLNLPILPTTTIGSFPQTVELRRVRREYKAKKISEEEYTNAIKEEISKVVKIQEELDIDVLVHGEPERNDMVEYFGEQLSGFTFTANGWVQSYGSRCVKPPIIYGDVSRPNPMTVFWSKMAQSMTARPMKGMLTGPVTILNWSFVRNDQPRFETCYQIALAIKKEVEDLEAGGIQVIQIDEAALREGLPLRKSEHAFYLDWAVHSFRITNCGVQDTTQIHTHMCYSNFNDIIQSIINMDADVITIENSRSDEKLLSVFREGVVYGAGIGPGVYDIHSPRIPSKEEIADRVNKMLAVLDTNILWVNPDCGLKTRKYAEVKPALTNMVEAAKQIRAELAKAQ

SEQ ID NO: 37305 - protein, 470 aa, Vibrio parahaemolyticus RIMD 2210633
MKKTKIVCTIGPKTESVEKLTELVNAGMNVMRLNFSHGDYEEHGTRIANFRKVMEATGKQLAILLDTKGPEIRTIKLEGGNDVDLVAGQEFTFTTDTSVVGNKDKVAVTYAGFAADLNVGNTILVDDGLIEMEVIATTDTEVKCKVLNNGALGENKGVNLPGVSVNLPALSEKDKNDLKFGCEQGVDFVAASFIRKASDVQEIREVLAANGGENIHIISKIENQEGVDNFDEILELSDGIMVARGDLGVEIPAEEVIFAQKMMIEKCNRARKMVITATQMLDSMINNPRPTRAEAGDVANAVMDGTDAVMLSGETAKGKYPVEAVTIMAQIAKRTDSVLKAELGSRLDSPRLRITEAVCKGAVDTAEKLAAPLIVVATEGGKSARSVRKYFPTANILALTTNKKTAAQLVLTKGVTPVVVDAIESTDAFYVAGKELALESGLGNKGDIVVMVSGALVASGTTNTASVHVL

SEQ ID NO: 37306 - protein, 318 aa, Listeria monocytogenes str. 4b F2365
MTASVFVAGKLLPETMEALSKWDVKAFSGEENITEAELIKNVTEVDAIICPLSSPISAKVLESAKNLKIVANIGAGFDNIDVKKAQELGIAVTNTPDVSTEATAELTLGLILDVARRISEGDRLCRETPEQFKGWAPTFFLGTELSGKTLGIIGLGRIGQAVAKRAAAFGMKIIYSGHHPKEAAKEWNAEFVSQEELLKRSDVVTIHAAYSPSLKYLLNETTLKTMKSSAFLINAARGPVVEEAALIKALETGVIAGAALDVFEFEPKIGEDLAKLDNVVLTPHIGNATVETRTAMGKIAIANVEAVLAGKAPLHSVY

SEQ ID NO: 37307 - protein, 382 aa, Trichodesmium erythraeum IMS101
MQLTTTQLDNSNIDTPKHGLPVTIITGFLGSGKTTLLNHILQNQEGVKTAVLVNEFGEIGIDNELIVSTNADDTMVELSNGCVCCTINEDLVNAVYKILGKSEKFDYMVVETTGLADPLPVALTFLGTELRDMTRLDSIITLVDAANYSVDLFKSQAAHSQIVYSDIILLNKTDLADEAYLDLLEVKIRNLKKDARIIRTKKSQVALPLVLSVGLFESDKYFELAEVDQHHNHGHDHHDHDHEHEHHHHDHEHEHHHHDHGHEHHHHDHGHEHHHHEHDHYHSNHLENDGFTSISFQSDKPLSMKKFQHFLDNKLPANVFRAKGILWFQESSLRHIFHLSGKRFSIEDDQWNGNNHKNQLVFIGQNLDHEKLRSQLKDCVIS

SEQ ID NO: 37308 - protein, 276 aa, Bacillus halodurans C-125
MANNLQATTTLHNGVKMPWFGLGVFKVSEGDEVIQSVKDAIRAGYKSIDTAAVYGNEEGVGKAIAESGVPREELFITSKVWNADQGFDSTISAFNTSLKKLGLDYLDLYLVHWPVKGKYVETWKALEKLYQDGLVRAIGVSNFQVHHLKDVLEAGSIVPMVNQVEYHPHLTQTELHDFCKQNKIQLEAWSPLKQGQLLNDPTIVAIAEAHQKTPAQIILRWDLQNEVVTIPKSVKKDRIISNADIFDFQLTEEDMQKINELNKNERVGPDPDNFDF

SEQ ID NO: 37309 - protein, 278 aa, Zea mays
MGNSSGRAEDLADADMDDGNNVRRASSSSAGYVRGGGSSSSPPVSPPRPHSPRMFVPQSPVTPLQRAAEVPPPVFNQILMNQQQEDSDGPPQKKIPTLLMWTLGGRNIYVEGSWDNWTSKKLVEKSGKDHTILLMLSSGVHRYRFIVDGERRFIPDLPCETDNMGQIVNLVDVHDFVPDSVESVSELMAPPSPDSSYGFHVPGEKEFSKEPPQLPSQLYLGVLNSRSTEEGCARPRHVVLDHLYIEKGWGAQPLVALGYTHRFRSKYVTCVLYKAIER

SEQ ID NO: 37310 - protein, 290 aa, Arabidopsis thaliana
MALRIRKATTTLLFSGGITHGTDRIARTGALLSRWISSVSSSSAVVADDESGGIYGLGSALKEYEDYRRSLYGEITHKALLVDAVGTLLVPAQPTAQIYKNIGEKYGVEYSEAEILTRYRRAYQKPWGGSHLRYVNDARPFWQYIVTASTGCSDSQYFEELYSYFTTEQAWKLCDPDAGKVFKAIKEAGVKVAIVSNFDTRLRPLLRALRCEDWFDAVAVSAEVEAEKPNPTIFLKACELLEVNPEDAVHVGDDRRNDVWGARDAGCDAWLWGSEVTSFKQVAQRIGVKV

SEQ ID NO: 37311 - protein, 334 aa, Pichia ciferrii
MAITVGINGFGRIGRLVLRIALSRKDIQIVAINDPFIAPEYASYMFKYDSTHGRYSGEVSHEGENIVIDGKKIRVYQERDPVNIPWGKDGVDYVIDSTGVFKELDSAQKHIDAGAKKVVITAPSSTAPMFVVGVNEDKYTPDLNIISNASCTTNCLAPLAKIINNKFGIEEGLMTTVHSITATQKTVDGPSHKDWRSGPTASGNIIPSSTGAAKAVGKVIPELAGKLTGMSLRVPTVDVSVVDLTVKLLKDATYDEIKAAVKEAAEGPLKGVVGYTEDQVVSSDFLTDNRSSIFDAEAGIWLSPRFVKLIAWYDNEYGYSTRVVDLLEYVASKN

SEQ ID NO: 37312 - protein, 574 aa, Kluyveromyces lactis NRRL Y-1140
MLRSTVKPGNLTLKRSTQLLSRRLYSSHKELKFGVEGRAALLKGVETLAEAVSATLGPKGRNVLIEQPFGAPKITKDGVTVARAITLEDKFENMGAKLLQEVASKTNEAAGDGTTSATVLGKAIFTESVKNVAAGCNPMDLRRGTQAAVEKVIQYLSENKKEITTSAEIAQVATISANGDAHVGKLLASAMEKVGKEGVITIREGRTLEDELEVTEGMRFDRGFISPYFITDAKSGKVEFEKPLILLSEKKISSIQDILPSLELSNQTRRPLLIIAEDIDGEALAACILNKLRGQVQVCAVKAPGFGDNRKNTLGDIAILSGGTVFTEELDLKPENATIQHLGSCDSVSITKEDTVILNGNGPKENIETRIEQIKNSIDLTTTNSYEKEKLQERLAKLSGGVAVIRVGGSSEVEVGEKKDRYDDALNATRAAVEEGILPGGGTALLKASRVLDEVATENFDQKLGVDIIRKAISRPARKIIENAGEEGSVIVGKIIDEYGQDFTKGYNAAKGEYTDMLAAGIIDPFKVVRSGLVDAAGVASLLATTEVAIVDAPKPAGAAPAMPGGMPGMPGMM

SEQ ID NO: 37313 - protein, 296 aa, Oryza sativa
  misc_feature (189)..(189): Xaa can be any naturally occurring amino acid
  misc_feature (200)..(200): Xaa can be any naturally occurring amino acid
  misc_feature (237)..(237): Xaa can be any naturally occurring amino acid
  unsure (1)..(296): unsure at all Xaa locations
MASDLRPPEHQVAGHRASADKLGPLVDGEGLFYKPLQAGERGEHEAAFYAAFTAHPAVPPRVRGAFFPRFHGTRFLPAPASPGGAPYPHIVLDDLLAGLPSPCVADVKIGACTWPPRSPDPYVAKCLAKDRETTSALLGFRVSGVRVVDARGGAVWRPDRSELKGIDAAGVRRVLRRYVSTGGGDGLDXARFAAAVYGGXGGVLAQLRELKAWFEEQTLYHFYSASILFGYDARAAXAAAPGGGSGGVRVKLVDFAHVDDGDGVIDHNFLGGLCSLIKFIGDIVAEVTEKASSDHS

SEQ ID NO: 37314 - protein, 338 aa, Bifidobacterium longum DJO10A
MSERNEHNDGNTQTAYFAGGCFWGLERYFQNVDGVTDTTVGYAQSTVESPAYEQVCAGGTDAAETVKVEFNPAQVSLRTLTLLFLEVIDPFSVDQQGEDRGRQYRTGMFYTDETQRAVYVAALEQLVDRQPQRPAVLVEPLRNFYPAEAHHQDYLVNNPGGYCHVPIAAIANVKRRQKYVERIWDLTLEQFAVTQNAATERPFVNEYDEEFEPGIYVDIVSGEPLFSSRDKFDSGCGWPAFSRPIAGDLLTEHEDHRIPGRDRIEVRTSDTQIHLGHVFTDGPADRGGLRYCMNSAALRFVPRSRMAEEGYGDWIAVVDGMIRHEHGEYRGRSQARQA

SEQ ID NO: 37315 - protein, 915 aa, Magnaporthe grisea 70-15
MAMLASKSPFPAPLATSGSGMMAGTAQASYPPSRRAPAVPPASQSFSPTESEFSDSDDHDSPKHWDEDKVCEYLRSVRCGEYEKLFRKNHINGENLLEMDKDVLKEMGIEKVGDRVRLFLSIKKLRTKAIAGQKKRNRDSFAGHESMYTPVSESPSKPFHSSSRVMPNPSVNKRYSRQIDLSGMAYDPSRPTTSSRPTSPLPSADFRTARTRNPYVGQQPTPTGSLRGLGSPPDSQANSRPVLTHTRTDSGMDGSLMAALPQNQDVIRVISTGGVTKVVKIADCNTCEEVMRVTLRKFALREDHERNYCFWVLSGLDPDPKQCRRLGDTELWRVIKDQKRPERNRLILRRVPAGEPGQSELERAAAIAMEEAQQSHSRAMDNVGARSQIKVQKVLGENWDNLQPPLSPVLYQDRERNVYNAARDLERPEPLDSGRLQPRRKVLRSFGGLRPPSELIASDLTTYFPDHPREDIDRTARLSMRRSARLSKVNSRLSVASSFSMASSIQDAPPIPTIADSWLQSTPLPKARPRDLQSRLQHGYRDSVASSMLDTLQEEGSPIEPNRKSYVSFADSGSDSAAVSVTDPDGNIVRHSYFDEGSTIGSGSGSGSFGDVSKALNEDGEDADEDLQSFLSGESWDDSKWMKGALIGQGSFGCVYLALHAITGELLAVKQVEAPSPGANSQNDARKKSMIEALKREISLLRDLRHPNIVQYLGCGSSAEYLNIFLEYVPGGSVQTMLNSYGALPEPLVRSFVRQILNGLSYLHEREIIHRDIKGANILVDNKGTIKISDFGISKKIEATNLLNGANNNKHRPSLQGSVFWMAPEVVKQTSYTRKADIWSLGCLVVEMMTGTHPFPDCTQLQAIFKIGGGKATPTIPEDASTEAKAFLAQTFEMDHNKRPSADDLMLSPFLTPIT

SEQ ID NO: 37316 - protein, 118 aa, Glycine max
  misc_feature (113)..(113): Xaa can be any naturally occurring amino acid
  unsure (1)..(118): unsure at all Xaa locations
MAPLGDAVAPAAAAAAPGLVVSFGEMLIDFVPDVAGVSLAESGGFVKAPGGAPANVACAISKLGGSSAFIGKFGDDEFGHMLVEILKQNGVNAEGCLFDQHARTALAFVTLKXNGERE

SEQ ID NO: 37317 - protein, 408 aa, Zea mays
MAEICCEEAKSTPATAVAAASVSATAAAAAAVAVASSALERRRRRLEMRRFRVASDPEELVADDVRAAKRQRLARTLSGSCPDAGSDSDRPALPRYGVTSVCGRRREMEDTVSIRPDFLPGTSKHHFFGVFDGHGCSHVATMCQDNMHEVVADEHMKAGSGEETAWKGVMERSFSRLDEQAASWATSRSRDEPACRCEQQMPLRCDHVGSTAVVAVVSPSHVVVANAGDSRAVLSRGGVPVPLSVDHKPDRPDELARIEAAGGRVIYWDGARVLGVLAMSRAIGDRYLKPFVSSEPEVTVTERTDDDECLILASDGLWDVVTNEMACEVVRACFRSNGPPAPAARPNGVALPAAGAGAEDGSAVVKGVGKEDSDKACSDAAMLLAKLALARRSADNVSVVVVDLRRGI

SEQ ID NO: 37318 - protein, 573 aa, Glycine max
MKTFQLSGKLCCSWFLLGLLALIGSLASATEIHFHEFVIQAKPVRRLCKTQNIITVNGQFPGPTVEARNGDFVVIKVVNAAQYNISIHWHGLRMLRNPWADGPSYVTQCPIQPGGSYTYRFRIRDQEGTLWWHAHTGFLRATVYGAFIIYPRLGSPYPFSMPKQEVPLLLGEWFDTDLVLLQRQADFAGLPPNTSVAYTINGQPGDLYRCSSQETVRVPVDAGETIMLRIISSTLNQELFFSIANHTMTVVGTDAAYTKPFKTTVLMIGPGQTFNVIVTADQPPGFYYMAAHAYESAVNAPFDNTTTTAILEYRSTRRRNQNRSRPVLPALPAFNDTPTATAFTARIRGLTRVRVFKKVDVNLYFIVGLGLINCTNPNSPRCQGPNGTRFTASMNNVSFVLPSTTSLMQAYYEGIPGVFTTDFPPVPPLQFDYTGNVPPGLWTPSRGTKLEKVKYGSKVQIVLQDTSIVTTEEHPMHVHGFHFFVVGSGFGNFNPATDPLKFNLVDPPVRNTIGTPPGGWVAIRFVADNPGIWFVHCHIDSHLNWGLGMALLVENGVGLSQSVLPPPPDLPQC

SEQ ID NO: 37319 - protein, 313 aa, Oryza sativa (japonica cultivar-group)
MVEARLPPGFRFHPRDDELVVDYLSGKLRSGDGGAASGGGAAGAGCPTPTLIDVDLNKCEPWDLPEIACIGGKEWYFYNLKDRKYARGQRTNRATESGYWKATGKDREITRKGSLVGMRKTLVFYRGRAPKGERTDWVMHEFRQELDHANHHHHLKEGWVLCRVFYKSRTEAVAAPTMESTLPPRYINGGTSRSPLPPLVDSSISFNHGGYEEVLPCFSSSHHQQPSPASMNASAAADDDQDYHHLSEGQRHYSDKKMMRDVQNDQVTTRFDGHLAVKREMSLKKDLSEDEQVEDYYCLTDNGSSETWNFFQQ

SEQ ID NO: 37320 - protein, 169 aa, Oryza sativa
MGAAESVPETSIHEFTVKDCNGKEVSLEMYKGKVLIVVNVASKCGFTETNYTQLTELYQKHRDKDFEILAFPCNQFLRQEPGSDQQIKDFACTRFKAEYPVFQKVRVNGPDAAPLYKFLKASKPGLFGSRIKWNFTKFLIDKNGKVINRYSTATSPLSFEKDILKALED

SEQ ID NO: 37321 - protein, 643 aa, Burkholderia fungorum LB400
MVKRRALDVAANDLGMQDESGKENENESGRADLKALIKLGTERGFVIRGEISDCLPERLAQPDAIENVVRAFSEMGIAVFEQAPDAESMIMNDHPAAVATDEQIEEEAVTAISSVDAEFGRTTDPVRMYMREMGTTELLTRQGEIALAQRIEEGRNGMIRAISSCPATIAEILAIADGVACGETAIDEFVDGLVDPAATATDDMIAVPEDSLGATPMFDDDQGDEDDDGAEAEPADQHIETLKHDALAKFAKVADWFSQLRDAYETQGYGSARYRAAQAAIEAELMTIRFTARTIERLCGALRLSADEVRTIEREIARIAVERCGVPRDTFIAHFRGNETDPAWARQLAAAGQPFSSVLERNLPAIGLEQEKLLALQKRVVLPLDEFREVCRALSASEAKTLRAKGEMIEANLRLVISIAKRYTNRGLLFLDLIQEGNIGLMRAVDKFEYRRGYKFSTYATWWIRQAVSRSIADQARTIRVPVHMIESLNKLKRISRKILQETGNEPDAALLAQLMEMQEQKVRAMLRIVKEPVSLDASVGENDDTSIGDLIEDSAAILPDDAALHAGMRDAISEALMTLTPREAKILRLRFGIESSRDHTLEELGEQFELTRERIRQIEVKALRKLRHPARSARLKSFLDEG

SEQ ID NO: 37322 - protein, 115 aa, Arabidopsis thaliana
  misc_feature (8)..(8): Xaa can be any naturally occurring amino acid
  misc_feature (42)..(42): Xaa can be any naturally occurring amino acid
  misc_feature (51)..(51): Xaa can be any naturally occurring amino acid
  misc_feature (53)..(53): Xaa can be any naturally occurring amino acid
  misc_feature (65)..(65): Xaa can be any naturally occurring amino acid
  misc_feature (73)..(73): Xaa can be any naturally occurring amino acid
  misc_feature (86)..(86): Xaa can be any naturally occurring amino acid
  misc_feature (96)..(96): Xaa can be any naturally occurring amino acid
  misc_feature (98)..(98): Xaa can be any naturally occurring amino acid
  misc_feature (103)..(103): Xaa can be any naturally occurring amino acid
  unsure (1)..(115): unsure at all Xaa locations
FLNPSPEXKLVIGFNCKGVDLCRHGKLCIMQIAFSNAIYLVXVIEGGEVIXKXCKPALESNYITXVIHDCKRXSEALYFQFGVRLXNCCGTQFAYXLXEGQEXAGALGGFQGCFP

SEQ ID NO: 37323 - protein, 668 aa, Rhodobacter sphaeroides 2.4.1
MAVKDTDDGKPEDQDAETSLDMSQAAVKRMIAEARERGYITYDQLNTVLPQDQVSSEQIEDVMAMLSEMGINVIENEEAEEGEPAGELVEQGSGSREIAVAGTQGETLDRTDDPVRMYLREMGSVELLSREGEIAIAKRIEAGRNTMIAGLCESPLTFQAITIWRDELLSEDILLRDVIDLEATFGRSLDGDGDDEIDGPEIDEVEVAAAPAPAPRRSTSSEPELDADGNPISRAEEEDEDDEASAMSLAAMEAALKPRVLETLELIARDYGKLAEMQNRRMSATLNDHIRFTTEDEAAYQKLRSEIVLLVNELHLHNNRIEALIDQLYGINRKIMSINSAMVKLADAARINRREFIDEYQGYELDPMWAERMAAKSGRGWQTLMEKSRDRVEDLRGEMAQVGQYVGVDISEFRRIVNQVQKGEKEARQAKKEMVEANLRLVISIAKKYTNRGLQFLDLIQEGNIGLMKAVDKFEYRRGYKFSTYATWWIRQAITRSIADQARTIRIPVHMIETINKLVRTGRQMLHEIGREPTPEELAEKLQMPLEKVRKVMKIAKEPISLETPIGDEEDSQLGDFIEDKNAILPLDSAIQENLKETTTRVLASLTPREERVLRMRFGIGMNTDHTLEEVGQQFSVTRERIRQIEAKALRKLKHPSRSRKLRSFLDQ

SEQ ID NO: 37324 - protein, 512 aa, Debaryomyces hansenii CBS767
MEWQNPTKYKRSSVSMGMPYSQGGYGLSYTSPQQQQRTQFYSGRHALLPPSSNGNNRGLANEGGSGVLDRHSYYFSPDPLYCSDWTYLNGGEMDCIALSSYKEGFSNKILVVHGVGYGREATCAGNGDMDDDDVTMGSPTSSAYQDDAIEGFDFHKVAEVSVDYPVTNLQWDPSMLRMGNGVSERLGASLEVLRLYKVDHEALDKNSDYKLTQTHILANNTATASSSTSSSAQSNTGASGSASEDMNTFPPVTSFDWNKVDPNLIITSSVDTTCTVWDLNRSSLTADPSSDLGAATDTATVKTQLIAHDSEVFDVKFIHNSTNVFASVGNDGSMRVFDLRSLEHSTIIYEPSHPPTSALTLTTPHHNSRALLKLSASNIDQNYLATIGVNSNQVIIIDMRMPGLPVAALDGSLGGANTAAINSIQWHPSSNYLLTGGDDCQALVWDCNNIRHPGAPKTPSSASSHPPEFTSLVESPVLAYSDDLEVNNVCWRRDQGDWMGVVSGKGFQAVLI

SEQ ID NO: 37325 - protein, 214 aa, Zea mays
TTSRQVTFCKRRNGLLKKAYELSVLCDAEVALVVFSSRGRLYEYANNSVKSTIERYKKANSDSSNSGTVAEVNAQYYQQESSKLRQMIHSLQNANTRNIVGDSIHTMGLRDLKQMEGKLEKAIIKIRARKNELLYAEVDYMQKREMDLQTDNMYLRSKIAESNETGQPAMHMTMGAPPTSEYDHMAPFDSRNFLQVSMPQHYSHQLQPTTLQLG

SEQ ID NO: 37326 - protein, 819 aa, Cryptococcus neoformans var. neoformans B-3501A
MLKGVKQLWPSSSSNSNSNNNNPSNAQSPSHSPSHSFSAFGGPPDQATPRASAHPQTDPFDAPQAATSPAGLTKSAANLSLDPKRTSSPAGSQQPGLRTPISHGFTSLPLATPGAGQPTTGVTVGDSVGTSGGLGFGLHEPPKMRKAMSNDAQGTTESAEAVTENSQANLSQTSRTTGPRGTLRVKVISARGLAVSHSPGADPQPYVVIQFEKNEYVSRPPHPVTSASSVPFTTSTPQPIGTPGNLTRSSSGLGVSAISRAFADAVGRGKKKEDGSGTMTPKAEEPAGGSWLGKPGPGDPVWKEEVSFDVTSSKPTLHLSVYDRNRDGEGFLGMLDIKPVLQDGYVLDNWYKLDTRGDEAVTGEVWIQMTYTIIRKRISLKPSDFEFLKLIGRGTFGRVFQVRKKDTRRIYAMKVLSKKEIVAKKEVAHTIGERKILQCSLECPFLVGLKFSFQTDTELYFVTDYKCGGELFWHLQKEGRFSEDRARFYIAELVLALEHLHKYNIVYRDLKPENILLDATGHVALCDFGLSKPDLTDDKLTNTFCGTTEYLAPEVLLDEKGYGKHVDFWSLGVLLFEMCCGWSPFYAEQTQEMYRLICYGKIRFPKNVIGDDGKQFVKGLLNRNPQNRLGSHRGAVELKEHPFFKNIDWDLLYKKQITPPFKPIVDSDESVANFDPEFTNSSLLDAGIVPWEDVNATVDPGTASQPGKHSYLGPGAGISGSVPGGGVAINKAQRPGLPGANGSPLTSSVQENFRGFTYTGESLMPQSMLADQSMDSDSDNENAVDDDEDEDEDEEEYEEDEDEENGIGSSRRECDVDMD

SEQ ID NO: 37327 - protein, 475 aa, Rhodobacter sphaeroides 2.4.1
MQAAEPSFRESVDLMFNRAVALMDLSPGLEEKIRVCNSTYTVRFGVRLRGKIFTFTGYRSVHSEHMEPVKGGIRYALSVSQDEVEALAALMTYKCALVETPFGGSKGGLCIDPREWDEHELEQITRRFAYELAKRDLIHPAQNVPAPDMGTGEREMAWIADQYARMNTADINARACVTGKPINAGGIHGRVEATGRGVQFALREFFRHAEDKARAGLSGDLDGKRIIVQGLGNVGYHAAKFLTEEDGAKVTGVIERDGALVNPAGIPVEELRHWMMKTGSIRGFSQADFVEDGRKLLEEECDILIPAAMEGVITRENAARIKAPLIIEAANGPITFGADEILRQKGTVIVPDLYANAGGVTVSYFEWVKNLSHIRFGRMQRRAEEARSRALVEELERLSADQGLGWQLAPDFKQKFMQGSDELALVRSGLDDTMRIAYQSMREVWHGAEGAQDLRVAAYIVAIRRVAATYRSKGL

SEQ ID NO: 37328 - protein, 458 aa, Debaryomyces hansenii CBS767
MGKEKTHVNLVVIGHVDSGKSTTTGHLIYKCGGIDKRTIEKFEKEAAELGKGSFKYAWVLDKLKAERERGITIDIALWKFETPKFHVTIIDAPGHRDFIKNMITGTSQADCAILIIAGGIGEFEAGISKDGQTREHALLAYTLGVKQLIVAINKMDSVKWDKNRYDEIVKECSNFVKKVGFNPKSVPFVPISGWNGDNMIEASPNCPWYKGWEKETKAGKSSGKTLLEAIDAIEPPSRPTDKPLRLPLQDVYKIGGIGTVPVGRVETGIIKAGMVVTFAPAGVTTEVKSVEMHHEQLTEGVPGDNVGFNVKNVSVKEIRRGNVCGDSKNDTPKGCDSFAAQVIVLNHPGQISSGYSPVLDCHTAHIACKFDTLIEKIDRRTGKKLEDNPKFIKSGDAAIVKMVPSKPMCVEAFTDYPPLGRFAVRDMRQTVAVGVIKSVEKSDKAGKVTKAAQKAAKK

SEQ ID NO: 37329 - protein, 460 aa, Streptomyces coelicolor A3(2)
MAADKIDTIVSLSKRRGFVFPCSEIYGGQRAAWDYGPLGVELKENLKRQWWRYMVTSREDVVGLDSSVILAPEVWVASGHVATFTDPLTECTSCHKRFRADHLEEAYEEKKGHAPENGLADLNCPNCGNKGTFTEPKQFSGLLSTHLGPTQDSGSVAYLRPETAQGIFTNFAQVQTTSRRKPPFGIAQMGKSFRNEITPGNFIFRTREFEQMEMEFFVKPGEDEKWQEYWMEQRWNWYTGLGLREENMRWYEHPAEKLSHYSKRTADIEYRFSFGGSEWGELEGVANRTDYDLSSHAKASGQDLSYYDQEAQERWTPYVIEPAAGVGRAMLAFLLDAYIEDEAPNAKGKLEKRTVLRLDPRLSPVKVAVLPLSRNPELSPKAKGLAQALRQNWNIEFDDAGAIGRRYRRQDEIGTPFCVTVDFDTLDDNAVTVRERDTMKQERVSLDQIEGYLASRLVGC

SEQ ID NO: 37330 - protein, 415 aa, Prochlorococcus marinus subsp. marinus str. CCMP1375
MMEKLHRVVITGLGAITPIGNTVADYLSGLKSGLNGVGPISLFDASQHACRFAAEVSNFDPTGLLEPKESKRWDRFSKFGVIAAKEAIADSGLIIDDANASRIGVIIGSGVGGLLTMETQAQVLNNKGPGRVSPFTVPMMIPNMATGLTAIALGAKGPSSAVATACAAGSNAIGDSFRLLQLGKADAMICGGAEASITPLGVAGFSSAKALSFRNDDPSSASRPFDADRDGFVIGEGSGVLILETFDHAKERNAQIYAELIGYGTTCDAHHITAPSPGGIGGAEAIKETIQDGKINIEEIDYINAHGTSTAANDKNETSAIKNALGERARQIPISSTKSMTGHLLGGSGGIEAVACVLSIKHGVIPPTINYSKPDPDCDLDYVPNTARESKLNVVLSNSFGFGGHNVCLAFRKIN

SEQ ID NO: 37331 - protein, 678 aa, Debaryomyces hansenii CBS767
MSQDLDQLAISTIRLLSVDSVDKAQSGHPGAPLGLAPAAHAVWQKMKFNPKDTNWINRDRFILSNGHACALLYSLLVLYGYDLTVEDLKQFRQLNSKTPGHPEALDVPGCEVTTGPLGQGISNAVGLAMAQKQFGATYNKPDHKISDSYTYAFLGDGCLMEGVASETCSLAGHLQLNNLIAFWDDNHISIDGNTNVAFTEDVMLRFKAYGWHLIEIAEGDTDLDAIAKAIDEAKKVEDKPTLIRLTTTIGFGSLAQGTHGVHGAPLKADDIKQLKESMGFNPEETFVIPKEVTDYLKKHVEENQKVQEDWKKLFESYKQKYPELGAELQRRLDGKLPENWSDALPTYSPSDSAVATRKLSETVLTKILPVIPEIIGGSADLTGSNLTRAAGSVDFQPPATGLGDYSGRYIRYGVREHGMGAIMNGIAAFGANYKNYGGTFLNFVSYGAGAVRLSALSHHPVIWVATHDSIGLGEDGPTHQPIETLAHLRAIPNLSVWRPADGNETSAAYLQAIESTSTPSIIALTRQNLPQLEGSSIEKAAKGGYTLVKQDKPDVIIVSSGSEVSISADAAKKLESEGFKAGVVSMPDFLTFDKQPLDYRLSVLPDGVPIMSVEVMSSFGWSKYSHEQFGLNRFGASGKGPEIYKFFEFTPEGVADRAAKTIQFYKGKPLLSPLNRAF

SEQ ID NO: 37332 - protein, 669 aa, Prochlorococcus marinus subsp. marinus str. CCMP1375
MVAAPVSLESLCINSIRMLAVDAVNKSKSGHPGLPMGCAPMGYTLWDKFLRHNPKNPKWFNRDRFVLSAGHGCMLLYALLHLTGYDSVTIDDIKQFRQWGARTPGHPETFETAGVEVTAGPLGAGISNAVGLAIAEAHLAAKFNKADAKIVDHFTYVIMGDGCNQEGVASEACSLAGHLKLGKLIALYDDNHITIDGRTDVSFTEDVLKRYESYGWHVQHVQEGNTDVDAIAKAIESAKAISDKPSIIKVTTTIGFGSPNKSDTAGVHGAPLGEEEAELTRKSLDWPYEPFEIPNEVYQQYQKAIVRGESLEKEWNQLLDNYRKKYSNEAEEFERMLRGELPSDWDKDLPSYTPKDNGLATRKHSQICLGAIGPNLPELIGGSADLTHSNYTDIKGESGSFQPETPEKRYLHFGVREHAMAAILNGIAYHNSGLIPYGGTFLVFADYMRGSMRLSALSELGVIYVLTHDSIGVGEDGPTHQPIETIPSLRAIPNMLVFRPGDGNETSGSYKLAIENRKRPSSLCLSRQGMPNQANSSSKKVALGGYVIEDCVGTPDLILIGTGSELNLCIEAAQELTNQGKKIRVVSMPCMELFEEQSASYKEEVLPPLVRKRLVVEAALSFGWHKYIGLDGDSVTMNSFGASAPGGTCMEKFGFTVENVINKAKKLLN

SEQ ID NO: 37333 - protein, 530 aa, Yarrowia lipolytica CLIB122
MNFPRNKMTGLRDENTSASMRLPRAKTAEPSDMDISIGENGALNARPALNDLSNVGLSGNVFKHTAASQARRALTSKTTNGAATNKPAVKPTFSAAVAGLSRTRQPYSNNPNTQQPSNITRASSTTTNPYTRPQRASLQTKSVSADFSIPVFQSKTGPLDVPPMTRKRPSQGAKDMEMPRLAARGGKHHQTMETFAYREEGPLAKKHKQEEDKTAVALEAEQEEVIRRPLIQVLAPGATGIDVEHDDLDAEDIDDPMAAGEYVDEIFTHLYNLEEEYQPNPRYIDDQKSLSWNTRAVLIDWLVEVHQKFRLLPETLFLAVNIVDRFMSRRVVALNKVQLVGITSLLLATKYEEVFTPALSNFVYVVDGSYPEDEILRAERFILQVLQFNLSYPNPMNFLRRISKADDFDIHSRTFGKYLCEIALVDHTFMEFKHSLVAAAAMHVGRMMLARSQWTNNLVYYSGGYTQKDIAPVCRKIFQFLIGPVEHEAFFKKYATKKFLKASIIAREWALGVQEQIKNGVNSYETNLFI

SEQ ID NO: 37334 - protein, 521 aa, Chlamydomonas reinhardtii
MRKEATRLVSALLRAGNNGVSTSWAVGGTRLKSAMPQPDEKKDEDLHAKEGKVLHPHLLNENVVKTQYAVRGELYLRAEQLRKEGKEIIFTNVGNPHALGAKPLTFTRQVLALCAAPFLLDHPKVEDMFPADAIARAKKILASFKGGVGAYTDSRGNPLVREEVARFIEKRDGVPSNPDHIFLTDGASVAVRLCLNAMIRHDRDSVLVPIPQYPLYSASIRLYGGTLVGYFLDERRGWGLSVEELQRALQESREEGKLVRGLVFINPGNPTGQCLSKENLQELIKLAYQEKIVLMADEVYQENVYQDERPFVSAKKVMWEMGEPYRSHVELLSFHTVSKGTAGECGLRGGYVEMTNIHPGAIEEVYKCASINLSPNTMGQIALSVLVNPPKPGDPSYDQYTKEKASELVSLRRRRHMVTDGFNALDGVTCNFTEGAMYSFPQIKLPAKALEAAKAAGKAGDVFYCLKLLEATGISTVPGSGFGQEEGTFHLRTTILPREEVMTTFVEKFDKFHKDFMKQYS

SEQ ID NO: 37335 - protein, 508 aa, Ustilago maydis 521
MISGLLSRSSVGPARAFQASTLPRVVSTLPRVHSRGLATGADPYDVVVIGGGPGGYVAAIKAAQLGLKTACVEKRGALGGTCLNVGCIPSKAMLNNSHLYHQAQHDFKSRGIDVGSISLNLETMLKAKSSAVTGLTKGIEGLFKKNKVDYLKGAGSFSSPTTIKVALNDGGETEIEAKNIIIATGSEVTPFPGIEIDEKQIVSSTGALELQKVPEKMIVIGAGVIGLEMGSVWSRLGAKVEVVEFLSTVGGAGIDGEIAKNFKKTLEKQGLKFRLGTKVIDAEKKDGKVYLNVEDAKSGDKTQLDADVVLVAIGRRPVTSGLNLEAVGIEKDERGRIIVDDQYNTTCKGVKCIGDATFGPMLAHKAEEEGIAAVEIIKSGHGHVNYAAIPAVVYTHPEVAWVGKNEEELKKEGVEYKVGKFPFLANSRAKTNADSDGTVKFLVEKETDKVLGVHIIGPNAGEMIASAVLAIEYQASAEDIARTCHAHPTLSEAFKEAAMASYSKAIHF

SEQ ID NO: 37336 - protein, 187 aa, Hordeum vulgare subsp. vulgare
KYPYIAGMGIYVISKHVMLQLLREQFPGANDFGSEVIPGATSTGMRVQAYLYDGYWEDIGTIEAFYNANLGITKKPIPDFSFYDRSAPIYTQPRHLPPSKVLDADVTDSVIGEGCVIKNCKIHHSVVGLRSCISEGAIIEDALLMGADYYETEADKKLLAEKGGIPIGIGKNSHIKRAIIDKNARIG

SEQ ID NO: 37337 - protein, 185 aa, Hordeum vulgare
KYPYIASMGVYVFKRDVLLNLLKSRYAELHDFGSEILPRALHDHNVQAYVFTDYWEDIGTIRSFFDANMALCEQPPKFEFYDPKTPFFTSPRYLPPTKSDKCRIKEAIISHGCFLRECKIEHSIIGVRSRLNSGSELKNAMMMGADSYETEDEISRLMSEGKVPIGVGENTKISNSYYDMNARIG

SEQ ID NO: 37338 - protein, 181 aa, Hordeum vulgare
KYPYIAGMGVYIFKKEILLNLLRWRFPTANDFGSEIIPAAAREINVKAYLFNDYWEDIGTIKSFFEANLALAEQPSKFSFYDASKPMYTSRRNLPPSMISGSKITDSIISHGCFLDKCRVEHSVVGIRSRIGSNVHLKDTVMLGADFYETDAERGDQLAEGKVPIGIGENTSIQNCIIDMN

SEQ ID NO: 37339 - protein, 348 aa, Bacillus halodurans C-125
MEQKKLRVGIIGAGGIARTVHIPSYLSLKDQVELVAITDVQPKHAQAAAEQFSIPYVYNDASRMMQEVELDAVSICTPNAFHRELTIEALHAGCHVLCEKPPAITVEDAKQMEAAAKETGNLLTYGFHYRHSPEVETLKRFVDEGELGEIYHVRVQAIRRRGIPGWGVFTNKELQGGGPLIDIGVHMLDTALYVMGFPEPATILGQTHRKIGTKEGVGLLGEWNWQQFSIEDMAVGMITFKNGASLTIETAFAANVKEQDHMNVSFFGDKGGADLFPLSIYQEKHRTLLDITPVYLPTYNHHEREIKHFVDCCFRLEQPLATPEQGIVIQRLIQGLYQSAESGKAIQW

SEQ ID NO: 37340 - protein, 499 aa, Taxus cuspidata
MDALYKSTVAKFNEVTQLDCSTESFSIALSAIAGILLLLLLFRSKRHSSLKLPPGKLGIPFIGESFIFLRALRSNSLEQFFDERVKKFGLVFKTSLIGHPTVVLCGPAGNRLILSNEEKLVQMSWPAQFMKLMGENSVATRRGEDHIVMRSALAGFFGPGALQSYIGKMNTEIQSHINEKWKGKDEVNVLPLVRELVFNISAILFFNIYDKQEQDRLHKLLETILVGSFALPIDLPGFGFHRALQGRAKLNKIMLSLIKKRKEDLQSGSATATQDLLSVLLTFRDDKGTPLTNDEILDNFSSLLHASYDTTTSPMALIFKLLSSNPECYQKVVQEQLEILSNKEEGEEITWKDLKAMKYTWQVAQETLRMFPPVFGTFRKAITDIQYDGYTIPKGWKLLWTTYSTHPKDLYFNEPEKFMPSRFDQEGKHVAPYTFLPFGGGQRSCVGWEFSKMEILLFVHHFVKTFSSYTPVDPDEKISGDPLPPLPSKGFSIKLFPRP

SEQ ID NO: 37341 - protein, 405 aa, Ustilago maydis 521
MSAIPQQPVDYSATHEAAVAAAAAAAAKAATATAGGGASSSQHPAPAVVGATSVPTHVASANSTGTYSSASLPLAIAAQQRKLSGRYALTDFAVERTLGTGSFGRVHLVRSRHNHRFYAIKVLRKEQVVKMKQVEHTNSERAILSIVRHPFLVNLWGTFKDSTFLYMVMDYVPGGELFTLLRKSQRFPHPVAKFYAAEVALAIDYLHQNNIIYRDLKPENILLSADGHLKITDFGFAKYVPDVTWTLCGTPDYLAPEIVSSKGYNKSVDWWALGVLLYEMLAGHPPFFTEDGNPIKLYEKIIACKVRYPPYFETGVKDLLKNLLTADLSKRYGNLHRGSKDIFGHLWFAEVDWDRLYRREIPAPYLPTVTADGDSSQFERYPENDVTEYSRTDLPDSLGHLFPDF

SEQ ID NO: 37342 - protein, 652 aa, Ralstonia eutropha JMP134
MQESSATTFPRLLLEHARQRPAHPAYREKDLGIWQTYSWSQAAQEVRALACGLAALGFTRGMNLAVVGDNRPRLYWAMTAAQALGGVPVPLYQDAIANEMVYVLNDAEIDFAIVEDQEQVDKLLEVEEQLAASGRSVRHVIYEDPRGLRDYDHPSLMSYERLQEIGREFDQAHPGFYDASIAAGSPEDTAIILYTSGTTGKPKGVCHAHRGLIGSAQNGCGFDGLTAKDDVLSYLPMAWVGDNLFSYAQAMVAGFTVNCPESRETVMTDLREIGPTYYFAPPRIYEGLLTQVMIRMEDAGWIKRKLFHWAMDVARRCGADILDGKHVGLAERMRYAAGEFLVYGPLRNVLGMSRIRVGYTAGEAIGPDLFRFYRSIGVNLKQFYGQTETCAYVCLQPDGQVKFDSVGPAAPGMEIRIADNGEVLVRGVGLLKSYYKRDDATREAINDEGYFMTGDAGVIDADGHLKIIDRAKDVGKLADGSMFAPKYIENKLKFFPYIKEAVAFGTGRDKVCAFINIDFDAVGNWAERRHLPYAGYVDLAGQPDVIAMIGECVEQVNADLVNDGMLAGSQIARFLILHKELDPDDDELTRTRKVRRGFIAEKYAVLVDALYAGKTEQFIETRVKFEDGREGSVSATLRLMDAKRLPPAARAA

SEQ ID NO: 37343 - protein, 357 aa, Glycine max
MSAFVGKYADELIKNAKYIATPGKGILAADESTGTIGKRLASINVENIEANRQALRELLFTAPNALQYLSGVILFEETLYQKTSDGKPFVEVLQENNVIPGIKVDKGVVELAGTNGETTTQGFDSLGARCQQYYKAGARFAKWRAVLKIGPTEPSELSIQQNAQGLARYAIICQENGLVPIVEPEILTDGAHDIAKCAAVTETVLAACYKALNEQHVLLEGTLLKPNMVTPGSDSPKVPPEVIAEYTVNALRRTVPAAVPGVVFLSGGQSEEEATLNLNAMNKLEVLKPWTLSFSFGRALQQSTLKTWGGKKENVAKAQEAFLARCKANSDATLGKYVGGSGSGLTSESLYVKNYKY

SEQ ID NO: 37344 - protein, 672 aa, Trichodesmium erythraeum IMS101
MAVATQSLEELCINSIRFLAIDAVQKANSGHPGLPMGAAPMAFVLWDKLMRFNPKNPKWLNRDRFVLSAGHGCMLQYALMHLTGYDSVPIEEIKQFRQWNSKTPGHPENHITEGIEVTTGPLGQGIANAVGLAAAEAHLAAVFNKPDCNLIDHYTYVIVGDGCNMEGISGEACSLAGHWGLGKLIAFYDDNHISIDGHTDISFTEDVGKRFEAYGWHVQHVSDGNTNLEAIAEAIEKAKAVTDKPSLIKVTTIIGYGSPNKADTHDVHGAALGPDEVAATRKHLGWEYPEFEVPPDALSHFRKAVERGAKYEEEWNQLFSEYKSKYPEDAATLERMVSGKLPEGWADALPKYTPESKKDATRNQSGATLNAIAGVLPELIGGSADLAPSNKTLLKGLGDFQKGQYQNRNVRFGVREHGMGAICNGIALHGSGLISYGATFLVFTDYMRNSIRLSALAEAGVIWVMTHDSIALGEDGPTHQPVEHIASLRLIPQLIVIRPADGNETSGAYKIAVEKAKASHPQPTLLALSRQGLPNLAGSSIDAVAKGAYVLSDSEGTPDIILIGTGGETYQCVEAGEKLRAEGKKVRVVSMPCWELFEEQDAAYKESVFPASVKKRLAVEAGVSFGWHRYVTDEGATLSVDTFGASAPGGVVLEKFGFTVDNIVAKAKALLG

SEQ ID NO: 37345 - protein, 416 aa, Trichodesmium erythraeum IMS101
MTNKELKRVVVTGMGAITPIGNTLSEYWDGLLNGKSGVDKITLFDSSKHKCCIAAEVKGFDPLEHMDRKQAKHMDRFTQFAVAASKQTIADAKFEINDLNAEQVGVIIGTGVGGIKVLEDQQEIYLNRGPNKCSPFMIPMMIANMAAGLTAIHTGAKGPNSCTMTACASGSNAIGDAFRLIQRGYAQAMICGGTESPVTPLGLAGFSSVKALSTRNDDPTSASRPFDRDRDGFVMGEGAGILILEELECALSRGARIYAEMVGYGMTCDAYHMTSPVPDGEGATRAIQLAMKDAGLTPAQISYINAHGTSTRANDTTETKAIKKVLGESASQVAISSTKSMTGHLLGGSGGIEAIATVMAIANDKIPPTINLDNPDPECDLDYVPKKSRSQIIEVALSNSFGFGGHNVTLAFKKYR

SEQ ID NO: 37346 - protein, 144 aa, Arabidopsis thaliana
MSGDEAVAAPVVPPVAEAAVIPEDMDVSTALELTVRKSRAYGGVVRGLHESAKLIEKRNAQLCVLAEDCNQPDYVKLVKALCADHSIKLLTVPSAKTLGEWAGLCKIDSEGNARKVVGCSCLVIKDFGEETTALNIVKKHLDSN

SEQ ID NO: 37347 - protein, 449 aa, Ralstonia metallidurans CH34
MSSALQDIRRITHLAAPVLVGQLAVIAFGVIDTIMSGRASATDLAAVGLGGSIYVTVYVSLMGVLQALAPVAGQLYGANRSAEIGAEVRQAAWLGVALAIPGMLLLLFPAPLLEFAKAPPELVEKASHYLHIGAYGLPAALGFRIYMALNNALSRPVMVTVLQIAGLALKIPLNAWFIEGGYGLAPMGGPGCALASTLISWIWFLSGLAILLRGAAYRSLEIFTRWEWPRWDRIQPLLRLGLPMGLTYLIEITSFTLMSIFITRMGTDTLAGHQIIANLSAVAYMMPLSLSIATSTLVAQSIGARDMAAARRIGWRGIRLGAGLALLTGTLLWLLREPLLHAYVSDPAVIAKALPLMLFVAFYQAFDAVQVMSAFILRAYKIALIPTLIYAGSLWGVGLGGGYVMGFGLIDALPAFTRGASGFWLANSISLAIAGTLLVRYFMRVSRVG

SEQ ID NO: 37348 - protein, 234 aa, Haemophilus somnus 129PT
MNTKIFDTAQHAVEQIAQEFVQYSKQNRAVHISLSGGSTPKLLFKTLAQEPFKSEVRWENLHFWWGDDRMVEPNNPESNYGEVKKLLFDHIRIPTENIHRIRGEENVEQELARFSQELIACVPDLTFDWIILGMGADGHTASLFPYQTDFSDSNVAVIAKHPETGQIRISKTAKLIEQAKRITYLVTGEAKAEILKEIQTALPENLPYPAAKIKAKNGVTEWYLDKAAGKLLSS

SEQ ID NO: 37349 - protein, 106 aa, Saccharum officinarum
MAEAHNGRRVGMVGDVRDAPAGHENDLEAIELARFAVAEHNSKTNAMLEFERLVKVRHQVVAGTMHHFTVQVKEAGGGKKLYEAKVWEKVWENFKQLQSFQPVGDA

SEQ ID NO: 37350 - protein, 518 aa, Arabidopsis thaliana
MARTRIITNRFESRFLIRFLESPTLFASCFTSSRSLQTLAYEEVRTSGDRESESTALILHGLLGSGRNWRSFSRSLASSLSVSSASDWKMILVDLRNHGRSAEVEGLNPPHDLVNSAKDLADLVKASGWNWPDVVIGHSLGGKVALQFMESCARGDFGESASPPKQQRLFGAEQLWVLDSVPGEVKAEKSDGEVEKVLKTLQSLPSSIPSRKWLVDRMVELGFSRSLSEWIGSNLKRSGDSETWTFNLDGAVQMFNSYRETSYWSLLENPPKETEINFVIAEKSDRWDNDTTKRLETIANQRQNVAEGKVATHLLRNSGHWVHTDNPKGLLEITIKANSDPSLSLAKGKRRNNKRNPSFPLYLSLFQTMSKRKTKEPKVENVTLGPAVREGEQVFGVVHVFASFNDTFIHVTDLSGRETLVRITGGMKVKADRDESSPYAAMLAAQDVAQRCKELGITAIHVKLRATGGNKTKTPGPGAQSALRALARSGMKIGRIEDVTPIPTDSTRRKGGRRGRRL

SEQ ID NO: 37351 - protein, 917 aa, Bifidobacterium longum DJO10A
MATPEEQITPADAAIVTTGTGRKGPEEHDLPESLKYDMDLCLEILRNVLGEYNPELLSTFDTVRHYAVEASAEHFAELKDPNPDQDGLKEAVNVIDNMTLHDAQLLARAFATYFHLANLSEENYRVSVLHERENNVPVDQAVDPINELTVAYHQLINETGPAKAKELLNQLEFHPVFTAHPTEARRKAVEGKIRRVSELLEEYKRLGGSDKKECLRRLYNEIDALFRTSPIALKKPTPVEEADTILDIFDNTLFNTIPKVYRRFDDWVLGDKAGLVEPACPAFFHPGSWIGSDRDGNPNVTAKVSRAVARKFSDHVIAALEEATRTVGRNLTMEAETTPPSAELKSLWSHQKEMSERLTDKAALISTKEMHRAVMLVMADRLHYTIERDADLMYHSCDDFLADLKVVQRSLAAAGAKRSAYGPLQDLIWQTETFGFHMVEMEFRQHSVVHARALADIREHGLHGERGELQPMTHEVLDTFRALGAIQKRNGLKAARRYIISFTKSAQNIKDVYELNRLAFSHPEDVPTIDVIPLFEQLEDLQNSVDVLEEMIKIPEVQARLKATGNKLEVMLGYSDSSKDAGPTSATLALHSAQERIAKWAESHDIDLTLFHGRGGAVGRGGGPANRAVLAQPVGSVKCRFKLTEQGEVIFARYGNPVLAIRHVESVAAATLLQSAPSVEKRNTEMTEKYADMAAQLDEAAHNRFLDLLNTDGFAPWFSIVTPLTEIGLLPIGSRPAKRGLGAKSLDDLRTIPWIFSWAQARINLAAWYGLGTACEKFGDLETMRQAYEEWPLFSTFIDNIEMSIAKTDERIARMYLALGDREDLNEKVLNEMELTRKWVLAIVGDKWPLQHRHVLGQAIRIRSPYVDALSVTQVLALKSLRKKVDKEELSQSQQAGFIYLILCTVSGVAAGLQNTG

SEQ ID NO: 37352 - protein, 398 aa, Ralstonia eutropha JMP134
MGELLRRYWQPVCTSDELTDRPRKEKLLCEEIVLFRDGTGKVGALQPHCSHRGTSLEWGRIEDRGLRCCFHGWLYGTDGRCLEMPCETEEFRERMNVWQPAYPTLEFGGLVFVYMGPAGTEPIFPVYDIIDPNVVGEVELRGMRLWGDHGIGYVKDCNWLQHYENVVDPWHLIMLHQVISGNQGHNMLEGLAGDTLARDMAKIDFEKTPLGVRFNMVRELPNGNHFIRHAECIVPNAFLVPAVYDSGARKTRATELSWVVPVDNEHVRGISIVAWPLQDGKPKPGWRPGTDISDAVRPGAALERSYEERQRKPDDREAQEGQRTTAVHALENLGTSDGGVVMLRRILREQLKRLEQGLDPLNVVRDKDAARGIPTGTWNAVLTSAEAAALGANVGRLA

SEQ ID NO: 37353 - protein, 370 aa, Crocosphaera watsonii WH 8501
MNPSQTIVVKVGTSSLAQPETGKLALSTIAALVETLTELRQFGYHVVLVSSGAVGVGCSRLKLTEKPKKIVIKQAIAAVGQGRLIRVYDDLFTALNQPIAQVLLTRRELMERSCYVNAKNTFDALFELGVIPIVNENDTVAIEELKFGDNDTLSALVASLINADWLFILTDVDRLYSADPRTFPDAKPIKVVNSLELDKLEIKAGGKGSQWGTGGMSTKLTAARLATSAGITTVITHGKKPGNLLKIIKGEDIGTKFEAQLNNDNARKRWIYYGLLPRGKLYLDRGAVKAISQKGKSLLPAGIIKVEGEFDSLEAVQLYNESGQEIGRGIVNYNQEEIDKIKGNHSDKIPELLGCHGAETIVHRDNLVIN

SEQ ID NO: 37354 - protein, 366 aa, Dechloromonas aromatica RCB
MNKSKSTNPLLAIKALGQHLWLDNLSRTLLREGGLQRLINEDGIDGVTSNPAIFEKAIAGSPYYREDLERLRGAGLDAEACYESLVIADIRAACAMLLPAFRASRGESGYVSLEVSPALANDTAGTVAAAHRLFDTVGRDNLLIKVPGTPAGIDAFEALSAAGLSVNVTLIFSLAQYEAVAQAYLRGALRWVESGGKARHLRSVASIFLSRVDTVVDKRLDLLGTAHAERLSGRAGVALAKCCHGRYRDIFHGPDFALLRLAGLRPQTPLWASTGSKNLAYSDVLYVEPLIGAESINTLPDPTLAAFRQHGQVANRLQEGLEEAQAHIQALLDLGIDLNAVGESLQSDGVKLFAEAYQKILLGLQA

SEQ ID NO: 37355 - protein, 398 aa, Prochlorococcus marinus subsp. marinus str. CCMP1375
MTIFQEPILSLKSFLPELIELRRYLHAHPELSGHEHQTAALIAGELRKYGWIVKESVGRTGLIAELGNCDGPLVGFRVDMDALPVEEKTGLSFASLRQGVMHACGHDIHICIGIGLARLLAEHNQLELTGIRLLFQPAEEIASGARWMKEDGATKGLDALFGVHVYPELPSGHIGVRDGTLTAAAGKLEIEIIGDGGHGARPHQTVDSIWIAAKIISGIQEAISRQLDALLPVVISFGQIEGGKAFNVIADRVKLLGTVRCLDAHLNDQLPHWLETTIKGIATSCGAEVVITYTPIAPPVFNDPKLTALLENCAQSLIGNEKVKRLDSPSLGAEDFAEFLDDVPGTMFRLGVAPPEGCAPLHNGSFAPDENSIEIGINIIFHTLMHWMKQQQNVSLEQ

SEQ ID NO: 37356 - protein, 359 aa, Thermoplasma acidophilum DSM 1728
MSLKGVVMAGGKGTRLRPITYSIPKPLVPVAGKPVISYILDAFYRSGISDIIITTGYKFESLIKGVLENKNSQQNILFSVEKEAAGTAGGVKIAENFLDDTFVVGSGDILIDFDIGDMIKEHQRRKNKITIAVTKVDDPSQFGIAEIDEEGYIKRFLEKPGKNETFSDTINAGVYIMDRSLLRYIPSTGQFDFAKDLFPKLLSQGIKIGTYLIDGVWLDAGRPKDVIKANQIMVEKYGESFNGTGKAIIKSKVPQGCSIKPPIYIGEGVHVGNNSTISGSAVYDGVSIGDDVQIENSVIMASSKIMRGTKVVNSVIMQNTTIGEDCEIHDSVLSQKLNLQNGSKVFQVALSSEIVQDEN

SEQ ID NO: 37357 - protein, 331 aa, Streptococcus mutans UA159
MARKILEVIIAMLSKKQYLDMFLKMQRIRDVDTKLNKLVRRGFVQGMTHFSVGEEAASVGAIQGLTDQDIIFSNHRGHGQTIAKGIDIPAMFAELAGKATGSSKGRGGSMHLANLEKGNYGTNGIVGGGYALAVGAALTQQYDNTGNIVVAFSGDSATNEGSFHESVNLAAVWNLPVIFFIINNRYGISTDINYSTKISHLYLRADAYGIPGHYVEDGNDVIAVYEKMQEVIDYVRSGNGPALVEVESYRWFGHSTADAGAYRTKEEVDAWKAKDPLKKYRTYLTENKIATDEELDMIEKEVAQEIEDAVKFAQDSPEPELSVAFEDVWVD

SEQ ID NO: 37358 - protein, 233 aa, Cytophaga hutchinsonii
MVTIDNYLDSHYIHRSNWLRATVLGANDGIISISSLAIGVAAASSAREPIILATVAGLVAGALSMAAGEYVSVSSQTDTEKADIERERKELHEMPEDELNMLAQIYERRGLKKETARQVAIELTEKDALGTHIRDELGINEISQAKPIQAAFASGISFTVGGILPLLVILVAPVKGMEYWLYGFSIVFLVILGITSAKTGGASISKAILRITIWGTIAMGLSALAGYLFGVNV

SEQ ID NO: 37359 - protein, 581 aa, Streptococcus mutans UA159
MAVEIIMPKLGVDMQEGEIIEWKKQEGDEVKEGDILLEIMSDKTNMEIEAEDSGVLLKIVKGNGQVVPVTEVIGYIGSAGETIETNAAPAASADDLKAAGLEVPDTLGESAAPAAQKTPLADDEYDMIVVGGGPAGYYAAIRGAQLGGKVAIVEKSEFGGTCLNKGCIPTKTYLKNAEILDGIKIAAGRGINFASTNYTIDMDKTVAFKDTVVKTLTSGVQGLLKANKVTIFNGLGQVNPDKTVTVGSETIKGHNIILATGSKVSRINIPGIDSPLVLTSDDILDLREIPKSLAVMGGGVVGIELGLVYASYGTEVTVIEMADRIIPAMDKEVSLELQKILSKKGMNIKTSVGVAEIVEANNQLTLKLNDGSEVVAEKALLSIGRVPQLSGLENLNLELERGRIKVDDYQETSISGIYAPGDVNGRKMLAHAAYRMGEVAAENAIWGNVRKANLKYTPAAVYTHPEVAMCGITEEQARQEYGNVLVGKSSFSGNGRAIASNEAQGFVKVVADAKYHEILGVHIIGPAAAEMINEASTIMENELTVDELLRSIHGHPTFSEVMYEAFADVLGEAIHNPPKRR

SEQ ID NO: 37360 - protein, 956 aa, Ustilago maydis 521
MTRSFLRDAAAIASTICHIAKGVVLSPNGANPAARRGPPRPWSTQAVARDSAPGNNDGASHSQLHVSINQDERTSADFIQNDTPPPSRPWPSKSTKTTAALTPEVPLTNAPEPSAEASSTSAIPLKPPTPTSIPTPPVALHDTEDDIPKKPAQPSQAPLSKSQTPPVDDMTGGRSPSHHDTIQATTDSPFQTVKSSVDKLETPPIPDVPSFDLEEYDAVKESKHVPLRAAKVPSSRLGRLFHYGGLGAGLAFGAAGSLLRGASSSGADGNATGNLFMSEQNVARLVDKLSTMRGAALKLGQFLSIQETKLLPPQIEQVLLRVQNSANYMPVWQMNKVMSQELGGSDWRQRHFKEFEDIPFASASIGQVHSAVLRDDFVDPSMAGQRVAVKVQFPGVLESIDSDLSYLRWLVSASALLPKGLFLENTLRVLGRELKDECDYKREAEMGRRFGEILQDSPEFEVPKVVDSLSTGKVLTTQMMRGRPLSQASRYPQATRDRIAQSILKLSLSELFRFRLMQTDPNWSNFLYNERTGKIQLIDFGATREYSKEFMDNWLYMLQAAIDGNYDECLTWSRKVGYLTGNESKAMERAHVDSMIALGEPFRADAPDPYPFEHQTITDRVKAQIPLMLRERLTPPPQETYSLNRKLSGAFLLCARLKAHVSCSSLFEAVKADYRFGPESKDVHAQAGRTAGRTGAVASPPQANSPFNSSEQRRYFHSVFRAAQLQQDQRTRRKHGRNLIDRFPRSKIMLSSDQGSKVGSCEVGDSVESLAANPTGSSSIQETPVDAVEPESKFGINLERQATPAEVTTAPTTEAVLTCSESQSSLGSTTIRGIAIPLKPPPPGPEECCMSGCAHCAYDIYAEDLQDFHSRLSSVRTQLAQLSPPVTREEWRQDLLGDYPSSDSEAGGSEDDMKERAQREVDRVISDLDPTMKAFLEMERKLKKQEQQMGKQSQAL

SEQ ID NO: 37361 - protein, 601 aa, Neurospora crassa
MTGKITGPGSGNRVLAAPGSSRHVHDETTPLLSESALEANKPTDEAVRHGDGVDIFDDGDTTVVDDDYSTGDGEISVVADDDSTGDGEITVVADEISTTRLVVIFGTTWVGVFLGAIDASIIATLSAPIASEFQSLSLLSWIATAYLIANAACQPLSGRMTDIFGRGPGLVFSNVLFSMGNLICGVAKNEQTMILGRVVAGIGGGGLMSISTFLGSDLVPLRKRGVVQGLGNIFYGAGAMLGGVFGGFLNDTSSWGWRLAFLVQVPVSLVSAVLVYFLVKVPPKISNKSLVSRIDFLGSFYIIAFLILLLLGLNAGGNVVPWTHPLVLISIPLSLNMLAGFIYWESRPRNTQPVIPVRLLTHRTVLTACLTNFMCTMVTLMLTFYIPMYLIVLGHTPTQAGLRLLASPLAICFTSFGSGLVMKYTGKYKMLGIALVSTLVLGVAALTTLGQNSPGWIVFVALFMIGGGYGGMLTVTMVACIAAVDHSQQAVITSATYAFRSLGATVGITVASAVYQNILKTELWARFGDWPGAAEEIGRIRDDLGELNRLPLAWREGVMESFMTAFRGVWFTALGMAAVGLVAVSLMRQHKLHMTLTRQED

SEQ ID NO: 37362 - protein, 207 aa, Pseudomonas syringae pv. syringae B728a
MLKIWGRKNSSNVRKALWIAEEVGVPYETQDAGGAFGLVNEAAYRAKNPNGRIPMIEDGDFVMWESNAIVRYLAARHAPDSDLYPADLQARANADKWMDWTTSTIAAPFSPVFWGVVRTPAEKQDWPAIKQGIKTLHSLLLVADEALSRQPWLSGDAFGMGDIPLGCFAYGWFEMPIERPPLPHLQAWYERLKTRPAYRKAVMTPLT

SEQ ID NO: 37363 - protein, 702 aa, Candida albicans SC5314
MSALLKETFARCKKEGRNALVNFITAGFPTIDDTIPILQNMQNAGVDIIELGVPFSDPIADGPTIQQANNIALDNGITVPKCLELLSQARDQGVTVPIILMGYYNPILKYGEQKFLKDAAEAGANGFIVVDLPPEEAIKFRTECTKYGLSYVPLVAPATSNDRLKILGEIADSFIYVVSKMGTTGASTKVSTGIQELCDRVRKYAGPDTPLAVGFGVSTREHFLTVGEVADGVVIGSKIITLIGDSKPGERGKVAYDYVQSILGNDFKPNYPKTFERNNNNQAKETKPVLEENHKYNPRFGDFGGQYVPEALHTCLAELEKGFEDAVADPEFWKEFRDLYSYIGRPSSLHKAERLSEHAGGAQIWLKREDLNHTGSHKINNALAQVLIAKRLGKKKIIAETGAGQHGVATATACAKFGLECTVFMGAEDTRRQALNVFRMKILGANVVPVKNGTQTLRDATSEAFRFWVSNLETTHYVVGSAIGPHPYPTLVRTFQSVIGQETKEQFKALNNGKLPNAVVACVGGGSNSTGMFSPFENDKEVKLLGVEAGGDGLDTERHSATLTAGIPGVFHGVKTYVLQDNDGQVHDTHSVSAGLDYPGVGPELAYWKSIGRAEFVAATDAQALEGFRLLSQLEGIIPALESSHAIYGAVELAKTMSKDQHIVINVSGRGDKDVQSVAEVLPKLGEQIGWDLRFEEDPSKV

SEQ ID NO: 37364 - protein, 572 aa, Oryza sativa (japonica cultivar-group)
MNSGGRSLLSSPLFASSSPAFRGGAAAASCSSSSSPSSSSRATVVPMVHDTGGGRASSTACHYSPSLVAAEPEEHVHGRSKDDDDDAAVSLMGEKALLELLLDMALEQHAPGKKLPAEEREESEFDIYLRDDKSHVLYHPEFSSTSVSSSPLSVKSSERSDLGTASAVLTKDVALLAEETDILATQLKASQLYSVDSSKSNEELQSKGQVFVRSTRLLERRSKRRYAPRASIADVSCSADNSKKKEKSKKYGRVLEPDEPFKLFLRDRETTEFLTAKEERHLFSKIQILMKIEEAHRKLEVQCGREPTLAEWAEAVGMSSKELQSSIRTGRRCREKMARSNFRLVIHVARKYEGYGLDIQDLVQDGCSGLMKTFEKFNPSKGCRFPTYAYWWIRQSIKKSIFKNSRLIRLPESVYALLRKVGKARMECIMEGEQPTNANVARRAGITIEKLAKLRAKTRKPRSMQDHVWSDEGVTFQEITEDPNVEPPDLSVDRMMMRQQVRDFLGILSPREKEIIEHRFGIHDGEPKTLHVIGDMFGLSKERIRQLQNRALEKLKRSASLQGFDVYFDLLT

SEQ ID NO: 37365 - protein, 94 aa, Zea mays
KEQFSDGVGYGWIDALKDTAEKQVTDEMMKNPKPEWGNDIPDTKEAYWYRCMFDEHFPPHCASTVMRWTPTWSKQTDPSGRAIATHNAKYDSAA

SEQ ID NO: 37366 - protein, 873 aa, Ashbya gossypii ATCC 10895
MRTPRLPMKGNIAEVVLYRCSKTIKVNNYSNPRPVALDGRMMETTNTQKPLQWQTTPGEGSLEVHSPEQDRQRSISLSKFIPRSLKRNNSMNGSVESHVDAGDAEVDQEGQRASNGRQLGPGGEKRPEAGQLRGTGALPVILKENNKFASRLRSMFKASRELSQQEPNDVQQVSPEGKAEGTARHTPDGGMRVRSPSTPTFTVSRDPQPPTGQAAGTHEAIDIAPGRLQSPLMPSSHSAGGGITSKARGNRSNTVRGLNPYFAYQGLPPHAEPAHDGSQRSYDNSTFLTTPNTAQTSQTTLSYTNCSSNASAASLNDIEENEEVCSFQHTKKSPDILLQAIGCPVTPLTASESREETPLKSPVLRRVASQPTSLNKQEGQTRNNQQATDAGASLMAHQTLPVPVSCRSSSSSNMCAEASATARLEGGSPEHLELPPKRSQRLRAKSFGNKFREAVVGPQSFEKIRLLGQGDVGKVYLVREKKSDRLYALKIFGKAEMIKRKKIKRILAEQEILATSNHPFIVTLYHSFQTEDYLYLCMEYCMGGEFFRALQTRKTKCISEDDARFYASEVTAALEYLHLMGFIYRDLKPENILLHQSGHVMLSDFDLSVQAKGTRNPQVKGNAQSSLVDTKVCSDGFRTNSFVGTEEYIAPEVIRGNGHTASVDWWTLGILTYEMLFGFTPFKGDNTNQTFSNILKNDVYFPNNNDISRTCKDLIKKLLVKKESKRLGSKFGASEIKKHPFFKTVQWALLRNQEPPLIPVLTEDGYDFAKLSHKKDVKKAEKFGPSGDSTHKFKVAASIDSVEEQERIMFEEKVEHDDAVSDDDPFHDFNSMSLMKQDNNSLIYGDNNSYGKITYAPNQNRSRSNSHRSFFKR

SEQ ID NO: 37367 - protein, 591 aa, Bacillus sphaericus
MIMLEAVYHRMGQNWSYAYNDSTLHIRIRTKRDNVPRIDLHCGEKYDPEKYKETIPMERMASDGLFDYWQAAVQPRYRRLVYYFALHSDNGDAVYFMEKGFFDQPPKVMYEGLFDFPYLNRQDVHTPPAWVKEAIFYQIFPERFANGDPSNDPEGVQEWGGTPSAGNFFGGDLQGVIDHLDYLSDLGVNALYFNPLFAATTNHKYDTADYMKIDPQFGTNEKLKELVDACHARGMRVLLDAVFNHCGHTFPPFVDVLNNGLNSRYADWFHVREWPLRVVDGIPTYDTFAFEPIMPKLNTGNEEVKAYLLNVGRYWLEEMGLDGWRLDVANEVDHQFWREFRSEIKRINPSAYILGEIMHDSMPWLQGDQFDAVMNYPFTNILLNFFARRLTNAAEFAQAIGTQLAGYPQQVTEVSFNLLGSHDTTRLLTLCSGNVERMKLATLFQLTYQGTPCIYYGDEIGMDGEYDPLNRKCMEWDKSKQNTELLAFFRSMISLRKAHPALRGSGLRFLPVLEHPQLLVYERWDDNERFLIMLNNEDAPVNVVIPAAQPGASWRTVNGEPCAVVEESSIQAALPPYGYAILHAPIAGTAE

SEQ ID NO: 37368 - protein, 705 aa, Saccharomyces cerevisiae
MSRDLQNHLLFETATEVANRVGGIYSVLKSKAPITVAQYKDHYHLIGPLNKATYQNEVDILDWKKPEAFSDEMRPVQHALQTMESRGVHFVYGRWLIEGAPKVILFDLDSVRGYSNEWKGDLWSLVGIPSPENDFETNDAILLGYTVAWFLGEVAHLDSQHAIVAHFHEWLAGVALPLCRKRRIDVVTIFTTHATLLGRYLCASGSFDFYNCLESVDVDHEAGRFGIYHRYCIERAAAHSADVFTTVSQITAFEAEHLLKRKPDGILPNGLNVIKFQAFHEFQNLHALKKEKINDFVRGHFHGCFDFDLDNTLYFFIAGRYEYKNKGADMFIEALARLNYRLKVSGSKKTVVAFIVMPAKNNSFTVEALKGQAEVRALENTVHEVTTSIGKRIFDHAIRYPHNGLTTELPTDLGELLKSSDKVMLKRRILALRRPEGQLPPIVTHNMVDDANDLILNKIRQVQLFNSPSDRVKMIFHPEFLNANNPILGLDYDEFVRGCHLGVFPSYYEPWGYTPAECTVMGVPSITTNVSGFGAYMEDLIETNQAKDYGIYIVDRRFKAPDESVEQLVDYMEEFVKKTRRQRINQRNRTERLSDLLDWKRMGLEYVKARQLALRRGYPDQFRELVGEELNDSNMDALAGGKKLKVARPLSVPGSPRDLRSNSTVYMTPGDLGTLQEVNNADDYFSLGVNPAADDDDDGPYADDS

SEQ ID NO: 37369 - protein, 561 aa, Vibrio sp. Ex25
MAMTKHDESWWKTATIYQIYPKSFCDSGSKGTGDIKGIISKLDYLKHLGVDAIWLTPVYQSPMVDNGYDISDYYAINPEFGTMEDFDTLLAEAHQLGIRIIVDIVVNHTSTEHKWFQSALGDKNSPYRDYYIWKDPVDGAEPNNWQSKFGGNAWELDEATGQYYLHLFAKEQADLNWENPVVREEVKEVISFWADKGVDGFRLDVINLISKQQDFPSDDIGDGRRFYTDGPRVHEYLQEISEAVFQKYGSVTVGEMSSTTLEHCQQYSSLAGKELSMVFNFHHLKVDYPNGEKWTKAPFDFIQLKQIFNHWQTGLNGKGWGALFWCNHDQPRVVSRLGDDKQYRVESAKMLAASVHMMQGTPYVYQGEEIGMTNPGYTEISQYRDVESTNMYDIMVNRDGVSHEEMMAILAQKSRDNSRTPMQWNSQKHAGFTEGTPWLEVAQNYSEINAEAAVADLSSVFYFYKRLIELRKQVSVITDGCYEDLLPEHQRIFAYARQNDKQTLLCINNYYAEEVECVLPERFDMSKAKNLLSNYQNSASAVASNHQVLRPYETRILLIEE

SEQ ID NO: 37370 - protein, 383 aa, Staphylococcus aureus subsp. aureus MSSA476
MNELEFVTKHRRHLHQHPELSLHEFETTAYIKAFLDSLNIKYDCPLETGVIAYLEGNGSHTIAYRADIDALPILEENDVPYRSQSDHVMHACGHDGHTTALMLFVQRCKDMQDAGQLPQNVVFIFQPAEETGGGANRLIKAGAFDKYPIEAVFGIHVNPFADEGIAVIRDEEITASATEYRFFLTGLSSHVADKEQGHSCGEALQHVLTQISQIQQFHLNGLKRNIVHIGHFKAGEAINTVPSNGYLEGTIRTYDIDDLTIVKNQMHKIAESVKLLFNVDCEVKFAEGYPPTINSPKLRTQIEDALIKADLNVYDKPTPFLFGEDFSFYGQQLAPAYFVFIGTRNEDKGFVTGLHTSHLNFDEKVLINVVNFYENLLNNYKEV

SEQ ID NO: 37371 - protein, 323 aa, Ralstonia eutropha JMP134
MHHAIRIHETGGPEKLVWDQISVDDPGPGQARLRQTAVGVNFIDIYFRTGLYPLPLPFIPGREAVGVVEAVGPDVTSLKPGDRVVYSGVQGAYAQVRLVPADRLVKLPDGISDEIGAAVMQKGMTAQFLCRQTYQVGKDDTILVHAAAGGVGLVLCQWAKHLGATVIGTVSTEEKAKLVEAHGCDHALIHGKDDFVEVVKEITGGVGVPVVYDSIGKDTFMGSLDCLRPRGLMVLYGQSSGPVPPFDISILDKKGSLFLTRPTQNAYLPTRAKVEEGAQEVFDVVQSGAVKVHINQRFALKDAAEAHLAMESRKTTGSLVLLP

SEQ ID NO: 37372 - protein, 208 aa, Magnaporthe grisea 70-15
MATNITWHDGLTRRERNQLRGQRGFTIWFTGLSASGKSTVATALEQHLLHLGLAAYRLDGDNVRFGLNKDLGFSEKDRNENIRRIAEVAKLFADSSVVALTSFISPYRADRQTARELHAQAAQKGDEPLEFVEVYVDIPIEVAEQRDPKGLYKKARAGEIKEFTGISAPYEAPENPEITIKTHENSVEECVAQIVKWLQDKGLVKATP

SEQ ID NO: 37373 - protein, 797 aa, Ralstonia metallidurans CH34
MKRALLLILAVLAGFIPYARAMAQGSWGATEEAWLKEHHVLRIAVDPYWQPLEYVEKGTAHGLSIAYIHAIADRLGLTVQLVPTKSWSESVRKLLDGEVDVLPAVPDFQLPKSAGTRIALTRPYYVGTTLVVAKARDNNYFDLSSLGCITVAVKEGGAYHQWFEGHPLPCTRLLPEPSDSMALAAVRDGKAAAAVGPSAVLHPLIRLQYDKTLHIAGTIAELPLVLRMAVRQDSAPLLSLMNQALASLSAGETDQLYQNWLEGADYLQPSLKALWHYYGATIVLFLIVLISLGVSVYQAMRARANALKSEKVKSEFLAIMSHEIRTPISAVVGALELLDREDNNTPRRELLHRARESADSLLAVLNNVLDYSSISTGKILVKPSALRVNDLVRSVLDGFEAIADRKGIALQLNDQSGGHTINLDGNRIRQVLGNLVANAIKFTEQGTVTVDVRLSRSERSSERVTLAIRVSDTGIGIAPEDQPRLFQPFSQVGNARQRQTGSSGLGLSICKKLVEAMGGSISIWSTLGQGTTVEFSLESTIADTHETALPPSPQVAASVSGEILVVEDTPANQLVLMEQLRALGYDPVLAEAGAQAIDLFSTRSFAAILLDLHLPDVDGFTVAKQMRAREDSTHSQPTPIIAVTAEAGPEQALRSLDAGIDCVLAKPINLQGLQETLHLWIPDCHATGAIGATATDALNALDASHSSHLERTKSMAEYALLELAALDVAARARDPVMAGHHLHRLKGTLLQSSQLTNLAESIPSIEASLDKDVDWDGIVLSLQYLRPEILRRSADDA

SEQ ID NO: 37374 - protein, 302 aa, Methanococcus maripaludis S2
MDKIGKITAVGHIALDYIFNVDKFPELNTSMQIPTAKKYYGGAACNVAAEIANLGVKSEILSCVGTDFKASGYGEYLEKLGVSTKNVYVSEEEETPKAWIFTDPQNNQITYFLWGAAKHYPEIEVPEFDSEIVHLATGDPNYNLKCAQKASSKGIFVSFDPGQDLTLYSKENMENIIENVDFLFMNNHEFQRTLDLLNISEKELISRVKVLIVTYGKQGSIIYSEDEAIKVPAILTQAKDPTGAGDSYRAGFLTAYLKGHDLKNCGLAGSCVASFVVEQVGCQTNLPSWEMVIERLNENNLL

SEQ ID NO: 37375 - protein, 290 aa, Zea mays
MAAAQVVAKGSVVSPCGNRAVPGLLGRRRDAVAAQMTPSAVRIGGSWRKNAFPGVRLALGTRRSRPASRSFSASPVQMNMNLALGKSMRWWEKGLQPNMREIESAQDLVDALTNAGDRLVVVDFFSPGCGGCRAFHPKICQFAERNPDVLFLQVNYEEHKSMCYSLRVHVLPFFRFYRGAQGRLCSFSCTNATIKKFRDALAKHKPDRCSLGPTRGLEESELLALAANKDLQFTYAKQEPELIPRGDAPGEVVAPEPAKLPAAPKPLVRLGSEERSGWSRQEDEMHMRLS

SEQ ID NO: 37376 - protein, 140 aa, Zea mays
MEVLSLDSLPVGFRFSPTDEELVRYYLRQKINGRDEEVRVIREVDICKSEPWDLPHLSVVKTTDAEWLFFCPIDRKYPSGGRMNRATLAGYWKATGKDRMVKTGKKIIGVKRTLVFYKGRAPKGTRTCWIMHEYRATEQD

SEQ ID NO: 37377 - protein, 423 aa, Streptomyces maritimus
MSRHVVITGLSVLAPGSTDTEGFWKMITAGRSAIRRITAFDPTPFRSQVAGEVDLDPLACGFSRREVRRLDRASLLAVACARRAVAEAGITSGTSIDPGRIGVSVGNAVGSATSIENEYVVLSDEGRQWLVDQKYQSPHLFDYFVPGSLARETAWAAGAEGPVSVISAGCTSGIDALGHACQLIQEGSADVMVAGATDAPVTPIAVACFDAIKATTRRNDDPEHAPRPFDRTRDGFAIAEGAAMLVLEDSEHARRRGADIYGTITGYAAHSNAYHMTGLSRDGNEMARAITTALDEARTDPTAVGYINAHGSGTKQNDLHETEAFKKALGEHAYNVPVSSIKSMIGHSLGAIGAIEVATCALAIRNGVVPPTANLHEPDPDCDLDYVPLEARDVDLDVVLTVGSGFGGFQSAMIVEKWRGGHV

SEQ ID NO: 37378 - protein, 346 aa, Streptomyces cinnamonensis
MTTRPDTKTALSQKTALSQLLTEIEHRNPAQPEFHQAAREVLETLAPVIAARPEYAEAGLIERLCEPERQIVFRVPWQDDHGRVRVNRGFRVEFNSALGPYKGGLRFHPSVNLGVIKFLGFEQIFKNALTGLGIGGGKGGSDFDPRGRSDAEVMRFCQSFMTELYRHIGEHTDVPAGDIGVGGREIGYLFGQYRRITNRWEAGVLTGKGRNWGGSLIRPEATGYGNVLFAAAMLRERGETLEGRTAVVSGSGNVAIYTIQKLAALGANAVTCSDSSGYVVDEKGIDLDLLKQVKEVERARVDTYAQRRGASARFVPGRRVWEVPADIALPSATQNELDADDATALI

SEQ ID NO: 37379 - protein, 407 aa, Streptomyces maritimus
MSTDIVITGMGVTAPTGLSVKEYWNATLAGTQGIAPLQEFDPTPYTARLAGQITGFEAKRHLPGRLLPQTDRVTRLALVAADRALEDAQVDVGELGTYECGVVTSNATGGFEFSHREMQRLWTQGPDRVSVYQCFAWFYAVNTGQISIRHKMRGPGGVVVAEQAGGLDAIGHARRTITRGRSRLMVTGGVESSFDPWGWVSHLASGTVSTATDPATAYLPFDQRACGYVPGEGGALLVMEDAQSARGRTDRRPYGKITGYAATFDPAPGAQRPSGLRRAVDLALADAGLKPDAIDLVVADAAGVADLDAQEADALRAVFGPYGVPVCAPKTMVGRLMAGGGPLDVVCALLALRDNVIPPAVNVTDVVDDYQIDLVRDEPRTCPLSRALVLARGAGGFNSAVIVEHTP

SEQ ID NO: 37380 - protein, 246 aa, Synechococcus elongatus PCC 7942
MFGLFGKKTGLPTPEEALPGRAQAMLVPAKHFVLGTPLDGPFPVGIQLALFGNGCFWGTEKQFWQLPGVYSTAVGYAGGLTPNPNYREVCSGMTGHNEVVRVAYDPDRISYADLLKAFWESHDPTQGMGQGPDRGTQYRSGIYCYTPEQKQIALASQAAYQAVLKAKGYGAITTEIIDAPTFYFAEEYHQQYLDKPGSRPYCGAQPTGADLPHPNQWNLPTELQSHLTAHPEVWSKNFAECPVVPH

SEQ ID NO: 37381 - protein, 425 aa, Actinomadura hibisca
MSRPQGGGPRRVAITGMGVVAPGGSGRKAFWNLLTDGRTATRKISLFDPAGFRSRIAAECDFDPAAEGLTPREVRRMDRAAQLAVVSAREALADSGLVAGEGDPARFAVSLGSAVGCTMGLEDEYVVVSDQGRDWLVDHSYGVPHLYRHLVPSSLAAEVAWAGGAEGPVTLISTGCTSGLDAVGHGARVIAEGSADVALAGATDAPISPITVACFDAIRATSPNNDDPEHASRPFDRERNGFVLGEGAAVFVLEELEHARRRGAHVYCEVAGYATRGNAYHMTGLKPDGREMAEAIRVAMDAARVAPADLDYINAHGSGTKQNDRHETAAFKRSLGERAYELPVSSIKSMVGHSLGAIGSIELAACALAIEHGVVPPTANLHNADPECDLDYVPLVAREGRIRTVLSVGSGFGGFQSATVLREAA

SEQ ID NO: 37382 - protein, 449 aa, Ralstonia eutropha JMP134
MQTYDYDLFVIGAGSGGVRASRIAAGYGARVAVAEEYRTGGTCVIRGCVPKKLLMYASHFAQAVDDAAGFGWRAPTPVHDWASLIAAKNAEIARLEAIYVRMLQSAGVDAITGRAQIVGPHRVEVNGVIFTAKVILVASGSVPVEPAIQGAELMITSNEAFYLDTLPKRIAIIGGGYIACEFAGIFNGLGSDVTQLYRGQQILRGFDDELRNHLGAEVSKSGVDLRVAVDVAAVGKRGDGLVVHLTTGQAIEVDAVMAATGRRSNTSGMGLESAGVLLDESGAIKVDEYSATSNPDIYAVGDVTNRLNLTPVAIHEGHAFADTVFGGRKRASAHDNVPFAVFSQPQAASVGLTEAQARRRHAKVDVYSSAFRPMRTALSGRDERALVKLVVDASTDRVLGAHIVAADAAEIILGIAVAIKAKATKADFDATLGVHPTLAEEFVTLRNRR

SEQ ID NO: 37383 - protein, 302 aa, Escherichia coli
MSQNTLNSDNDLAEEELLSQGATQRVLDATQLYLGEIGYSPLLTAEEEVYFARRALRGDVASRRRMIESNLRLVVKIARRYGNRGLALLDLIEEGNQGLIRAVEKFDPERGFRFSTYATWWIRQTIERAIMNQTRTIRLPIHIVKELNVYLRTARELSHKLDHEPSAEEIAEQLDKPVDDVSRMLRLNERITSVDTPLGGDSEKALLDILADEKENGPEDTTQDDDMKQSIVKWLFELNAKQREVLARRFGLLGYEAATLEDVGREIGLTRERVRQIQVEGLRRLREILQTQGLNIEALFRE

SEQ ID NO: 37384 - protein, 232 aa, Dechloromonas aromatica RCB
MLPVNTKILANPEEVAAQACRIIIAEAEAAIRERQVFRIVLAGGNTPRRTYEMLAGMVQDWRAWEIFWTDERCLPADDPGRNSRLANEVWLSRVAMPAGQIHPMPAEHGATRAAEEYSATIRDKQPFDLVLLGMGEDGHTASLFSLNGHHVAPVIAVHSAPKPPSERVSLNFQTLRACRKQLVLVTGAEKSPALFAWQQDAKLPIAHAVRNDACLLADAEAGRSANVVATVL

SEQ ID NO: 37385 - protein, 378 aa, Streptococcus mutans UA159
MSEGIYEKLREIRHYLHQHPEISENEFETTAFIKKHLKDLGIEPLDYPLKTGVIAEIGSGQPIIALRADIDALPIIEKTGLAYASKNGAMHACGHDFHQTSLLGAAQILKERKAEIKGTVRLIFQPAEENFQGAYQVIEAGGIEGVSAIIGYHNNPHLKPGQIGLRSGAIMAGVEQFEVTVAGISAHAARPDLGVDTVLAITTMIHNLQQIVSRTVSPFDSAVLSVTHIDVGTTWNVLPAKGFFEGTIRTFDPKIRLAVINKFTKIVETTAEQFGAQVSIQWGNSPKVTYNDATLTPLIFENSKTFAQVIETLPSTGGEDFAAYQEKIPGVFAFVGSNGADNAPDWHHDDFIVKDEALPTAVNYFVENAFKLLEYYRS

SEQ ID NO: 37386 - protein, 204 aa, Ralstonia eutropha JMP134
MIDLYSWSTPNGRKISIALEELNLGYTLHPVDISKGEQFSAEFLAMNPNNKIPVIRDSDGVDGHPVTLFESGAILVYLADKARRLLPVAGRARYETIQWLMFQMGGVGPMFGQTHHFQRYAAHEKYSLERYTTETHRLYKVLDGQLAKSEFVGGDAYSIADIAIYPWVARFGLHQIDLASVPHVKRWYDTLGERPAVQRGMEVL

SEQ ID NO: 37387 - protein, 417 aa, Solibacter usitatus Ellin6076
MELRTMRVSTSDITGKRKGSGSNDIFEKCRNFTRPSDLQAAGLYMYFEVFGDREGCGAGEVRMGRRKVLMFGSNDYLDLITHPKVKEASVQALKKYGSGCSGSRLLNGTLDLHVKLETELASFVHKEAAIIFGTGFQANYATLSALTEKGDVMVCDHNLHASLVEGALRSPARTVRFRHNDMDHFERCLENCPPEEKIFIVSEGVFSMEGDIADLQGILKLAKPYGARTYVDEAHGIGVLGETGAGAAEHLGVLDDVDIVMGTFSKSLASVGGFIAGERAVIDYLKHTARPFVFSASLPAASVAAVGAALQIMRKEPERRLHLLRIAQLLRDELRARGFNVLPGETAIVPVVIQQELDLCRLCKALLEEGIYINPVLRPAAAQNLLRISCTAAHTEKHVERLVNTLVRVAAELGIER

SEQ ID NO: 37388 - protein, 197 aa, Lotus corniculatus var. japonicus
MSASRFIKCVTVGDGAVGKTCLLISYTSNTFPTDYVPTVFDNFSANVVVDGSTVNLGLWDTAGQEDYNRLRPLSYRGADVFILAFSLISKASYENIAKKWIPELRHYAPGVPIILVGTKLDLRDDKHFLADHPGAVPITTAQGEELRKLIGAPAYIECSSKTQQNVKAVFDAAIKVVLQPPKQKKKKREAQKSCSIL

SEQ ID NO: 37389 - protein, 621 aa, Haemophilus somnus 129PT
MEQNKQSQLKLLIARGKEQGYLTYAEVNDHLPEDLVDADQIEDVIQMINDMGIQVLESVPDADDLMLNENITDEDAVEEATQVLSSVEAELGRTTDPVRMYMREMGSVELLTREGEIDIAKRIEEGINEVQSAVAAYPKALNYLLEQYTLVEEGGMRLADLITGFVDPNAVVEEEIIETDDILTEDDEEHVESNVDVNDEEEEEDSEDNSNVDSDSDNTIAPEVAREKFEALRIQHQKTLAAIEKYGRSRKQAKDHIQALADIFTQFRLVPKQFDALVNYMRDMMKSVRQHERQIQKLVVDLAKMPKENFQKLFIGNESSEGWLDKLLLARKPWSERLIQHESAVRQSINQLLKIEQETNLTISQIREICDKVAQGELKARRAKKEMVEANLRLVISIAKKYTNRGLQFLDLIQEGNIGLMKAVDKFEYRRGYKFSTYATWWIRQAITRSIADQARTIRIPVHMIETINKLNRISRQMLQKMGREATSEELAERMGMPEDKIRKVLKIAKEPISMETPIGDDDDSHLGDFIEDNTLELPLDSATAQSLRAATHEVLEGLTPREAKVLRMRFGIDMNTDHTLEEVGKQFDVTRERIRQIEAKALRKLRHPSRSETLRSFLDE

SEQ ID NO: 37390 - protein, 138 aa, Brassica napus
  misc_feature (126)..(126): Xaa can be any naturally occurring amino acid
  unsure (1)..(138): unsure at all Xaa locations
MKMGRFEGFYLSGVLNSFLLFCNGGTTSRYVSRLEATADMPLDSDVFHVERSTAYQPWIWTVGSHELDFAPQIGETTPFKPFKHRYRTLHRSSGSTEQVWYSIKRGPAYIIVPASYSAYGKYTPEXMWLEQEFPKVNR

SEQ ID NO: 37391 - protein, 1979 aa, Cryptococcus neoformans var. neoformans JEC21
MKRQSLSFKNLIAVEPRMSPTQRRSSFFERQRQSSGSSTKTDHSSVFGSGSGSGSGLMKKKNLVSKMEGWWNAVKSNFVPEHPPGRPGGHSNQGRVNHSPKRRGSIPSITQLKSAYLAPEPAALRGSPNLPLRQVISHNELRQRPQGDNHYESASVLDSTPADIARLSRNSSSETAMPIPQHMLVPPPPPVRHASTVTEVTEEPTNPPSRQEPPIHTSLEARRRQPNLRLELEPHTLAQPSPHSSNSSGSQPRMVPLGMPLRLSESSLRSSVYGQSRGPGLTPGAPRWDQTPWPVHTFSQHQVEDREDKPVAPGAELTVGSVRNHIRRRLNGAKEACDASLRRTINSITKFVEQERQDVGRQEEIPVDYFETLNLNDSAVVDGEDTGSEAAYENEGPSSRAVSISWSRGPSRRPSVSLHAISPKARTSALATSPSRIVSRRRPSAVLPRTFGPTGRNVSIPKDRTQSGASSRSTSRSHSPMPGRQLPLQVDSTDEDRHFLQALQDLIVQATEVVDSSVHTLKSGPDSCATIIQRIQKIGAKWDEHPDWPGREWYVEILLAVANLGRVLDWWEAEKGFWNFDAETENDQLLFVLKPREEQRFDQEFRATFSEPRYSPLSTAVSVAGDLPPALGLDATSPIVSSPQTAKSEEPGKGLSPKAQAIDDLKFLAEHAKSVNIVMELSLQGEIVEYVNDAVLEVLGQVPEEVIDHPITDLLAPGDASVFSEATHQLIEDDNNTVQCRFRFEVHDLAQDEDDERQPGPVYIELEGVGMLMRENNEPSHTMWVMKPVAATQVEAITAAVFPRDGHISTEGILCRICEREIVAWFFEKHNETCDALHRLEAEIAECDDCLHELRQTVVDLESEVDAAAPNNPAQYQGVLFFTLPESVAASDAKAATQYLQGIEVRKVAREHLQDVLHILSTARQIETPYVREEEADLPSNIQNYLSEESEDRLLKIMRWQRPQTNEFALNLLFTHVEEQLKRKHKAVARMQSTIRYSEKTRHEWEDKVNEMLAEQEDGSGTESESGSGGSEIDKSPSEVHAALSVENPESSPPGPRKIAPLARLPITQAHPHRQPSVLEELSAPTSIAPTPAAPQTITTDPAPPALTSASSLPTVPILAPKVRNAPFQFGSKVHSPDMPPPAPSRRVTPSKTGSTEPESMTSSPLLMPYGADRHHRRRISGSQGMRDAPLSPRIPSAALRSSVAQTTIDDFKILKPISRGAFGSVYLAKKVATGDYFAIKALKKSDMISKNQITNVKAERTILMNQASSPYVAKLFFSFQSKDYLYLVMEYLNGGDCASLVKTLGGLSEDWARNYTAEVVLGLEYLHKRNIVHRDIKPDNLLIDARGHLKLTDFGLSRIGLLNRQVGGPRPAYLRGISLRGSGQHRLSMTRTTSNSSLIDSNMLSPEISSGQSLPNVSQSYFSQMRPSGPEDESSGSESAGIIPKHVRQMATKLSSELGTPSVNGKEPPKFVGTPDYLAPESILGIGQDDAAVDWWALGVVLYEFLYGFPPFHAETPEKVFDNVVSRRINWHEDEVGISPEARDLINRLLCSDPQMRLGANGAEEVKSHPYFASINWDTIATSEASFVPDVADPESTDYFDSRGATVGFHDGGGVPQVSKQTATDPNAKANPGAASMSPKASGEMEAIANDMAEQSDFGAFNYKNLPVLKQANDDVIRKLRTDSMAPLSQALECAPSLSKGKQRRLSVQVQSKSTRRISDPNQAPYTPSPSTSTSSAVSTPSRSNMQPPSSSTSHHPRRLSELGALDRVKSTDEADEPREAQSQTRLRGDSGSSIGSNSTELTKQRRHASLQLDFATSEPFGGLAENKHFVGSNVHSRGLDVLVAEDNPISQKILETLLTRVGCRCICVDDGPSALAAIMGSIRFDVIICDIHMPVVNGEQVARMIRSTNNHNQLTPIIAATSYEQYINEEGTLFSGVLAKPVTKADLIRCLAKLGFVISAGASDVASVPTTAPAVQS

SEQ ID NO: 37392 - protein, 246 aa, Actinomadura hibisca
MTDTSFAGKNALITGGTRGIGRAVALGLARAGANVTVCYRSDAESAAAMEAELAATDGKHHVLQADIGNAGDVRRLLDEVAARMGSLDVVVHNAGLISHVPFADLEPEEWHRIVDSNLTGMYLVVRAALPLLSEGGAVVGVGSKVALVGISQRTHYTAAKAGLIGFVRSLSKELGPLGIRVNLVAPGITETDQAAHLPPVQRERYQSMTALKRLGQADEVADVVLFLAGPGARYVTGETVNVDGGM

SEQ ID NO: 37393 - protein, 540 aa, Streptococcus mutans UA159
MYAHDILNDPFLNKGTAFTMEERKKFGLIGLLPPHIQTLKEQAEQTYAQMQTKANNLEKRLFLMEIFNTNRTLFYYLFSQHLEELNPIVYDPTIADTIEGYSDLFVDPQYAGYLDINHPENIEATLKNAAGDRDIRLIVVTDAEGILGIGDWGTNGVDISVGKLMVYTGAAGIDPVTVLPLVIDAGTNREELRNNPNYLGNRHERVRGERYYDFVDQFVQTAERLFPKLYLHWEDFGRSNAANILEKYRKEIPTFNDDIQGTGIVTLGGIFAAMDITGEKLTDQVYLCYGGGTAGAGIASRVLREMVSEGLPEDEAYKRFFMVDKQGLLFDDMDDLTPEQKPFAKKRADFPNADQLTDLLQVVKTVKPTILVGTSTNPGAFTKEVVEAMCENTERPVIFPISNPTKLAEASAQDLITWSDGKAFVATGIPADTVSYKGVDYVIGQANNALIYPGLGLGMLASEASLLTDEMIGAAAHSLSGIIDITKPGAPVLPPFKYVGDVSIKVAEAVAKKAQEQGLARAEETDMAKAVRDFKWYPEY

SEQ ID NO: 37394 - protein, 427 aa, Cordyceps bassiana
DKTHINVVVIGHVDSGKSTTTGHLIYQCGGIDKRTIEKFEKEAAELGKGSFKYAWVLDKLKAERERGITIDIALWKFETPKYQVTVIDAPGHRDFIKNMITGTSQADCAILIIAAGTGEFEAGISKDGQTREHALLAFTLGVKQLIVAINKMDTTKWSEARYQEIIKETSNFIKKVGYNPKAVAFVPISGFNGDNMLEPSTNCPWYKGWEKETKAGKSTGKTLLEAIDAIEAPKRPTDKPLRLPLQDVYKIGGIGTVPVGRVETGIIKPGMVVTFAPANVTTEVKSVEMHHEQLAEGVPGDNVGFNVKNVSVKEIRRGNVAGDSKNDPPNGAASFNAQVIVINHPGQIGAGYAPVLDCHTAHIACKFSELLEKIDRRTGKSVENNPKFIKSGDSAIVKMVPSKPMCVEAFTDYPPLGRFAVRDMRQT

SEQ ID NO: 37395 - protein, 338 aa, Prochlorococcus marinus subsp. marinus str. CCMP1375
MKNPNVICFGEALVDRLGPLGGDPASDKPVDDCLGGAPANVASGLARLGINAAFVGCLGNDSIGNQFRELFMARGVNFAGLQIHESLLSRIVLVYRDLNGERSFGGFAGDQSNIFADQYLDLNVHKKIFPSLLDEAKWLLLGTIPLAVEHSREVVQWTIEQSLNNGLQIAFDLNWRPTFWDINMTPNNPPDTKTCSLITSFLEHASLIKLAKEEAEWFFNSKDPWEISNALPEKPSVIVTDGAQPINWVLGGFSGQTPALSPQKVVDTTGAGDAFMAGLMTQIISFSSQPKLFSEAEAMIQFSAGCGALVCGAPGAIEPQPSYSEVQSLLSSFLNDRS

SEQ ID NO: 37396 - protein, 176 aa, Glycine max
  misc_feature (164)..(164): Xaa can be any naturally occurring amino acid
  unsure (1)..(176): unsure at all Xaa locations
MAIHHETWAFVFGLLGNVISFMVFLAPLPTFYQIYKKKSSEGFQSLPYVVALFSSMLWIYYAFVKKDASLLLITINSFGCVIETIYLAIFLVYAPSKTRLWTIKLLLMLNVFGFGAMLLSTLYLTTGSKRLTVIGWICLVFNISVVAAPLCIMKRVIKTKSVEXMPFSLCFSLTIN

SEQ ID NO: 37397 - protein, 303 aa, Prochlorococcus marinus subsp. marinus str. CCMP1375
MTNTKTHFSNWNKLEVAWKKEGTENNEPFSILLIHGFGANKEHWRKNQTILGTIAPCYSIDLIGFGESSQPPSKLLGEKKTNNNFCYNFDNWGEQIADFSRSIIKKPVLLIGNSIGGVIALRAAQILGNHCKGVILINCAQRLMDDKQLLNKPVWERSIRPILKLITRQRWLSRNLFKNAARQSFIKKVLQIAYPSGKNIDEELINMLYRPTKRAGASEAFHGFINIFNDYLAPELMEQLSLPVYLIWGKDDPWEPIAEAENWYSSIKCIQSITIIKECGHCPHDENPEEVNPVLIKIIQQAT

SEQ ID NO: 37398 - protein, 427 aa, Cordyceps bassiana
DKTHINVVVIGHVDSGKSTTTGHLIYQCGGIDKRTIEKFEKEAAELGKGSFKYAWVLDKLKAERERGITIDIALWKFETPKYQVTVIDAPGHRDFIKNMITGTSQADCAILIIAAGTGEFEAGISKDGQTREHALLAFTLGVKQLIVAINKMDTTKWSEARYQEIIKETSNFIKKVGYNPKAVAFVPISGFNGDNMLEPSTNCPWYKGWEKETKAGKSTGKTLLEAIDAIEAPKRPTDKPLRLPLQDVYKIGGIGTVPVGRVETGIIKPGMVVTFAPANVTTEVKSVEMHHEQLTEGVPGDNVGFNVKNVSVKEIRRGNVAGDSKNDPPNGAASFNAQVIVINHPGQIGAGYAPVLDCHTAHIACKFSELLEKIDRRTGKSVENNPKFIKSGDSAIVKMVPSKPMCVEAFTDYPPLGRFAVRDMRQT

SEQ ID NO: 37399 - protein, 1182 aa, Magnaporthe grisea
MDDRIQDIYKKIEREKALINAANLMRQQTNNDAVRSKLDTQMREGRRNLEFFEGTLREMQMRSMGQGMDNLSIGGSTLAASASSSSRPRSAVEEDGPMPPPKDGGYGAGGDGYGQTQYSQIGEHGDLMPPRGPFANQGPGSHIPKTRPNFTKLDLIKYDTPYLGPRIQLMLSQIQFKLNVEEQYLKGIEKMVQLYQMEGDKKSRADAAARRVESKQKIVLLKQALRRYEELHIDIDSGDSPDDDSINMPNLRKPLTGQLSIRVIAIKDVDHAPTGRFARGPDTFVAIKVEDNIAARTRVSRTDRWENEYHNVEVDKANEIELTVYDKPGEHSIPIGMLWVRISDIAEELRRKKIEAETNSLGWVSADRMGDVNPAARVPPPQFPMNTQQRQPGGPVSPGIQGQQQGYGQPGDPQQPGQQGQMGQVQEPITGWFNLELTGSIQLSLNFFKQSKDRRPVDLGLGRKGAIRQRKEEVHEMYGHKFVERQFYNIMRCALCGDFLKGGSGMQCEDCKYTCHIKCYTSVVTKCISKSNAETDPDEEKINHRIPHRFVAFSNLTANWCCHCGYLLPFGKKNCRKCSECQMAAHAGCVHLVPDFCGMSMAVANQILEGIRSQKQRQQKASSMSDRTLRSGKMSPPGSGHASSASFSQGMGSSYGQASPEATEAAKFMYSSQTSPQRITSPDRTSSSSQAAAAATAAMTGLPGAMSSQPGRQGQQPITDYGSASGGRYGSYGPHDDPYAQPQQSPPPQQQAAYGQPQQRKYNPADYANISGGYGSQPQMAQQPQQARPQQQQQQPLYSPQQHASQAQQPLSPVKQQHQEQQIISPTAGTVIPTSARRPLPSATDPGTGQRIGLDHFNFLAVLGKGNFGKVMLAESKKTRKLYAIKVLKKEFIIENDEVESIRSEKRVFLIANRERHPFLTNLHACFQTETRVYFVEEYISGGDLMLHIQRGQFGTRRAQFYAAEVCLALKYFHENGVIYRDLKLDNILLTLDGHIKIADYGLCKEDMWYGSTTSTFCGTPEFMAPEILLDKKYGRAVDWWAFGVLIYQMLLQQSPFRGEDEDEIYDAILADEPLYPIHMPRDSVSILQKLLTREPDQRLGSGPTDAQEVMSQPFFRNIVWDDIYHKRVAPPFLPQIKSATDTSNFDSEFTSVTPVLTPVQSVLSQAMQEEFRGFSYTADFD

SEQ ID NO: 37400 - protein, 427 aa, Cordyceps bassiana
DKTHINVVVIGHVDSGKSTTTGHLIYQCGGIDKRTIEKFEKEAAELGKGSFKYAWVLDKLKAERERGITIDIALWKFETPKYQVTVIDAPGHRDFIKNMITGTSQADCAILIIAAGTGEFEAGISKDGQTREHALLAFTLGVKQLIVAINKMDTTKWSEARYQEIIKETSSFIKKVGYNPKAVAFVPISGFNGDNMLEPSTNCPWYKGWEKETKAGKSTGKTLLEAIDAIEPPKRPTDKPLRLPLQDVYKIGGIGTVPVGRVETGIIKPGMVVTFAPANVTTEVKSVEMHHEQLTEGVPGDNVGFNVKNVSVKEIRRGNVAGDSKNDPPNGAASFNAQVIVINHPGQIGAGYAPVLDCHTAHIACKFSELLEKIDRRTGKSVENNPKFIKSGDSAIVKMVPSKPMCVEAFTDYPPLGRFAVRDMRQT

SEQ ID NO: 37401 - protein, 370 aa, Listeria monocytogenes str. 4b H7858
MDKRRVVVTGIGAVTPIGNDAETSWENAKKGVNGVAKMTRLNPDDFPVKIAAELKDFDVEKYLEKKEARKMDRFTHYAIASAEMAVQDSGLVIDDSNANRVGVWIGSGIGGMETFETQYEIFLNRGHRRVSPFFVPMMIPDMGSGQVSIRFGAKGINSTTVTACATATNSIGDAFKVIERGDADAMITGGAEAPITKMSLAGFTANKALSLNPDPETACRPFDKDRDGFIIGEGAGIVILEEYEHAKARGAKIYAEIVGYGATGDAYHITAPAPNGEGAARAMKMAIDDAGLTPDKVDYINAHGTSTPYNDEYETQAIKTVFGDHAKKLAISSTKSMTGHTLGASGGIEAIFALLTIRDNIIAPTIHLKN

SEQ ID NO: 37402 - protein, 538 aa, Glycine max
MVTDMLGLVVCTTKKTHEPLVNQSRAPANQPYHLHEKHAASTAQTVPQNMPWKPPGPALSPKPVVGVRQDTILGKQFEDVKQFYTLGKELGRGQFGVTYLCTENSTGLQYACKSISKRKLASKSDKEDIKREIQIMQHLSGQPNIVEFKGAYEDRSSVHVVMELCAGGELFDRIIAKGHYSEKAAASICRQIVNVVHICHFMGVMHRDLKPENFLLSSRDENALLKATDFGLSVFIEEGKVYRDIVGSAYYVAPEVLRRRCGKEIDIWSAGVILYILLSGVPPFWAETEKGIFDAILEGHIDFESQPWPNISDSAKDLVRKMLIQDPKKRITSAQVLEHPWIKDGNASDKPIDSAVLSRMKQFRAMNKLKKLALKVIAENMSAEEIQGLKAMFTNMDTDKSGTITYEELKSGLHRLGSKLTEAEVKQLMEAADVDGNGSIDYIEFITATMHRHKLERDDQLFKAFQYFDKDNSGFITRDELESAMKEYGMGDDATIKEIISEVDTIISEVDTDHDGRINYEEFSAMMKSGNQQQGKLF

SEQ ID NO: 37403 - protein, 224 aa, Bacillus cereus ATCC 14579
MMKILVVDDESSIRNLIRMQLEMEGYEVLAAADGREALERWNEGPDVLILDVMLPDTDGYELLRLFRERDRDIPVLMLTAKSQMNDKLLGLQLGADDYVTKPFNYAELILRVKNMARRVKKTEAAVSHEVIEAGEIVICPKERKVHVSGQEIQLTYREFNLCQLFVSNPQRVFMRDELLEKVWGFEYIGNTRAVDIMVQRLRKKLGTSGEYIKTIYGVGYKLDC

SEQ ID NO: 37404 - protein, 330 aa, Bacillus cereus ATCC 14579
MNSILICGGAGYIGSHAVKKLVDEGLSVVVVDNLQTGHEDAITEGAKFYNGDLRDKSFLRDVFKQENIEAVMHFAADSLVGVSMEKPLQYYNNNVYGALCLLEVMDEFKVDKFIFSSTAATYGEVDVDLITEETMTNPTNTYGETKLAIEKMLHWYSQASNLRYKIFRYFNVAGATPNGIIGEDHRPETHLIPLVLQVALGQREKIMMFGDDYNTPDGTCIRDYIHVEDLVAAHFLGLKDLQNGGESDFYNLGNGNGFSVKEIVDAVREVTNHEIPAEVAPRRAGDPARLVASSKKAKEKLGWDPKYVNVKTIIEHAWNWHQKQPNGYAK

SEQ ID NO: 37405 - protein, 527 aa, Colwellia psychrerythraea 34H
MSNYQSAIEAVQAIKANAGSSWDAINPESVARMRAQNKFKTGLEIAQYTADIMRADMEAYDADSSKYTQSLGCWHGFVGQQKMISIKKHFDGKTDRRYLYLSGWMVAALRSEFGPLPDQSMHEKTSVASLVEELYTFLRQADARELGGLFRELDAANAGDKAAIQDQIDNHVTHVVPIIADIDAGFGNAEATYLMAKQMIEAGACALQIENQVADEKQCGHQDGKVTVPHADFHSKIRALRHAFLELGIDNGIIVSRTDSEGAGLTKEIAVVKEPGDQGDIYNSFLDVEEIDVADMAEGDVCFNRDGKLVRPKRLPSGLYQFRQGTGEERCVFDSIEAIKAGADLLWIETATPSVKDIAGMMNEVRKVIPNAKLVYNNSPSFNWTLNFRQQAFDAMVEAGEDVSSYVRADLMNEDYDSSGLAAKADDKIRTFQADTSREAGIFHHLITLPTYHTTALSVDNLAKEYFGDAGMLGYVEGVQRKEIRQGIACVKHQNMSGSDMGDDHKEYFAGENALKAGGANNTSNQF

SEQ ID NO: 37406 - protein, 276 aa, Bordetella pertussis Tohama I
MTGDPRTDTTPSCRVAAIQMVSGPDVDENLAQAAELIGKAAQDGARLVALPEYFCFMGHTDTDKLAIKEESGYGKIQSFLSNISSQYGIWVVGGTLPLTSPDPQRVFNTTFVYGPGGQPAARYDKIHLFNFQRGAESYDEAIAIRPGKAVQVFDGPCGRVGLSVCYDLRFPELYRAMGTVDLILVPAAFTYTTGQAHWELLLRARAIENQCYVLAPAQGGRHSTGRRTWGHSMLVDPWGQVLDVLPEGPGVIGGTIEAARLAEVRASLPALRHRVL

SEQ ID NO: 37407 - protein, 532 aa, Pseudomonas aeruginosa UCBPP-PA14
MCGILGYVGTGFSVSRFAGALRLLAHRGPFGEGIAALPNGAIGMTRLPMSGAAAVPLPPQEGLRRVAYNGEVYQAGCEIHGEIRLLLDGLQRGVLPDGMYALASWDPQTRQLTLLRDEFGIKPLYYSYQPERGLLAFASEPRALLHLLGGARADAEAIAQVVAAGVPLEGQTLFQQVRLLLPGEVLRFDLSQERPRLCQRQRLATAPASEADSLDEQLGETLERCRQTFRPCALLVSGGVDSNLLGSYLDPQLQRFHLCLEGDEESLLPHPRLQRFELRQEAFMPLLRRAVGNFGGATRMSSLLMYQRLADGIGEQGYHCVLLGEGADELFWGYPRHLELWRRRDAPEPRRFAAAWFGEYRRKAALLAEPAGRRVAERIEELAHEALGQGLEAAIGQFDLHYSLEPLLRRADHLLMSRTIEARTPYLHGALAQRAGRLQRIVGDTAKAPLVALLEQREKRWQAQPKRHFRLPFERWPQALGEMRRHLAERLPALHDLGLEGLDAPSVAALPGDQLFTLTTLSLWQQEYGASL

SEQ ID NO: 37408 - protein, 281 aa, Escherichia coli K12
MSQTSTLKGQCIAEFLGTGLLIFFGVGCVAALKVAGASFGQWEISVIWGLGVAMAIYLTAGVSGAHLNPAVTIALWLFACFDKRKVIPFIVSQVAGAFCAAALVYGLYYNLFFDFEQTHHIVRGSVESVDLAGTFSTYPNPHINFVQAFAVEMVITAILMGLILALTDDGNGVPRGPLAPLLIGLLIAVIGASMGPLTGFAMNPARDFGPKVFAWLAGWGNVAFTGGRDIPYFLVPLFGPIVGAIVGAFAYRKLIGRHLPCDICVVEEKETTTPSEQKASL

SEQ ID NO: 37409 - protein, 242 aa, Porphyra yezoensis
MVSDLEKAVRADLQALIKEKNCHGIMVRVAWHDAGTYSKEDGTGGANGTQRFAPESGHGANAGLDIARNMCEDIKAKHPEISYADLYQLASVVAIEDAGGPVIPFRMGRKDADAPQCTPDGRLPDADKRMPHLRDIFYRMGFNDAEIVALSGAHTLGAAHKDRSGFDGPWTSNPNTFDNSYFKEIMKETPESGLLHLPSDKALLDEPECKALVETYASDQAKFFEDYAKAHQKLSELGAVWA

SEQ ID NO: 37410 - protein, 2108 aa, Mycobacterium tuberculosis H37Rv
MGKERTKTVDRTRVTPVAVIGMGCRLPGGIDSPDRLWEALLRGDDLVTEIPADRWDIDEYYDPEPGVPGRTDCKWGAYLDNVGDFDPEFFGIGEKEAIAIDPQHRLLLETSWEAMEHGGLTPNQMASRTGVFVGLVHTDYILVHADNQTFEGPYGNTGTNACFASGRVAYAMGLQGPAITVDTACSSGLTAIHLACRSLHDGESDIALAGGVYVMLEPRRFASGSALGMLSATGRCHAFDVSADGFVSGEGCVMLALKRLPDALADGDRILAVIRGTAANQDGHTVNIATPSRSAQVAAYREALDVAGVDPATVGMVEAHGPGTPVGDPIEYASLAEVYGNDGPCALASVKTNFGHTQSAAGALGLMKAVLALQHGVVPQNLHFTALPDKLAAIETNLFVPQEITPWPGADQETPRRAAVSSYGMTGTNVHAIVEQAPVPAPESGAPGDTPATPGIDGALLFALSASSQDALRQTAARLADWVDAQGPELAPADLAYTLARRRGHRPVRTAVLAATTAELTEALREVATGEPPYPPAVGQDDRGPVWVFSGQGSQWAGMGADLLATEPVFAATIAAIEPLIAAESGFSVTEAMTAPEVVTGIDRVQPTLFAMQVALAATMKSYGVAPGAVIGHSLGESAAAVVAGALCLEDGVRVICRRSALMTRIAGAGAMASVELPAQQVLSELMARGVNDAVVAVVASPQSTVIGGATQTVRDLVAAWEQRDVLAREVAVDVASHSPQVDPILDELAEALAEISPLQPEIPYYSATSFDPREEPYCDAYYWVDNLRHTVRFAAAVQAALEDGYRVFTELTPHPLLTHAVDQTARSLDMSAAALAGMRREQPLPHGLRALAGDLYAAGAAVDFAVLYPTGRLINAPLPTWNHRRLLLDDTTRRIAHANTVAVHPLLGSHVRLPEEPERHVWQGEVGTVTQPWLADHQIHGAAALPGAAYCEMALAAARAVLGEASEVRDIRFEQMLLLDDETPIGVTATVEAPGVVPLTVETSHDGRYTRQLAAVLHVVREADDAPDQPPQKNIAELLASHPHKVDGAEVRQWLDKRGHRLGPAFAGLVDAYIAEGAGDTVLAEVNLPGPLRSQVKAYGVHPVLLDACFQSVAAHPAVQGMADGGLLLPLGVRRLRSYGSARHARYCCTTVTACGVGVEADLDVLDEHGAVVLAVRGLQLGTGASQASERARVLGERLLSIEWHERELPENSHAEPGAWLLISTCDATDLVAAQLTDALKVHDAQCTTMSWPQRADHAAQAARLRDQLGTGGFTGVFVLTAPQTGDPDAESPVRGGELVKHVVRIAREIPEITAQEPRLYVLTHNAQAVLSGDRPNLEQGGMRGLLRVIGAEHPHLKASYVDVDEQTGAESVARQLLAASGEDETAWRNDQWYTARLCPAPLRPEERQTTVVDHAEAGMRLQIRTPGDLQTLEFAAFDRVPPGPGEIEVAVTASSINFADVLVTFGRYQTLDGRQPQLGTDFAGVVSAVGPGVSELKVGDRVGGMSPNGCWATFVTCDARLATRLPEGLTDAQAAAVTTASATAWYGLQDLARIKAGDKVLIHSATGGVGQAAIAIARAAGAQIYATAGNEKRRDLLRDMGIEHVYDSRSVEFAEQIRRDTAGYGVDIVLNSVTGAAQLAGLKLLALGGRFIEIGKRDIYSNTRLELLPFRRNLAFYGLDLGLMSVSHPAAVRELLSTVYRLTVEGVLPMPQSTHYPLAEAATAIRVMGAAEHTGKLILDVPHAGRSSVVLPPEQARVFRSDGSYIITGGLGGLGLFLAEKMANAGAGRIVLSSRSQPSQKALETIELVRAIGSDVVVECGDIAQPDTADRLVTAATATGLPLRGVLHAAAVVEDATLANITDELIERDWAPKAYGAWQLHRATADQPLDWFCSFSSAAALVGSPGQGAYAAANSWLDTFTHWRRAQDLPATSIAWGAWGQIGRAIAFAEQTGDAIAPEEGAYAFETLLRHNRAYSGYAPVIGSPWLTAFAQHSPFAEKFQSLGQNRSGTSKFLAELVDLPREEWPDRLRRLLSKQVGLILRRTIDTDRLLSEYGLDSLSSQELRARVEAETGIRISATEINTTVRGLADLMCDKLAADRDAPAPA

SEQ ID NO: 37411 - protein, 648 aa, Polaromonas sp. JS666
MQRADMDSAKGGNTTTWDLGVDTTLVRILARNAELLGEHVAMREKHLGIWQETTWSQMLEATLACAAGMESMGFGSDDAMLVLGDNRPRLYMGMLAVGMLGGYAMPVYPDATSDEIRHFMQEAHVRFVLAEDQEQVDKVLDQGEQGSAIEHVIYDNARGLAGYPDSGLMSWDKVQEIGAARLRAEPTLRRSLIERAQPDGPAVFVHSSGTTGKPKGVVLSHRNLLSGVRNAHRGGAFTFGETILAYLPMAWVGDFAITVAAGVALRFTIHIPERQETVLHDLREVAPTFYLAAPRSWDNMLTTIQVRMEDSTPLKKWLYDVFMNSALAAERSKLEGKPPSLKERLMRPLGELLIFGPVKDQLGLTRLRNAFTGGEAIGEDTFVFYRALGVKLRQFYGQTESSAFNALQDIEEVRLHTVGKPLPGVEVKIGDNGEIMLRSGSVFSGYYKLENATREALEDGWLRTGDAGYVEPDGQMVVLGRLSEVVYTSKGERYIPNYIENRLKFSPYIKDVAVLGSGRDTLAAIICIDKEPVGHWAEVRGISYMSYADLSQKPEVIELITAAVKRVNSILPDGLKLHHFVSLHKEFDPDDGEVTRTRKLRRNVVEQRYAPIIDAIYGGQKMVTMKAQITYETGEVGTIERQLSVQEI

SEQ ID NO: 37412 - protein, 717 aa, Burkholderia cepacia
MEARFSAHRPVWRMLRHVLATMLLTGSVGTGAATACWKPIFTDEERRWIGDHPVVHIAVEANRHPIEYMRNGRHAGLVAGYLSAISRMSGLSFQTVPGTERGHAYDALAAGKVDLLPGVWRELVPDRIGAGALVSAPYLVGRLTVVTRNNSAMIFGLQRLKGRRIAIKGRGAVEYFVRHSGVPLHVLTFDSEELALAAVANGEADAALGVDVTILPIMRRQFTGQLYMSGMLADRPVSLAMLTRADLPILASIIDKSLAAIPVSETAEITRDSIELGDYGKPTIRSIVHYRAPVVLGVALALLTFAALAYLMWKSRAAAIRSKRDKAMFLAFVSHEIRTPMQTVLSSLEFLQRSRLSVQQGGRVDAAASAAETLLTLLDDILDYSRLESRKVTLSPQTVELDVWARQTVDLVRWRADRKTLALTLDVAGPPSVHVSIDPVRVRQIVLNLLVNAINFTAAGAVTLRVRYVAARHGRNGTLCLEVRDTGIGIAPDRLGHVFETYWQADRAPQPGSGGSGLGLAICRELVELMHGSITVDSTPYVETVFTVQLPVPAADGAPLAKSAAAAQALADATAAPVYRGAPRVLIVDDHETVRAALQDQCDALGCVGIVAGSGEDALRHLAQGRIDMVLLDCNLPDIDGYALARMIRQEEAARKARRVSIIAISAESGDMHRMLCLESGMDGVLGKPLRLDTLRQAIARWYPTDADNTLEVSTVP

SEQ ID NO: 37413 - protein, 212 aa, Ralstonia eutropha JMP134
MTSHSTLTVLGRANSSNVQKVMWLLAEIGQSCHRVDMGGAFGGNREPEYLKKNPHGVVPTLIDLETVVWESNTIVRYLCNRFNARALYPDDVARRAMVERWMDWQLSTLGPANAQLFQSIVRTPAGKRVQELIDGYRDRNATLFAVLDQALDGHDYVEGNSLTLADIVLAPLTYRWFELPIERPQYTHLRRWYDLICQRPAFQEHVVGVGLS

SEQ ID NO: 37414 - protein, 321 aa, Burkholderia fungorum LB400
MSKDELLKAYRMMRTIREFEERLHVEFATGEIPGFVHLYAGEEASAVGTMLHLNDADYVATTHRGHGHCIAKGVDVRGMMAEIYGRKTGVCHGKGGSMHIADLSKGMLGANGIVGAGGPLICGAALAAKYKKSGGVGVCFFGDGASNQGVIFESMNLASVWRLPAIFVAENNGYAEATSSTWSVATDNIADRASGFGMPGVIVDGFDFFAVHEALGEAIERARHGGGPTLVEVKFSRYFGHFEGDAQTYRAPGEVQKLRDEKDCLKRFEERVVRAGMLSADQLRGVDAEVKTLIDTAVTEAKAAPLPTAEDLLSDVYVSYP

SEQ ID NO: 37415 - protein, 505 aa, Zea mays
GKGLAAEAIAEELFRLYQLGEELGGGGFCVTRRCTDTSTGEVLACKSISKRKLRSSVDIEDVRREVAIMRSLPEHPNVVRLREAFEHEDTVHLVMEVCEGGELFDRIVSRGHYTERAAAGVMRTIMEVVLHCHKHGVMHRDLKPENFLYANTSETSPLKVIDFGLSVCFKPGDRFSEIVGSPYYMAPEVLKRNYGKEIDIWSAGVILYILLCGVPPFWAETDEGIAQAIIRSNIDFRREPWPKVSENAKDLVRKMLDPSPYSRLTAQQVLEHPWIQNASAAPNIPLGEAVRSRLKQFTVMNKFKKKALLVVAEYLPAEELEAIRELFQLLDTNKDGHLTIEELRKGMRLIGHNVHDTDVDMLMEAADIDGNGTLDCKEFVTVSIHLKKIRSEDHLPKVFSYFDKNGSGYIEIEELKEALSPRGDQKAIDDIILDVDKDKDGKISYEEFELMMKAGMDWRNTSRQYSRAVYNTLSRKMFKDVSLKLDANNGPLAAAAVVVKEQAVD

SEQ ID NO: 37416 - protein, 328 aa, Prochlorococcus marinus subsp. marinus str. CCMP1375
MSSYNPLIVPAKKSATEIDLVRSYLRDIGRVPLLTNEQEITLGRQVQELISLEKLERELESTNGKKPSKEDLAIDAGISVRELSKRLKRGVRAKERMVSANLRLVVSVAKKYTKRNMELLDLIQEGTIGLVRGVEKFDPARGYKFSTYAYWWIRQGITRAIAEKSRIIRLPIHITELLNKLKKGQRELSQHLERTPTMQELSAYVEIPVEEVKDLMFRASQPVSLESKVGDGEDTSLLDLLAIDTDLPDQQIELDCMKGDLEVLLQKLPELQNRVLRMRFGINGEEPMTLTGIGRMLGISRDRVRNLLRDGLKGLRQYGHQVEAYVAC

SEQ ID NO: 37417 - protein, 427 aa, Cytophaga hutchinsonii
MSKEAEIILDGKSYKFPVIEGSEGEKAIDIAKLRDLTGYVTLDTGYKNTGATKSAITFLDGEQGILRYRGYPIEQLASKASFLEVSYLLIYGELPTTSQLENFKERIRKHTNLHEDIKKVFDGFPSSAHPMGVLSSAVSSLTAYYPGSIDPTANDDEVDMTIVRLMAKLPTIAAWSYRNSKGQPLMYPKPKLGYCENFLYMMFGQPNEDFELDPVVVEALNTLFILHADHEQNCSTSTVRIVGSAHASLYSSIAAGINALWGPLHGGANQEVIEMLEEIKASGISTKDYIAKVKTKEVRLMGFGHRVYKNFDPRAKIIKKACDDILNKLGVKDPALEIAKELEQAALSDPYFVERKLYPNVDFYSGIIYKALGLRSDLFTVMFAIGRLPGWIAQWKELRDAKEPIGRPRQIYTGYTERDYVSIDKRK

SEQ ID NO: 37418 - protein, 544 aa, Thermobifida fusca YX
MQQVPDSVHLTAPTAHTHWWRHAVIYQIYVRSFADSNGDGEGDLNGIRERLPALVSLGVDAIWLTPFYVSPLADGGYDVADYRDVDPRFGTLADFDALLATAHDLGLRVIIDIVPNHTSSAHRWFRDALAAGPGSPERDRYVFRPGRGENGELPPNNWQSIFGGPAWTRVTEPDGTPGEWYLHLFDVEQPDLNWENPEVRAEFADILRFWLDRGVDGFRIDVAHGMIKDPALPDIAEGQKADMLDGHTRLPYFDQDGVHEIYREWRAIVDSYPGERALVAEAWVENAERVARYLRPDELHQAFNFEYLTADWDAATLRAVVDRSLAANNAVGAPTTWVLSNHDVTRHVTRFGGGAQGLARARAALLLMLALPGSVYLYQGEELGLPEVTDLPEEALQDPTWKRSGYTERGRDGCRVPLPWEGDEPPFGFGCSAERSWLPVPAEWRSLTREVQERDPDSTLSLYKKALRLRRELLLPAEDALHWADAPQNVLAFRREPGFTCAVNFGADPVTLPFEGEVVLSSGPVEQDGTHLVLPGDTAVWLRQ

SEQ ID NO: 37419 - protein, 297 aa, Saccharomyces cerevisiae
MKTTTPLVHVASVEKGRSYEDFQKVYNAIALKLREDDEYDNYIGYGPVLVRLAWHISGTWDKHDNTGGSYGGTYRFKKEFNDPSNAGLQNGFKFLEPIHKEFPWISSGDLFSLGGVTAVQEMQGPKIPWRCGRVDTPEDTTPDNGRLPDADKDAGYVRTFFQRLNMNDREVVALMGAHALGKTHLKNSGYEGPWGAANNVFTNEFYLNLLNEDWKLEKNDANNEQWDSKSGYMMLPTDYSLIQDPKYLSIVKEYANDQDKFFKDFSKAFEKLLENGITFPKDAPSPFIFKTLEEQGL

SEQ ID NO: 37420 - protein, 433 aa, Haemophilus somnus 129PT
MRLKFGEFNGGYMTNLARLIEWRREFHRFPETGWTEFWTTSRIADYLEEMGAEILLGNQIIHYDFVRGRDTKLVEKGIESAISYGAKTKWLERMNGYTGCVAVFDSGKQGKTLALRFDIDCVNVTETNDPNHLPNKLKFASLNLGFMHACGHDGHITIGLGIASWLSQNKDKFNGKVKIVFQPAEEGVRGAAAIAASGVIDDADYFASSHISFCANTGTVLANPRNFLSTTKIDIRYKGRPAHAGAAPHLGRNALLAAANAVTQFHSIARHGEGMSRINVGVLKAGEGRNVIPSSAEIQLEVRGENKEINQYMVDQVMQIAKGIAISFDVSYETEIMGEAVDMNNDLELVKLLEEIAIQQPGINESTADYAFNASEDATILGRRVQDHGGKAIYFIIGADRTAGHHEANFDFDENQLLTGVNIYIGLVQRLLG

SEQ ID NO: 37421 - protein, 174 aa, Lactococcus lactis subsp. cremoris
MFDTTDQLAVNTIRTLSLDAIQKANSGHPGLPMGSAPMAYVLWSKFLNVNPKTSRKWSNRDRFVLSAGHGSAMLYSLLHLAGYNVTTDDLKGFRQWQSKTPGHPEVNHTDGVEATTGPLGQGIANAVGMAMAEAHLAAQYNKPGFDIVDHYTYALNGDGDLMEGVSQEAASLAG

SEQ ID NO: 37422 - protein, 297 aa, Saccharomyces cerevisiae
MKTTTPLVHVASVEKGRSYEDFQKVYNAIALKLREDDEYDNYIGYGPVLVRLAWHISGTWDKHDNTGGSYGGTYRFKKEFNDPSNAGLQNGFKFLEPIHKEFPWISSGDLFSLGGVTAVQEMQGPKIPWRCGRVDTPEDTTPDNGRLPDADKDAGYVRTFFQRLNMNDREVVALMGAHALGKTHLKNSGYEGPWGAANNVFTNEFYLNLLNEDWKLEKNDANNEQWDSKSGYMMLPTEYSLIQDPKYLSIVKEYANDQDKFFKDFSKAFEKLLENGITFPKDAPSPFIFKTLEEQGL

SEQ ID NO: 37423 - protein, 297 aa, Saccharomyces cerevisiae
MKTTTPLVHVASVEKGRSYEDFQKVYNAIALKLREDDEYDNYIGYGPVLVRLAWHISGTWDKHDNTGGSYGGTYRFKKEFNDPSNAGLQNGFKFLEPIHKEFPWISSGDLFSLGGVTAVQEMQGPKIPWRCGRVDTPEDTTPDNGRLPDADKDAGYVRTFFQRLNMNDREVVALMGAHALGKTHLKNSGYEGPWGAANNVFTNEFYLNLLNEDWKLEKNDANNEQWDSKSGYMMLPTAYSLIQDPKYLSIVKEYANDQDKFFKDFSKAFEKLLENGITFPKDAPSPFIFKTLEEQGL

SEQ ID NO: 37424 - protein, 969 aa, Arabidopsis thaliana
  misc_feature (852)..(852): Xaa can be any naturally occurring amino acid
  unsure (1)..(969): unsure at all Xaa locations
MAGRNIEKMASIDAQLRQLVPAKVSEDDKLVEYDALLLDRFLDILQDLHGEDLRETVQELYELSAEYEGKREPSKLEELGSVLTSLDPGDSIVISKAFSHMLNLANLAEEVQIAHRRRIKKLKKGDFVDESSATTESDIEETFKRLVSDLGKSPEEIFDALKNQTVDLVLTAHPTQSVRRSLLQKHGRIRDCLAQLYAKDITPDDKQELDESLQREIQAAFRTDEIRRTPPTPQDEMRAGMSYFHETIWKGVPKFLRRVDTALKNIGIDERVPYNAPLIQFSSWMGGDRDGNPRVTPEVTRDVCLLARMMAANLYYNQIENLMFELSMWRCTDEFRVRADELHRNSRKDAAKHYIEFWKTIPPTEPYRVILGDVRDKLYHTRERSRQLLSNGISDIPEEATFTNVEQFLEPLELCYRSLCSCGDSPIADGSLLDFLRQVSTFGLSLVRLDIRQESDRHTDVLDAITTHLDIGSYYREWSEEGRQEWLLSELSGKRPLFGPDLPKTEEIADVLDTFKVISELPSDCFGAYIISMATSPSDVLAVELLQRECHVKNPLRVVPLFEKLADLEAAPAAVARLFSIDWYKNRINGKQEVMIGYSDSGKDAGRLSAAWELYKAQEELVKVAKKYGVKLTMFHGRGGTVGRGGGPTHLAILSQPPDTVNGSLRVTVQGEVIEQSFGEAHLCFRTLQRFTAATLEHGMNPPISPKPEWRALLDEMAVVATEEYRSVVFQEPRFVEYFRLATPELEYGRMNIGSRPSKRKPSGGIESLRAIPWIFAWTQTRFHLPVWLGFGAAFRYAIKKDVRNLHMLQDMYKQWPFFRVTIDLIEMVFAKGDPGIAALYDKLLVTDLLWXFEQRLRLRDFYITTLNVCQAYTLKRIRDPSYHVTLRPHISKEIAESSKPAKELIELNPTSEYAPGLEDTLILTMMESSKSAKEHLKLNPRSEFTPVLKHSFTLNIRVLLQDCKRTVK

SEQ ID NO: 37425 - protein, 427 aa, Cordyceps bassiana
DKTHINVVVIGHVDSGKSTTTGHLIYQCGGIDKRTIEKFEKEAAELGKGSFKYAWVLDKLKAERERGITIDIALWKFETPKYHVTVIDAPGHRDFIKNMITGTSQADCAILIIAAGTGEFEAGISKDGQTREHALLAFTLGVKQLIVAINKMDTTKWSEARYQEIIKETSSFIKKVGYNPKAVAFVPISGFNGDNMLEPSSNCPWYKGWEKETKAGKSTGKTLLEAIDAIEPPKRPTDKPLRLPLQDVYKIGGIGTVPVGRVETGIIKPGMVVTFAPANVTTEVKSVEMHHEQLTEGVPGDNVGFNVKNVSVKEIRRGNVAGDSKNDPPNGAASFNAQVIVINHPGQIGAGYAPVLDCHTAHIACKFSELLEKIDRRTGKSVENNPKFIKSGDSAIVKMVPSKPMCVEAFTDYPPLGRFAVRDMRQT

SEQ ID NO: 37426 - protein, 202 aa, Phytolacca americana
KRRNGLLKKAYELSILCEAEVALIVFSSRGRVYEYSNNNIRSTIERYKKASSDGSNSASFIEINAQYYQQESAKLRQQIQVMQNSNRNLVGECLSSLNVKELKQLENRLERGMSRIRSKKHELLLADIEFLQKREKELEHENSFIRAKINEVERLQQLNMMPSEDLSAMNAFVTRSDHILAQNMLDTSSAFSNASKKLLHLG

SEQ ID NO: 37427 - protein, 427 aa, Cordyceps bassiana
DKTHINVVVIGHVDSGKSTTTGHLIYQCGGIDKRTIEKFEKEADELGKGSFKYAWVLDKLKAERERDITIDIDLWMCETPKYQVTVIDAPGHRDFIKNMITGTSQADCAILIIAAGTGEFEAGISKDGQTREHALLAFTLGVKQLIVAINKMDTTKWSEARYQEIIKETSSFIKKVGYNPKAVAFVPISGFNGDNMLEASTNCPWYKGWEKETKAGKSTGKTLLEAIDAIEPPKRPTDKPLRLPLQDVYKIGGIGTVPVGRVETGIIKPGMVVTFAPANVTTEVKSVEMHHEQLVEGVPGDNVGFNVKNVSVKEIRRGNVAGDSKNDPPSGAASFNAQVIVINHPGQIGAGYAPVLDCHTAHIACKFSELLEKIDRRTGKSVENNPKFIKSGDSAIVKMVPSKPMCVEAFTDYPPLGRFAVRDMRQT

SEQ ID NO: 37428 - protein, 173 aa, Psychrobacter arcticus 273-4
MQTIILGGGCFWCTESVFLSVKGVESVISGYMGGNAVSANYEAVCGGDTGHIEVIKVKFNESTVPLEVILDVFFATHDPTTMDRQANDVGSQYRSVVFYTDETQKPTVDRTINKLRDMGINIVTEVHPAVEFYQAEDTHQDFFNRNPGQAYCNFAIPPKLAKLRKEFSQYMVS

SEQ ID NO: 37429 - protein, 174 aa, Arabidopsis thaliana
RSDFEESLKNIDIAKCLMILAQTSMVKQIGLNQHTESHTSNQFECKTCNKRFSSFQALGGHRASHKKPKLTVEQKDVKHLSNDYKGNHFHKCSICSQSFGTGQALGGHMRRHRSSMTVEPSFISPMIPSMPVLKRCGSSKRILSLDLNLTPLENDLEYIFGKTFVPKIDMKFVL

SEQ ID NO: 37430 - protein, 425 aa, Cordyceps bassiana
DKTHINVVVIGHVDSGKSTTTGHLIYQCGGIDKRTIDKFEKEAAELGKGSFKYAWVLDKLKAERERGITIDIALWKFETPKFQVTVIDAPGHRDFIKNMITGTSQADCAILIIAAGTGEFEAGISKDGQTREHALLAFTLGVKQLIVAINKMDTTQWSEARFQEIIKETSNFIKKVGYNPKTVAFVPISGFHGDNMLAASTNCPWYKGWEKETKSGKYTGKTLLEAIDSIEPPTRPTDKPLRLPLQDVYKIGGIGTVPVGRVETGIIKPGMVVTFAPSNVTTEVKSVEMHHEQLPEGVPGDNVGFNVKNVSVKEIRRGNVAGDSKNDPPMGAASFNAQVIVINHPGQIGNGYAPVLDCHTAHIACKFSELLEKIDRRTGKSVENNPKFIKSGDSAIVKMVPSKPMCVEAFTDYPPLGRFAVRDMR

SEQ ID NO: 37431 - protein, 116 aa, Sorghum bicolor
VVVTGASGFLGSWLVMKLLQAGYTVRATVRDPANVVKTKPLLDLPGATERLSLWKADLADEGSFDDAIRGCTGVFHVATPMDFESKDPENEVIKPTVEGMMSIMRACKEAGTVRRI

SEQ ID NO: 37432 - protein, 167 aa, Neurospora crassa
MSSATTIYDFKPLDKKGSELPLSTYQGKVVLIVNVASKCGFTPQYAGLEKVYKEIKEKYPDDFEILAFPCNQFGGQEPGTEEEIQSFCQLNYGVSFPIMKKVEVNGDNADPLYEWMKNEKPGLMGLKRIKWNFEKFLIGKDGKVKGRWASTTKPESLKEAILKELGE

SEQ ID NO: 37433 - protein, 364 aa, Zea mays
MAGDGNGRAELPRIAVIGAGIFARTQYIPRLREIAHLVVLKAIWSRTQESAKAAAELARDFAPDIECKWGDAGLEEIMGDSSIMGVAIVLAGQVQVELSLKMLKAGKHVIQEKPASGSTTEAETALSIYHSFQNLFPHKPIWAVGENYRFEPAFIESSKLINDIGDMMHIQVIIEGSMNSSNPYFNSTWRRNFVGGFILDMGVHFIAGLRMLVGSEITSVSSISRHVDMALPPPDNICSLFQLENGCAGVFVFAVNSRSPKILWRVDGTKGTIQVERGVDSGKHGYQVLFSGENGQCQKTFYPFCGVNEELKTFVHDMLEAGKDGDHKAAPRGSYVEGARDVAVLEAMLESSAKQGAPVQVKRF

SEQ ID NO: 37434 - protein, 414 aa, Pseudomonas syringae pv. syringae B728a
MSRRRVVVTGMGMLSPLGNDVPSSWQGILAGRSGIGLIEHTDLSAFTTRFGGSVKGFNVEEYLAPKEARRLDLFIQYGLAASFQAVRNAGLEVTDANRERIGVAMGSGIGGLTNIENSSRLLHEQGPGRISPFFVPGSIINMISGFLSIHLGAQGPNYSIATACTTATHCIGMAARNIAYDEADVMIAGGAEMAACGLGLGGFGAARALSTRNDDPTRASRPWDKGRDGFVLSDGAGAMVLEELEHAKARGATIYAELVGFGMSGDAYHMTSPPDDGAGAARCIVNALRDAKVNPDQVQYINAHGTSTPAGDLAEASAIKSVFGDHAYKLAVSSTKSMTGHLLGAAGAVEAIFSVLAMVDQVAPPTINLDEPSEGCDLDFVPHEARRMPIDVVLSNSFGFGGTNGSLVFRRFAE

SEQ ID NO: 37435 - protein, 116 aa, Sorghum bicolor
VVVTGASGFVGSWLVMKLLQAGYTVRATVRDPANVVKTKPLLDLPGATERLSLWKADLAVEGSFDDAIRGCTGVFHVATPMDFESKDPENEVIKPTVEGMISIMRACKEAGTVRRI

SEQ ID NO: 37436 - protein, 217 aa, Corynebacterium efficiens
MAFFFRPEPKMVTPEEALKGGRHPVLESPQPHTVLGTPITGPWKEGQKRVWIGLGCFWGVEQMYWKMDGVESTSVGYAGGYTPNPTYREVCSGRTGHTEIVEVVYDPEKITLAELVARGLEAHDPTQGYRQGNDVGTQYRSAFYVETGEEAETVRQIVSTYGETLKSHGFGEITTEVDVITPADYYLAEDYHQQYLHKNPDGYCPHHSTGIPCGVEA

SEQ ID NO: 37437 - protein, 194 aa, Glycine max
  misc_feature (28)..(28): Xaa can be any naturally occurring amino acid
  misc_feature (66)..(66): Xaa can be any naturally occurring amino acid
  unsure (1)..(194): unsure at all Xaa locations
AIEERLEGIPVASEEFLLVSGSSSSASXKDDAEALLSQVTLIDPHARQGSKVVPVALNKVFQLKVXNSVAFRLIPEFSQVKNALKVSLFLIIEREKSGFASSGFSGVPVFQSRNLILKSQSKRFRPLFSRKEDLENTLKSAAREQNKLNSTMRKGDIQVATLEDVIKEMKENSTSNWDDVIFIPPGFDVSDDLK

SEQ ID NO: 37438 - protein, 372 aa, Pseudomonas aeruginosa UCBPP-PA14
MTRRHFLQRLGASAGLGAALTLGLEFGSPRGQAAAADHWHMPDEHLPQERVFLAYAASPSIWKDLAEDVNRSVALLARTIARYQPVTLLCRPTQEAAARRACGGANIDYLALPLDDIWVRDYGGCFVLNGEGEAGLVDFNFNGWGGKQQAGNDSRVAGVLSERLEVRYIASQLTGEGGGIEVDGRGTAILTESCWLNDNRNPGMDKGQVEAELKALLGLRKIVWLPGIRGRDITDAHVDFYARFVRPGVVIANLDNDPDSYDYAVTREHLEILRTATDADGRALQVHTLSPPLKPRRDYSRNNPDFAAGYINYLPINGAVIAPQFGDASADRHCGELLGRLYPGRDIVQLNIDPIAAGGGGIHCVTKHMPRA

SEQ ID NO: 37439 - protein, 237 aa, Colwellia psychrerythraea 34H
MFLLPTTVLNEKMHILIIEDDKEIARLTEIYLQSTGYETTIIADGSLAIAMIKKLSPDLILLDLMLPGVDGFELCKQAREFYNGPIIVLTAMEDDLSEVSLLKLGADDYLRKPAKPHIMSARIEALLRRAKVNNEKVTQELPNKLLINRDTLSVTLNNALVDLTNSEFDMLVLLADKSGQTVSREECIHSLRGIDFDVTNRSIDMRISALRKKLNDEKSPYKLIKTIRNKGYLLVNE

SEQ ID NO: 37440 - protein, 617 aa, Phanerochaete chrysosporium
MSRDSHGELVVLNEKAAAAKAHATGGRRRALLYGAIAALLLIVALALGLGLGLGLGLKHHRDSTAPASTNSSGQSLPSLQPTPQNNFVLDGLAGQPPQTRSYDFVISQVLGAPDGVSKPMLVVNGMYPGPTIEVNQGDRIVVNVTNLLENRTTIHWHGLFQNQTNYYDGTAGITECGIPPGQSLVYNFTLGDFSGTTWWHAHYSTQYTDGITGALIVHPASPPPVKFPSWDHELVVQVADLYHTFSSILLASYLSPWGIDGTAGDEPVPDAGVLNGLGQWGGGGDYFNFTLEANKTYRIRLVNTGSFASIRFSVDYHTLSVVEADGTLVQPYDVAGVTLAVAQRYSVLLRTDNSTGGPFWMRAAVQSDMFTYDEPGQNLDIRGVIRYGPTANDTALPVETDDPGVPSQPSLQDMDTAQLVPAVVAPAPPSTRQYPLTIALELADSQLFLGFMNGTSWTPLQGTTTLLQARAAFQGGGVYGTEGGSLQSGGQFMVTEDSVQVVDLLISNLDDGDHPFHLHGHRPWIMGTGPGRYIGQPLNATNPLRRDTFLIPAYNWMVIRFITDNPGLWAFHCHLAWHMAAGLLMQINSLPSKAAQLDIPQSIVSQCAATVDGAGAR

SEQ ID NO: 37441 - protein, 513 aa, Ralstonia eutropha JMP134
MTTWFKRILTAGAMALAIGTAGVGLSTHAVAQDKPAAEASAPAAAAAPAAAPAAAAAPAAATTAAAPAEAAAAPAAPVPNKGDTAWLLVSTAFVILMTLPGLALFYGGLVRSKNMLSVLMQCLVIFSVVSLLWAVYGYSFAFTEGNAFFGGTDRLFMKGLTVDAVAATFSKGVVVPELGYFAFQCAFAAITCGLIIGAFAERAKFSAVLVFVVLWFTFSYIPIAHMVWFWPGPDAFTDAAAGTAATAKSGWLFQKGALDFAGGTVVHINAAVAGLVGAFMFGKRIGFGREAIRPHSLTFTMVGASLLWFGWFGFNAGSALEANGSAALAFVNTLLATCAAVLSWTFGEWISKGKPSMLGGASGAVAGLVAITPAAGFVGPMGSIAIGLIAGLLCLWGVTGLKRMLGMDDSLDVFGVHGVGGILGALLTGVFASPSLGGTGIYDYVANKVADDYSIAGQVWIQFQGVLTTIVWSGVVAFVAYKLVDMLIGLRVPEEEEREGLDITSHGETAYEV

SEQ ID NO: 37442 - protein, 199 aa, Solanum commersonii
MADQYEQNKPSVEETVGANVEATDRGLFDFIGKKEEEKTSHAHEEEAISSEFCEKVKVSEEEEHKEEKKEEKKLHRSSSISSSSSDEEEEIGEDGQIIKKKKKKGLKEMIKEKISGDHKEEVKTEDTSVPVEKYEETEEKKGFLDKIKEKLPGGGHKKTEEMRRHHHHHRLRWSMRRRGRRKRDFWTKLRRNYQDTTQN

SEQ ID NO: 37443 - protein, 450 aa, Ralstonia metallidurans CH34
MNVIWARSVAILVSLTVVATGLYVFAGPVSGLLFLCIALFLLLGYYLFQINRLWKVLDAPAYGEIPSALGLWGEVYYRLHRLVKRWRTQVLQVEQQHTRFIQAIQASPYGVLMLDDADQIEWCNDVAEQHFGLNAKRDVRQRITHLIRRPEFVHYLTRERYDEPLIMRDMGEHKRSSTSVQILPYGENRKLVLTQDITKVENTEAMRRDFVANVSHELKTPLTVLTGFLETVRDLPVSEEDRKRYIDMMLVQSMRMQHIVEDLLALAKLESDVQPPTLDPVDVGGLAAHLVHDAEALSQGRHDIHAEIDTAVVLRGSEGELLSALGNLVSNAVRYTPDGGRIAIRMTYTDGHSVFSVSDTGLGIAPEHIPRLTERFYRVDRSRSRDTGGTGLGLAIVKHVLSRHHADLRVTSEVGRGSTFRIVFPVDRSGYEPESAQPMPQLGDAPRHAA

SEQ ID NO: 37444 - protein, 2238 aa, Streptomyces cinnamonensis
MASEEQLVEYLRRVTTELHDTRRRLVQEEDRRQEPVALVGMACRFPGGVASPEDLWDLVAAGKDAIEDFPTDRGWDLEALYDPDPAAYGTSYVRHGGFVDDAGSFDADFFGISPREALAMDPQQRLMLETSWELFERAGIEPVSLKGSRTGVYAGVSSEDYMSQLPRIPEGFEGHATTGSLTSVISGRVAYNYGLEGPAVTVDTACSASLVAIHLASQALRQRECDLALAGGVLVLSSPLMFTEFCRQRGLAPDGRCKPFAAAADGTGFSEGIGLLLLERLSDARRNGHKVLAVIRGSAVNQDGASNGLTAPNDAAQEQVIRAALDNARLTPSEVDAVEAHGTGTKLGDPIEAGALLATYGQHRARPLLLGSLKSNIGHTHATAGVAGVIKTVMAIRNGLLPATLHVEELSPHVDWDAGAVEVVTEPTPWPETGHPRRAGVSAFGISGTNAHLILEEAPPEEDVPAPVVVESGGVVPWVVSGRTPEALREQARRLGEFVAGDTDALPNEVGWSLATTRSVFEHRAVVVGRDRDALTAGLGALAAGEASAGVVAGVAGDVGPGPVLVFPGQGAQWVGMGAQLLDESAVFAARIAECERALSAHVDWSLSAVLRGDGSELSRVEVVQPVLWAVMVSLAAVWADYGVTPAAVIGHSQGEMAAACVAGALSLEDAARIVAVRSDALRQLQGHGDMASLSTGAEQAAELIGDRPGVVVAAVNGPSSTVISGPPEHVAAVVADAEARGLRARVIDVGYASHGPQIDQLHDLLTERLADIRPTNTDVAFYSTVTAERLTDTTALDTDYWVTNLRQPVRFADTIEALLADGYRLFIEASAHPVLGLGMEETIEQADMPATVVPTLRRDHGDTTQLTRAAAHAFTAGADVDWRRWFPADPAPRTIDLPTYAFQRRRYWLADTVKRDSGWDPAGSGHAQLPTAVALADGGVVLNGRVSAERGGWLGGHVVAGTVLVPGAALVEWVLRAGDEAGCPSLEELTLQAPLVLPESGGLQVQVVVGAADEQGGRRDVHVYSRSEQDASAVWQCHAVGELGRASVARPVRQAGQWPPAGAEPVEVGGFYEGVAAAGYEYGPAFRGLRAMWRHGDDLLAEVELPEEAGSPAGFGIHPALLDAALHPLLAQRSRDGAGAGAHGGQVLLPFSWSGVSLWASEATTVRVRLTGLGGGDDETVSLTVTDPAGGPVVDVAELRLRSTSARQVRGSAGPGADGLYELRWTPLPEPLPVPAPANGRDVAADLSGCAVLGELVAEPGPGIDLEGCPCYPGVGALADNASPPSMILAPVHSDTTGGDGLALTERVLRVIQDFLAAPSLEQKQTRLAFVTRGAADTGSTTGGSAAPAEAVDPAVAAVWGLVRSAQSENPGRFVLLDTDAPLDQASVAPLVDAVRSAVEADEPQVALRGGRLLVPRWARAGEPVELAGPAGARAWRLVGGDSGTLEAVVAEACDDIVLRPLAPGQVRVAVHTAGVNFRDVLIALGMYPDPDALPGTEAAGVVTEVGPGVTRLSVGDRVMGMMDGAFGPWAVADARMLAPVPPGWGTRQAAAAPAAFLTAWYGLVELAGLKAGERVLIHAATGGVGMAAVQIARHVGAEVFATASPGKHAVLEEMGIDAAHRASSRDLAFEDAFRQATDGRGVDVVLNSLTGELLDASLRLLGDGGRFVEMGKSDPRDPELVALEHPGVSYEAFDLVADAGPERLGLMLDRLGELFAGGSLVPLPVTAWPLGRAREALRHMSQARHTGKLVLDVPAPLDPDGTVLVTGGTGTIGAAVAEHLARTGESKHLLIVSRSGPAAHGAEELVSRIAEFGAEATFVAADVSEPDAVAALIEGIDPAHPLTGVVHAAGVLDNALIGSQTTESLTRVWAAKAAAAQQLHEATRESRLGLFVMFSSFASTMGTPGQANYSAANAYCDALAALRRAEGLAGLSVAWGLWEATSGLTGTLSAADRARIDRYGIRPTSAARGCALLAAARAHGRPDLLAMDLDARVPAASDAPVPAVLRTLAAAGAPATARPTAAAAADGATDWSGRLAGLTEEARLELLTELVCTHAAGVLGHADAGAVQVDAPFKELGFDSLTAVELRNRIAAATGLKLPAALVFDYPQARVLAAHLAERLVPEGAGAMGGVSGAEGVRDAYGAGGPGGDMTAQVLLEVARVEHTLSAAVPHGLDRAAVAARLEALLARCTATTAATGAAGAAVEGDGDSDGDGAVDQLETATAEQVLDFIDNELGV

SEQ ID NO: 37445 - protein, 4132 aa, Streptomyces cinnamonensis
MVSEEKLVDYLKRVSADLHATRQRLREAEERGQEPVAVVEAACRYPGGIRTPEDLWDLVAAGGNALGAFPDNRGWDLRRLFHPDPDHPGTTYAREGGFLHDADLFDPEFFGISPREAAVLDPQQRLLLECAWEALERAGIDPRSLQGSRTGVYAGAALPGFGTPHIDPAAEGHLVTGSAPSVLSGRLAYTFGLEGPAVTIDTACSSSLVAVHLAAHALRQRECDLALAGGVTVMTTPYVFTEFSRQRGLAADGRCKPFAAAADGTAFSEGAGLLVLERLSDARRAGHRVLAVIRGSAVNQDGASNGLTAPNGPAQQRVIRAALAGARLSPAEVDAVEAHGTGTRLGDPIEADALLATYGQERHGGRPLWLGSVKSNIGHTQGAAGAAGLIKMVQALRHETLPATLYADEPTPHADWESGAVRLLSAPVAWPRGEHGEHTRRAGISSFGISGTNAHLILEEAPAADAEGAGGDGDGDGGGVRPVVRVGATGPREEQGQGQGQEQHQQQRQQRQRSSMMPTPHLPWLLSARSPAALRAQADALANHVAHADHSIADIGGTLLRRTLFEHRAVVLGTDRDERAAALAALAAGRAHPALTRAAGPARNGGTAFLFTGQGSQRPGMGRQLYDTFDVFAESLDETCARLDPLLEQPLKPVLFAPADTAQAAVLHGTGMTQAALFALEVALYRQVTSFGIAPSHLTGHSVGEIAAAHVAGVFSLADACTLVAARGRLMQALPAGGAMLAVQAAEDDVLPLLAGQEERLSLAAVNGPTAVVVSGEAAAVGEVEKALRGRGLKTKRLNVSHAFHSPLIEPMLDDFREVARGLTFHAPTLPVVSNLTGRLADAELMADAEYWVRHVRRPVRFHDGLRALSEQGVVRYLELGPDPVLATMVQDGLPAPAEGEEPEPVVAAALRSKHDEGRTLLGAVAALHTDGQPADLTALFPADAGQVPLPTYRFQRRRYWRVAPDAAAPARAAGLQETGHPLLPAVIRQADGGILLAGRLSLRTHPWLADHTIAGGVPLPATAFVELALLAGRHAACDTIDDLTLETPLLLDDTGTGVGAAVGAGADALVDAIEVQLALGAPDGSGRRALTVHSRPADDAADDGDAADAADAAGRGGPGGSGDLGDPGDPGDLGDGGGSRGWRRHATGILSAGPAAEPAAPDAAPWPPADATALDVDALYARLDAQGYSYGPAFRAVHAAWRHGDDLYADVRLADEQRAEADAFALHPALLDAALHAVDELYRGSEGRGQEQGQGGQEPEQGRGDADAPVRLPFSFSDIRHHATGATRLWVRLSPQGDDRLRLSLTDGEGGQVATVDALQLRLIPADRWRAARPTTAAPLYHLDWHELPLPEPAETDPAAHSWAVLGAHDAGLAPAAHYPDLAALKAAVEAGEPVPDIVFAPFPAQGTETDVPAQVRAHARHALELLRDWLTTEAFAAARLVVLTTGAVTARPEDGPADLATAPVWGLVRAAQAEQPDHVVLVDIDKDIDKDTDEETDQATDAGTASRHALPAALAAAAAQAETQLALRAGTVLVPRLAVVPPRTDTPALHATAPESTTDTVDSTGIAGAAESGGTVLITGGTGGLGQAVARHLAAAHGARHLLLVSRRGDAAEGVAELRADLADDGVDVRVAACDITDRDALAGLLADIPAAHPLTAVVHTAGVIDDSLITAMTPERLDAVLAPKADAAWHLHELTRDKDLSAFVLFSSGASVLGNGGQANYAAANTFLNTLAEHRRAAGLAATSVAWGLWESASGGMAARLGDADRARIHRTGVTGLTDEQALALFDAALTAEHPTVLATRFDRAVLRGQAAARTLQPALRGLVRTPRPTASAGAIGSTAATGSATDENAPSSWAARLARLSAADRDRALNELIREQIATVLAHPSPDTIELGRAFQELGFDSLTALELRNRLSTATGIRLPATLVFDHPSPTALVRHLHSHLPDEAQHTSPTAPGASAEGTAATATGIDDDPIAIVGMACRYPGGVTSPEQLWQLVATGTDAIGPFPEDRGWDTAGLFDPDPDQVGHSYTREGGFLYDAARFDAGFFGISPREAAATDPQQRLLLETAWQAFEHAGIDPAALRGTPCGVITGIMYDDYGSRFLARKPDGFEGRIMTGSTPSVASGRVAYTFGLEGPAITVDTACSSSLVAMHLAAQALRQGECELALAGGVTVMATPNTFVEFSRQRGLAPDGRCKPFAAAADGTGWGEGAGLVVLERLSDARRKGHRVLALLRGSAVNQDGASNGMTAPNGPSQERVIRTALAGAGRGPEDIDVVEAHGTGTTLGDPIEAQALLATYGQGRPEDRPLWLGSVKSNIGHTQAAAGVAGVIKMVMALRHEQLPTTLHADEPTPHVQWDGGGVRLLTEPVPWSRGERTRRAGVSSFGISGTNAHLILEEPPEEDLPEPVAAEPGGVVPWVVSGRTPDALREQARRLGEFVVGAGDVSAAEVGWSLATTRSVFEHRAVVAGRDRDDLVAGMQALAAGETPTDVVSGAAASSGAGPVLVFPGQGSQWVGMGAQLLDESPVFAARIAECEQALSAYVDWSLSDVLRGDGSELSRVEVVQPVLWAVMVSLAAVWADYGVTPAAVVGHSQGEMAAACVAGALSLEDAARIVAVRSDALRQLQGHGDMASLGTGAEQAAELIGDRPGVVVAAVNGPSSTVISGPPEHVAAVVAEAEARGLRARVIDVGYASHGPQIDQLHDLLTEGLADIRPANTDVAFYSTVTAERLTDTTALDTDYWVTNLRQPVRFADTIEALLADGYRLFIEASAHPVLGLGMEETIEQADIPATVVPTLRRDHGDTTQLTRAAAHAFTAGADVDWRRWFPADPTPRTVDLPTYAFQHQHYWLEEPSGLTGDAADLGMVAAGHPLLGACVELAESDSYLFTGRLSRRAPSWLAEHVVAGTVLVPGAALVEWVLRAGDEAGCPTIEELTLQAPLVLPESGGLQVQVVVGATDEQSGRRDVHVYSRSEQDASAVWVCHAVGVVSSEMPEAAAELSGQWPPAGAEAVDVEDFYARAAEAGYAYGPAFQGLRALWRHGTELFAEVVLPEQAGGHDGFGIHPALLDAALHPLMLLDRPADGQMWLPFAWSGVSLNADRATHVRVRLSPRGEAAERDLRVVIADATGAPVLTVDALTLRAADPGRLGAAARGGVDGLYTVDWTPLPLPQPLPLPRTDAGGSADWVILSDNSSAALADAVSSATAAGGGAPWALLAPVGGGSADDGLPVVRRTLSLVQEFLAAPELTESRLVIVTRGAVATDADGDVAASAAAVWGLIRSAQSENPGRFVLLDVEEEHLHPDGGELPYAALRHAVEELDEPQLALRSGKFLVPRMTPAAAPEELVPPVGTSGWRLGTSGTATLENLSVIDAPEAFAPLEPGQVRISVRAAGMNFRDVLIALGMYPDKGTFAGSEGAGHVTEVGPGVTHLSVGDRVMGLFEGAFAPLAVADARMVVPIPEGWSFQEAAAVPVVFLTAWYGLVDLGRLRAGESLLIHAGTGGVGMAATQIARHLGAEVFATASPAKHGVLDGMGIDAAHRASSRDLDFEETLRAATGGRGMDVVLNSLAGEFTDASLRLLAEGGRMVDMGKTDKRDPDRVAAEHAGAWYRAFDLVPHAGPDRIGEMLAELGELFASGALAPLPVQTWPLGRAREAFRFMSQAKHTGKLVLEIPPALDPDGTVLITGGTGVLAAAVAEHLVREWGVRHLLLAGRRGSEAPGSSELAEELTELGAEVTFAAADVSDPDAVAELVGKTDPAHPLTGVIHAAGVLDDAVVTAQTPESLARVWAAKATAAHLLHEATREARLGLFLVFSSAAATLGSPGQANYAAANAYCDALVRQRRAEGLAGLSIGWGLWQTASGMTGHLGETDLARMKRTGFTPLTTEGGLALLDAARAHGRPHVVAVDLDARAVAAQPAPSRPALLRALAAGATPGARTARRTAAAGSVAPAGGLADRLAGLPHPERRRLLLDLVRGNVAGVLGHSDHDAVRPDTSFKELGFDSLTAVELRNRLAAATGLKLPAALVFDYPESATLVDHLLERLSPDGAPPPVKDAADPVLNDLGRIESSLDALALDADARSRVTRRLNTLLSKLNGAATAGSPADVTDLDALDALDDVSDDEMFEFIDREL

SEQ ID NO: 37446 - protein, 4038 aa, Streptomyces cinnamonensis
MSSAEESSPDVSGTGVSGTGESATGTSSTEAKLRQYLKRVTVDLGQARRRLREVEERAQEPIAIVSMACRFPGDTRTPEALWDLVAEGGDAIDDFPTNRGWDLESLYHPDPDHPGTSYVRRGGFLYDAPAFDASFFGISPREALAMDPQQRVLMETAWQLLERAGIDPASLKLSATGVYIGAGVLGFGGAQPDKTVEGHLLTGSALSVLSGRISFTLGLEGPSVSVDTACSSSLVSMHLAAQALRQGECDLALAGGVTVMSTPGAFTEFSRQGALSPDGRSKAFAASADGTGFSEGAGLLLLERLSDARRNGHKVLAVIRGSAVNQDGASNGLTAPNGPSQERVIRAALANAGLGAAEVDAVEAHGTGTKLGDPIEAGALLATYGRDRDEDRPLWLGSVKSNIGHPQGAAGVAGVIKMVMALQRELLPATLYVDEPTPHVDWSSGSVRLLTEPVPWTRGERPRRAGVSAFGMSGTNAHVILEEAPPEEAAAAETPAEGTGAVVPWVVSGRGEEALRAQAAQLAEHVRDDDQRPASPLEVGWSLATTRSVFENRAVVVGDDRDALLDGLRSLAAGEASPDVVSGAVGPTGPGPVMVFPGQGGQWVGMGARLLDESPVFAARIAECEQALSAYVDWSLTDVLRGDGSELARIDVVQPVLWAVMVALAAVWADQGIEPAAVVGHSQGEIAAACVVGAISLDEAARIVAVRSVLLRQLSGRGGMASLGMGQEQAADLIDGHPGVVVAAVNGPSSTVISGPPEGIAAVVADAQERGLRARAVASDVAGHGPQLDAILDQLTEGLAGIRPAATDVAFYSTVTAGHLTDTTELDTAYWVRNVRRTVRFADTIDALLADGYRLFIEVSPHPVLNLALEGLIERAAVPATVVPTLRRDHGDTTQLARAAAHAFAAGADVDWRRWFPADPAPRTVDLPTYAFQRQDFWPAPAGGRSGDPAGLGLAASGHPLLGASVGLASGDVHLLSGRVSRQSAAWLDDHVVAGQALVPGAAQVEWVLRAGDDAGCSALEELTLQTPLVLPDTGGLRIQVVVEAADAHGRRDVRLFSRPDDDDAFASTHPWTCHATGVLAPAPTDGTNGTRDAADTLDGAWPPADAEPVPADDLYAQADRTGYGYGPAFRGVRALWRHGKDVLAEVTLPKEAGDPDGFGIHPALLDAVLQPAALLLPPTDAEQVWLPFAWNDVALHAVRATTVRVRLTPLGERIDQGLRITVADAVGAPVLTVRDLRSRPTDTGRLAAAATRDRHGLFDLEWIAPENAAENAAGPARDASEGWVTLGEDAASLADLLASVEAGAPAPQLVAAPVEPDRTDDGLALATHVLDLVQTWLASPLHDSRLVLVTRGAVTDADVDVAAAAVWGLVRSAQSEHPGRFTLIDLGPDDTLAAAMQAAHLEEPQLAVHGGEIRVPRLVRATTDPTAPNGTPEADRTADPSEGLHRNGTVLITGGTGVLGRLVAEHLVTEWGVRHLLLASRRGDQAPGSAELRARLSELGASVEIAPADVGDAEAVAALIASVDPAHPLTGVIHAAGVLDDAVITAQTPESLARVWATKATAARHLHEATRETPLDFFVVFSSAAASLGSPGQANYAAANAYCDALVQHRRAQGLAGLSIAWGLWQATSGMTGQLSETDLARMKRTGFAALTDEGGLALLDAARAHDRAYVVAADLDPRAVTDGLSPLLRALTAPATRRRVASEGLADGALATRLAGLDADGRLRLLTDVVREYVAAVLGHGSAARVGVDIAFKDLGFDSLTAVELRNRLSAACDVRLPATLIFDHPTPQALATHLVDRLAGSTSATTTVNATAPAAAHVAAGADVDADTDDPVAIVAMTCRFPGGVASPDDLWDLLDARKDAMGAFPTDRGWDLERLFHPDPDHPGTSYTDQGGFLPDAGDFDAAFFGINPREALAMDPQQRLLLEASWEVLERAGIDPTTLKGTPTGTYVGLMYHDYAKSFPTADAQLEGYSYLASTGSMVSGRVAYTLGLEGPAVTVDTACSSSLVSIHLATQALRHGECDLALAGGVTVMADPDMFAGFSRQRGLSPDGRCKAYAAAADGVGFSEGVGVLLLERLSDARRHGRRVLGVVRGSAVNQDGASNGLTAPNGPSQERVIRQALASGGLSSVDVDVVEGHGTGTTLGDPIEAQALLATYGQGRPEDRPLWLGSVKSNIGHTQAAAGVAGVIKMVMAMRHGVVPASLHVDVPSPHVEWDSGAVRLAVESVPWPQVEGRPRRAGVSSFGASGTNAHVIVESVPDGLEEDSVSVGGEALETETDGRLVPWVVSARSPQALRDQALRLRDFASDASFRAPLADVGWSLLKTRALHEHRAVVVGAERAELIAALEALATGEPHAALVGPACSQARVGGDDVVWLFSGQGSQLVGMGAGLYERFPVFAAAFDEVCGLLEGPLGVEAGGLREVVFRGPRERLDHTVWAQAGLFALQVGLARLWESVGVRPDVVLGHSIGEIAAAHVAGVFDLADACRVVGARARLMGGLPEGGAMCAVQATPAELAADVDGSAVSVAAVNTPDSTVISGPSDEVDRIAGVWRERGRKTKALSVSHAFHSALMEPMLAEFTEAIRGVKFRQPSIPLMSNVSGERAGEEITDPEYWARHVRNAVLFQPAIAQVADSAGVFVELGPAPVLTTAAQHTLDESDSQESVLVASLAGERPEESAFVEAMARLHTAGVAVDWSVLFAGDRVPGLVELPTYAFQRERFWLSGRSGGGDAATLGLVAAGHPLLGAAVEFADRGGCLLTGRLSRSGVSWLADHVVAGAVLVPGAALVEWALRAGDEVGCVTVEELMLQAPLVVPEASGLRVQVVVEEAGEDGRRGVQIYSRPDADAVGGDDSWICHATGVLSPESARLDTELGGVWPPAGAEPLDVDGFYAQAGEAGYGYGPAFRGLRAVWRHGQDLLAEVVLPEAAGAHDGYGIHPALLDATLHPLLAARFMDGSEDDQLYVPFGWAGVSLRAVGATTVRVRLRPVGESVDQGLSVTVTDATGGPVLSVDSLQTRPVKPSQLAAAQQPDVRGLFTVEWTPLPQTDADGEADWVVLSDGVGRLADVVSAAGGEAPWAVVAPVDASVGDGREGLDGRLVVERVLSLVQEFLALPELAESRLLVVTRGAVATGVDGDGDVDASAAAVWGLVRSAQSENPGRFILLDVDGDGDDQGPDLNGRHLPHATLRHAAEELDEPQLALREGTLYVPRLTQARQSAELVVPPGEPAWRLRMVHDGSLDALAAVACPEALEPLAPGQVRIAVHAAGINFRDVLVALGMVPAYGAMGGEGAGVVTEVGPEVTHVSVGDRVMGVFEGAFGPVVIAEARMVTPVPQGWDMREAAGIPAAFLTAWYGLVELAGLKAGERVLVHAATGGVGMAAVQIARHVGAEVFATASPGKHAVLEEMGIDAAHRASSRDLAFEGTFREATGGRGMDVVLNSLAGEFIDASLRLLGDGGRFLEMGKTDVRAAEEVAAEHADVSYTAYDLVGDAGPDRISNMLDKLVELFASERLKPLPVRSWPLDKAQEAFRFMSQAKHTGKLVLEIPPALDPEGTVLVTGGTGALGQVVAEHLVREWGVRHLLLASRRGPEAPGSDELASKLTGLGAEVTIVAADVSDPASVVELVGKTDPSHPLTGVVHAAGVLEDGVVTAQTPEGLARVWAAKAAAAANLHEATREMRLGLFVVFSSAAATLGSPGQANYAAANAYCDALMQHRRAVGQVGLSVGWGLWEAPDAKPGVAADAKASAATVGKASALSDGTNGSAPQDTTGTAPQGMTGGLTDTDVARMARIGVKGMSNAHGLALFDAAHRHGRPHLVGFNLDLRTLATHPLHTRPALLRGLATPTAGGASRPTATAGGQPADLAGRLAALSPSDRHHTLVRLIREQAATVLGHHPDSLTTGSTFKELGFDSLTAVELRNRLSAATGLRLPAGLVFDHPDADILAEHLGAQLAPDGDTPAGAEATDPVLRDLAKLENALSSTLVEHLDADAVTARLEALLSNWKAASAAPGSGSTKEQLQVATTDQVLDFIDKELGV

SEQ ID NO: 37447 - protein, 4106 aa, Streptomyces cinnamonensis
MASEEELVDYLKRVAAELHDTRQRLREVEDRRQEPVAVVGMACRFPGGIETPEGLWELVAAGDDAIEPFPTDRGWDLEGIYHPDPDHPGTCYVREGGFLAAPDRFDSDFFGFSPREALASSPQLRLLLETSWEALERAGINPASLKGSPTGVYVGAATTGNQTQGDPGGKATEGYAGTAPSVLSGRLSFTLGLEGPAVTVETACSSSLVAMHLAANALRQGECDLALAGGVTVMSTPEVFTGFSRQRGLAPDGRCKPFAAAADGTGWGEGAGLILLERLSDARRKGHKVLAVIRGSAINQDGASNGFTAPNGPSQRRVIRQALSSAHLSTSEIDVVEAHGTGTRLGDPIEAEALIATYGKEREDDRPLWLGSVKSNIGHTQAAAGVAGVIKMVMALQRELLPATLNVDEPTPHVQWEGGGVRLLTEPVPWSRGERPRRAGISSFGISGTNAHVVLEEAPPEEDVPGPVAAEPEGVVPWVVSARTEEALSEQARRLGEFVADTDPSTADVGWSLTTSRAILEHRAVVVGRDRDALTAGLAALAAGEESADVVAGVAGDVGPGPVLVFPGQGSQWVGMGAQLLDESPVFAARIAECEQALSAYVDWSLSAVLRGDGSELSRVEVVQPVLWAVMVSLAAVWADYGVTPAAVIGHSQGEMAAACVAGALSLEDAARVVAVRSDALRQLMGQGDMASLGASSEQAAELIGDRPGVCIAAVNGPSSTVISGPPEHVAAVVADAEERGLRARVIDVGYASHGPQIDQLHDLLTDRLADIRPATTDVAFYSTVTAERLTDTTALDTDYWVTNLRQPVRFADTIDALLADGYRLFIEASAHPVLGLGMEETIEQADIPATVVPTLRRDHGDTTQLTRAAAHAFTAGATVDWRRWFPADPTPRTIDLPTYAFQRRSYWLPVDGVGDVRSAGLRRVEHSLLPAALGLADGALVLTGRLAASGGGGGWLADHAVAGTTLVPGAALVEWALRAADEAGCPSLEELTLQAPLVLPGSGGLQVQVVVGPADGQGGRREVRVFSRVDSDDEAAGQDEGWSCHATGVLSPEPGAVPDGLSGQWPPTGAEPLEISDLYEQAASAGYEYGPSFRGLRSVWRHGHNLLAEVELPEQAGAHDDFGIHPVLLDAALHPALLLDQNAPGEEQEPAQPALRLPFVWNGVSLWATGAATVRVRLAPHGGGETDDSAGLRVTVADATGAPVLSVDSLALRPADPELLRTAGRAGSGTNGLFTVEWTALPPADVADHAAGDGWAVLGQDVPDWAGADMPRHPDMASLSAALDEGTQAPAAVFVETTATSHATPNTAADVTLDASGRAVAERTLHLLRDWLAEPRLAETRLVLITHHAVTTPADDDVNAAPLDVPAAALWGLIRSAQAEHPDRFVLLDTDAKANTDPGPDTSTDHSTASGTYRTVIARALATGEPQLAVRAGELLAPRLARAATPTPETPTPETQPDTGSGSEAGAGSGSGPGATLDPDGTVLIAGGTGMMGGLVAEHLVRAWSVRHLLLVSRQGPDAPDARDLADRLVGLGATVRIVAADLTDGRATADLVASVDPAHPLTGVIHAAGVLDDAVVTAQTSDQLARVWAAKASVAANLDAATSELPLGLFLMFSSAAGVLGNAGQAGYAAANAFVDALVGRRRATGLPGLSIAWGLWARGSAMTRHLDDADLARLRAGGVKPLLDEQGLALLDAARATAAHTSLVVAAGIDVRGLNRDDVPAILRDLAGRTRRRAAADSTVDQAALERRLTGLDEAERRAVVTDVVRECVAAVLGHRSAADVRTEANFKDLGFDSLTAVQLRNRLSAASGLRLPATLAFDHPTPQALAAYLGTRLSGRTATPVAPVAPSAAATDEPVAIVAMACKYPGGATSPEGLWDLVAEGVDAVGAFPTGRGWDLERLFHPDPDHPGTSYADEGAFLPDAGDFDAAFFGINPREALAMDPQQRLLLEASWEVLERAGIDPTTLKGTPTGTYVGVMYHDYAAGLAQDAQLEGYSMLAGSGSVVSGRVAYTLGLEGPAVTVDTACSSSLVSIHLAAQALRQGECTLALAGGVTVMATPEVFTGFSRQRGLAPDGRCKPFAAAADGTGWGEGVGVLLLERLSDARRHGRRVLGVVRGSAVNQDGASNGLTAPNGPSQERVIRQALASGGLSSVDVDVVEGHGTGTTLGDPIEAQALLATYGQGRPVDRPLWLGSVKSNIGHTQAAAGVAGVIKMVMAMRHGVVPASLHVDVPSPHVEWDSGAVRLAVESVPWPEVEGRPRRAGVSSFGASGTNAHVIVESVPDGLGEDSVSVSGEAPETETDGRLVPWVVSARSPQALRDQALRLRDAVAADSTVSVQDVGWSLLKTRALFEQRAVVVGRERAELLSGLAVLAAGEEHPAVTRSREDGVAASGAVVWLFSGQGSQLVGMGAGLYERFPVFAAAFDEVCGLLEGPLGVEAGGLREVVFRGPRERLDHTMWAQAGLFALQVGLARLWESVGVRPDVVLGHSIGEIAAAHVAGVFDLADACRVVGARARLMGGLPEGGAMCAVQATPAELAADVDDSGVSVAAVNTPDSTVISGPSGEVDRIAGVWRERGRKTKALSVSHAFHSALMEPMLAEFTEAIREVKFTRPKVSLISNVSGLEAGEEIASPEYWARHVRQTVLFQPGIAQVASTAGVFVELGPGPVLTTAAQHTLDDVTDRHGPEPVLVSSLAGERPEESAFVEAMARLHTAGVAVDWSVLFAGDRVPGLVELPTYAFQRERFWLSGRSGGGDAATLGLVAAGHPLLGAAVEFADRGGCLLTGRLSRSGVSWLADHVVAGAVLVPGAALVEWALRAGDEVGCVTVEELMLQAPLVVPEASGLRVQVVVEEAGEDGRRGVQIYSRPDADAVSGDDSWICHATGTLTPQHTDAPNDGLAGAWPAAGAVPVDLAGFYERVADAGYAYGPGFQGLRAVWRHGQDLLAEVVLPEAAGAHDGYGIHPALLDATLHPALLLDWPGEVQDDDGKVWLPFTWNQVSLRAAGAATVRVRLSPGEHDEAEREVQVLVADATGTDVLSVGSVTLRPADIRQLQAVPGHDDGLFSVDWTPLPLSRTDVSQTDADGDADWVVLSDGVGSLADVVSAAGGEAPWAVVAPVGASAGGGLAGFDRREGLDGRLVVERVLSLVQEFLAAPELAESRLLVLTRGAVATGGDGDGDVDASAAAVWGLVRSAQSENPGRFILLDVDMDVDVDVDMDVDVDVDVDVDVDGDGNGSDLDPDLNGRRLPHATLRHAAEELDEPQLALRDGQLLVPRLVRATGGGLVVAPTDRAWRLDKGSAETLESVAPVAYPGVMEPLGPGQVRLGIHAAGINFRDVLVSLGMVPGQVGLGGEGAGVVTETGPDVTHLSVGDRVMGVLHGSFGPTAVADTRMVAPVPQGWDMRQAAAMPVAYLTAWYGLVELAGLKAGERVLIHAATGGVGMAAVQIARHLGAEVFATASAAKHVVLEEMGIDAAHRASSRDLAFEDTFRQATDGRGMDVVLNSLTGEFIDASLRLLGDGGRFLEMGKTDVRTPEEVAAEYPGVTYTVYDLVTDAGPDRIAVMMSELGERFASGALDPLPVRSWPLDKAREAFRFMSQAKHTGKLVLDVPAPLDPDGTVLITGGTGALGQVVAEHLVREWGVRHLLLASRRGLDAPGSGELADRLSDLGAEVTVAAADVSDPASVVELVGKTDPSHPLTGVVHAAGVLEDGIVTAQTPEGLARVWAAKAAAAANLHEATREMRLGLFVVFSSAAATLGSPGQANYAAANAYCDALMQRRRAAGQVGLSVGWGLWEAPDAKPGVAADAKPDVAADAKTGVAADGTPQGMTGTLSGTDVARMARIGVKAMTSAHGLALLDAAHRHGRPHLVAVDLDTRVLAHKPAPALPALLRAFAGDQGGQGGGRGGGRGGGPARPAAATTRQNVDWAAKLSVLTAEEQHRTLLDLVRTHAAAVLGHAGTDAVRADAAFQDLGFDSLTAVELRNRLSASTGLRLPATFIFRHPTPSAIADELRAQLAPAGADPAAPLFGELDKLETVITGHAHDESTRTRLAARLQNLLWRLDDTSARSDHAAGASDADGDAVENRDLESASDDELFELIDRELPS

SEQ ID NO: 37448 - protein, 620 aa, Vibrio parahaemolyticus RIMD 2210633
MDQNPQSQLKLLVIKGKEQGYLTYAEVNDHLPAEIVDSEQVEDIIQMINDMGIKVVETAPDADDLALNDDTNITDEDAAEAAAAALSSVESEIGRTTDPVRMYMREMGTVELLTREGEIDIAKRIEEGINQVQSSVAEYPGTIPYILEQFDKVQAEELRLTDLISGFVDPDADDTAAPTATHIGSELSETQLEEEDEEDLEDDEESDDDSDDSEEDVGIDPELALEKFNQLRSTYQNLQLAINEYGYDSPKATVANEMMLDVFKEFRLTPKQFDHLVNELRTAMDRVRTQERLIMKSVVEYGKMPKKSFIALFTGNESSDAWLDEILASDKPYAEKIKRNEEEIRRSIAKLKMIEEETSLNVQNIKDISRRMSIGEAKARRAKKEMVEANLRLVISIAKKYTNRGLQFLDLIQEGNIGLMKAVDKFEYRRGYKFSTYATWWIRQAITRSIADQARTIRIPVHMIETINKLNRISRQMLQEMGREPLPEELAERMQMPEDKIRKVLKIAKEPISMETPIGDDEDSHLGDFIEDTTLELPLDSATATSLKMATKDVLAGLTPREAKVLRMRFGIDMNTDHTLEEVGKQFDVTRERIRQIEAKALRKLRHPSRSETLRSFLDE

SEQ ID NO: 37449 - protein, 449 aa, Glycine max
MREIISIHIGQAGIQVGNSCWELYCLEHGIQPDGMMPSDSTFGVAHDAFNTFFSETGSGKHVPRAVFVDLEPTVIDEVRCGTYRQLFHPEQLISGKEDAANNFARGHYTVGKEIVDLCLDRVRKLADNCTGLQGFLVFNAVGGGTGSGLGSLLLERLSVDYGKKSKLGFTIYPSPQVSTAVVEPYNSVLSTHSLLEHTDVAVLLDNEAIYDICRRSLDIERPTYTNLNRLISQIISSLTTSLRFDGAINVDITEFQTNLVPYPRIHFMLSSYAPVISAAKAYHEQLSVPEITNAVFEPASMMAKCDPRHGKYMACCLMYRGDVVPKDVNAAVATIKTKRTVQFVDWCPTGFKCGINYQPPSVVPGGDLAKVQRAVCMISNNTAVAEVFSRIDHKFDLMYAKRAFVHWYVGEGMEEGEFSEAREDLAALEKDYEEVGAEGAEDDEEGEDY

SEQ ID NO: 37450 - protein, 394 aa, Zea mays
NGTNHHHHSSNPKASFESEAYRVKWNKSPPPLQQSQDSFEPEAYRVKWNKSPPPLQQSQDSFEPEAYRVKWNKSPPPLQQSQDSFEPHEDRVKWNKSPPPLQQSQDSFEPEAYRVKWNKSPPPLQQSQDSFEPEAYWVGWKQHAQGETDVADGTTPARGHGLHVATGMLFTRKSLLPGTALPEGTRFSGHGFPDPQRFALRADADAIPFSYSQLDAILRMFRIPRGSKKAEQVADTLRACEAESSDAHACATSEQAAADFAASSLGVRASDLVSVVTAVHGGKDATRYVVAPDGVTRIGKAAGAATAVPCHPMPYPYMVHYCHRPTDVEALRVELTGLGDDGATIAIAMCHANTMSWDDRYFQMLNATRGEEICHFMPWNYVLWLPAADLLANS

SEQ ID NO: 37451 - protein, 242 aa, Brassica napus
  misc_feature (8)..(8): Xaa can be any naturally occurring amino acid
  misc_feature (36)..(36): Xaa can be any naturally occurring amino acid
  unsure (1)..(242): unsure at all Xaa locations
MLCSRERXMREDVMTKNVSIYKSQATALEKHAAPNXGSVVANPANTNALILKEFAPSIPEKNITCLTRLDHNRALGQISERLSVPVSDVKNVIIWGNHSSSQYPDVNHAKVQTSAGEKPVRELVKNDEYLNGEFITTVQQRGAAIIKARKLSSALSAASSACDHIRDWVLGTPEGTFVSMGVYSDGSYDVPAGLIYSFPVTCRNGEWSIVQGLPIDEMSRKKMDLTAEELKEEKDLAYSCLS

SEQ ID NO: 37452 - protein, 545 aa, Thermoplasma acidophilum DSM 1728
MQYIVVTGGVISGLGKGTITSSIGHILKDSGIKVSAVKIDPYINYDAGTMNPYQHGEVFVLDDGGEVDLDLGNYERFMNINLSRDNNITTGKVYLEVIQKERHGDYLGKTVQIIPHITDEIKRRIREVARTSGADVVLIEVGGTVGDIESMPFLEALRQLKREEQNVVFAHVTLVPEIGPTMEQKTKPTQHSVKALREIGIQPDIIFARSKQKLTEETKSRISLFTDVPVEGIISVSDVENVYLLPQMMVNEGLITRLSKLLNMNIEYRDSWTSYAENIRHPRDRVKVAIVGKYVDLHDAYISHKEAFSHVTGNTGIAVDIMWIDSEKVKNDQSVLSEADAILIPGGFGYRGVEGKIAATRYAMENGVPFLGICLGFQVAVIAVARYVLGLDGANSTEFDEKTKYPVVDILPEQRGVKDMGGTMRLGSKKVVIKKGTLAHRIYGADVIYERHRHRYEVNPDYIDMIEKAGFKFSATDEEGIRMEILERPGDESFIATQYHSEFKSRPLDPSKVHLHLVEQALIFKHRRMGENHEGYATAASSQGQ

SEQ ID NO: 37453 - protein, 493 aa, Glycine max
MHGSMASAAFPVTTACFDTNTVDDRKSSFFEFKPLSRSNMVPADFNNHVSKQSTQVEGPGKTQSFASSPLVESEIAVPSNELSLSSPVQKVSSSASAPVDVDLDDINHKGNTATGLQASHVEVRGSGLSVAAEKTSDDGYNWRKYGQKLVKGSEFPRSYYKCTHPNCEVKKLFERSHDGQITEIVYKGTHDHPKPQPSCRYSTGTVLSIQGERSDKASMAGRDDKATAMYGQVSHAAEPNSTPESSPVATNDDGLEGVAGFVSNRTNEEVDNDDPFSKRRKMELGNVDITPVVKPIREPRVVVQTLSEVDILDDGYRWRKYGQKVVRGNPNPRSYYKCTNAGCPVRKHVERASHDPKAVITTYEGKHNHDVPAARNSSHDMAVPAAAAGGQTRTKLEESDTISLDLGMGISSAAEHRSNGQGKMLHSEFGDTQTHTSSSNFKFVHTTSAPVYFGVLHNSSNPFGSRDNRSDGPSLNRSSYPCPQSMGRILMGP

SEQ ID NO: 37454 - protein, 335 aa, Debaryomyces hansenii CBS767
MAITIGINGFGRIGRLVLRIALQRSDIKVVAVNDPFIAPEYAAYMFKYDSTHGRYKGEVTSKDDSLVIDGQSIKVFGEKDPASIPWGKAGVDYVIESTGVFTTTEGAQKHIDGGAKKVIITAPSSDAPMFVVGVNEQKYTPDLKIVSNASCTTNCLAPLAKVINDKFGIEEGLMTTVHSITATQKTVDGPSHKDWRGGRTASGNIIPSSTGAAKAVGKVIPELNGKLTGMSLRVPTVDVSVVDLTVRLKKSATYEEISEAIKAASNGELKGILGYTEDAVVSTDFLGSDYSSIFDQKAGILLSPTFVKLISWYDNEFGYSTRVVDLLEHVAKASN

SEQ ID NO: 37455 - protein, 97 aa, Aeromonas salmonicida
MKIRPLHDRVIIKRIEAEAKSAGGIILAGTAAQKSTRGEVLAVGTGRILDNGDVKALAVKVGDKVIFNEGYGVKTEKLDGQDVLILSETDILAIVEA

SEQ ID NO: 37456 - protein, 152 aa, Calystegia sepium
  misc_feature (1)..(1): Xaa can be any naturally occurring amino acid
  unsure (1)..(152): unsure at all Xaa locations
XVPMDTISGPWGNNGGNFWSFRPVNKINQIVISYGGGGNNPIALTFSSTKADGSKDTITVGGGGPDSITGTEMVNIGTDEYLTGISGTFGIYLDNNVLRSITFTTNLKAHGPYGQKVGTPFSSANVVGNEIVGFLGRSGYYVDAIGTYNRHK

SEQ ID NO: 37457 - protein, 427 aa, Cordyceps bassiana
DKTHINVVVIGHVDSGKSTTTGHLIYQCGGIDKRTIEKFEKEAAELGKGSFKYAWVLDKLKAERERGITIDIALWKFETPKYQVTVIDAPGHRDFIKNMITGTSQADCAILIIAAGTGEFEAGISKDGQTREHALLAFTLGVKQLIVAINKMDTTKWSEARFQEIIKETSSFIKKVGYNPKAVAFVPISGFNGDNMLEPSSNCPWYKGWEKETKAGKSTGKTLLEAIDAIEPPKRPTDKPLRLPLQDVYKIGGIGTVPVGRVETGIIKPGMVVTFAPANVTTEVKSVEMHHEQLAEGVPGDNVGFNVKNVSVKEIRRGNVAGDSKNDPPNGAASFNAQVIVINHPGQIGAGYAPVLDCHTAHIACKFAELLEKIDRRTGKSVENNPKFIKSGDSAIVKMVPSKPMCVEAFTDYPPLGRFAVRDMRQT

SEQ ID NO: 37458 - protein, 323 aa, Anaplasma marginale str. St. Maries
MEIYQHSDCSCLSGKKFCIVGYGSQGKAQAMNLRDSGIRDITIILHTGSRSIDLARGDGFEVDTSGSSAKHADVIVMLAPDEAHREICKETLFPYLKPGQAIIFAHGLSILYGLVELPGYVDVCMVSPKSVGTEVRNQYLEGNGVVCFTAVMNDCSGTAQAVSDAYAAAVMLGKLIIGTTFKQEVEANLFSEQVVLCGGIPSLIKCAFEVMVESGISPEVAYLGCVYEVKLIADLMHRKGIYGCLSNVSSVAGYGASITGDRIIDGRVKQSMRETLAEIQSREFFKKLSKEPNLQQTLSTYYKELEKHPMEAVGKELRDLMNT

SEQ ID NO: 37459 - protein, 290 aa, Triticum aestivum
MQDFQSIPGLAGRLFGGAAAADIRRVQGPASRCGVFSQAASAQPEAAVKCPRCESTNTKFCYYNNYNLSQPRHFCKSCRRYWTKGGVLRNVPVGGGCRKAKRSSSSASAPSTPAATDAKSQRRASSSSSSRSNSGSGSASPTANGEDTPTTTTDPPPATPSSNSNSNAVSFANRMTNYPFAADVPPPAPIFADQAAALASLFAPPPPPPLPVFSFSAEPKMEEAIGSLLLPGQEPAQEPEEPTCTSTVADMAPFMSLDAGIFELGDASPADYWNGGSCWTDVQDPSVYLP

SEQ ID NO: 37460 - protein, 544 aa, Aeromonas salmonicida
MAAKEVKFGNEARIKMLEGVNILADAVKVTLGPKGRNVVLDKSFGAPTITKDGVSVAREIELEDKFQNMGAQMVKEVASKANDAAGDGTTTATVLAQAIVNEGLKAVAAGMNPMDLKRGIDKAVIAAVAELQVLSQPCADNNAIAQVGTISANSDEKVGRLIAEAMDKVGRDGVITVEDGQGLDDELAVVEGMQFDRGYLSPYFVNKPETGAVELDDPFILLVDKKVSNIREMLPVLEGVAKAGKPLLIVAEDVEGEALATLVVNTMRGIVKVAAVKAPGFGDRRKAMLQDIAMLTSGGTVIEEVGMELEKATLEDLGRAKRIVITKENTTIIDGVGDAALIESRVAQIRQQIEETSSDYDREKLQERVAKLAGGVAVIKVGAATEVEMKEKKARVDDALHATRAAVEEGVVAGGGVALVRVAAKLAGLRGDNEDQNVGIKVALRAMEAPLRQIVINAGEEASVIANAVKNGEGNFGYNAYTEQYGDMLAMGILDPTKVTRSALQFASSIAGLMITTECMITELPKKDTPAMPDMGGMGGMGMM

SEQ ID NO: 37461 - protein, 341 aa, Photobacterium profundum SS9
MNNSYPKGSLMKVAVFSTKKYDQKSFELINTHYQHELTYFDFRLTQQTAIMAHGFDAVCAFVNDDLSQPVLQELANHGIQLIAMRCAGFDKIDLDAAEQLNIQVVRVPAYSPEAIAEHTLGLMLSLNRRIHRAYQRTRDANFSLEGLTGFNFHGKTVGVIGTGKIGIATIRILKGFGMNILAYDPYENPIAIELGVTYTTLEDIYRQANVITLHCPMTQENYHMLNAEAFDQMRDGVMIINTSRGGLLNSIDAIEALKASRIGSLGIDVYENEQDLFFQDKSNDVIKDDVFRRLSSCHNVLFTGHQAFLTEEALGNIADTTLNNILLFGRNTLSGNELINK

SEQ ID NO: 37462 - protein, 501 aa, Emericella nidulans
MGQNDDQKTYRYNESPVYTTSNGCPVMDPQASQRVGPNGPLLLQDFNLIDLLAHFDRERIPERVVHAKGAGAYGEFEVTDDISDITVIDMLKGVGKKTKTFVRFSTVGGEKGSPDSARDPRGFACKFYTEEGNWDWVFNNTPVFFLRDPSKFPMFIHTQKRNPQTNLKDATMFWDYLSTHQEAVHQVMHLFSDRGTPYSYRHMNGYSGHTYKWIKPDGTFNYVQLHLKTGQGNKTFTDAEATRLAAENPDWHTQDLFNAIARGEYPSWTCYVQTLSPEQAEKFRWNIFDLTKVWPQSEVPLRRFGRFTLNKNPENYFAEVEQAAFSPSHLVPGVEPSADPVLQARLFSYPDTHRHRLGTSNYQSIPVNCPLRAFTPFHRDGAMSVNGNHGANPNYPSTFRPLQYKPVKASQEHEKWAGSVVTEQLPVTDEDFVQANGLWKVLGRQPGQQENFVGNVAGHLCNAHPRVRQATYGMFRRVNADLGKRIEKATEKKATEARARL

SEQ ID NO: 37463 - protein, 627 aa, Debaryomyces hansenii CBS767
MDSGHDDLYPLALLMDELKHDDVSNRVEAMQKLDTIAIALGPQRTLNELLPFLNDVAQDDEEEVFAVLANKLGDFVPLIGGRENCEPLIQILLILASMEEPIVRDKAIDSLNNISLELAHDQLIEIFLPMIQSLSQGNWFSKKIASCGLFKSIIIKVDSSTRRDLLNVFYKLICDESPMVRRSAANSLPNLINKLTWFTENYPNNEDKVTNKDWEIISQLFQHLINDEQDSVKFLSIDVLISILDFFQQVNDQSHNSEFLISSLKLINDESWRVRYTAADRFGKIAKNFATDESDLSKLIDPFISLMNDNEGEVRKAIAKQLPEFCELLSNFPTTNQAILNKIIPIVNKLSQDPHENVRSSLASSITNLSPILGKQSTIDNLLPIFLVMLKDEFPEVRLNIISNLSVVNEIIGINLLSINLLPAITELAQDNKWRVRLAIIEYIPKLANQLGESFFNDELLTLCMSWLWDPVFAIRDAAVNTLKELTIIFGSVWADNEIINRLLNNNNSGNENIDEDNKIDYSNFIIRITCLFAITKLIPVMNNDIIVSKLLPFINNFIDDSVPNIRFNIAKSYLVIAETLVKSKDNGAQKLINNEILPNLQKLQSDDDVDVRFFASKSIQGIKDLN

SEQ ID NO: 37464 - protein, 141 aa, Triticum aestivum
MGRLFLTSLAPATGTIYCCKHCDSHLAYAQHIISKMFRCKHGKAYLFDKVVNVVAGESEDDRMMTTGLHTVRDIFCVACGAILGWKYVSAFEKDQRYKEGKFILERCKIHSGGGGPPDRIQLWAEHDARISSSEDDDQGAV

SEQ ID NO: 37465 - protein, 78 aa, Codonopsis lanceolata
MSCCGGNCGCGSGCKCGSGCGGCKMYPDMSYTESESTTAETLILGVAPKSKTIMYCEGSENGGCKCGANCTCDPCTCK

SEQ ID NO: 37466 - protein, 424 aa, Cordyceps bassiana
HINVVVIGHVDSGKSTTTGHLIYQCGGIDKRTIEKFEKEAAELGKGSFKYAWVLDKLKAERERGITIDIALWKFETPKYHVTVIDAPGHRDFIKNMITGTSQADCAILIIAAGTGEFEAGISKDGQTREHALLAFTLGVKQLIVAINKMDTTKWSEARYQEIIKETSSFIKKVGYNPKAVAFVPISGFNGDNMLEPSSNCPWYKGWEKETKAGKSTGKTLLEAIDAIEPPKRPTDKPLRLPLQDVYKIGGIGTVPVGRVETGIIKPGMVVTFAPANVTTEVKSVEMHHEQLTEGVPGDNVGFNVKNVSVKEIRRGNVAGDSKNDPPNGAASFNAQVIVINHPGQIGAGYAPVLDCHTAHIACKFSELLEKIDRRTGKSVENNPKFIKSGDSAIVKMVPSKPMCVEAFTDYPPLGRFAVRDMRQT

SEQ ID NO: 37467 - protein, 515 aa, Oryza sativa
PLLVTLFYNKSYYHSNIKDIYFPCLHRILLLMILSHVPMRDAARAACVSHAFLHSWRCYPNLIFNAENLALNRKGVNDNETPVDFIAIVDNIMRNHSGVGVKIFKLELGPGYAVHPSHLDRWLKAASTLKIKEFAFELPLRNKTEYTFPYSHLLSDNRRGNSVQSFHLSSCTLHPTLQFECLRSLKSVHLSWVDITGEELACFISNSFNLESLEISSCCKIGFLKTTSVLQKLNCLRVQHSHRLDMIEINAPMLSSFHYRGPLTVISLGDAVQLRDVNLLLYPWHRMFHYARTKLPTIARNVENLFLMTRDEDVNTPMVPNKFLYLRYLEMVFIGPRKESPPCYDFFSLVFFLDASPALETFVLHLDSVGTKNDRILEDSSELRKLPKCNYSNLKNVKITGLMSSKTLVELISHILDNTPSLEFLTLDTRIYGFKYEIRRFISWDCGIMMTTDDRMESELDRELLMSDSDLIEAYRAPQVIRRYIEGKVPSTVNFEVIEPCRKRVIVETSRGPRL

SEQ ID NO: 37468 - protein, 637 aa, Ashbya gossypii ATCC 10895
MGNTVSSTEGSKRRGDGRAGTPAASGASQWETDSTDRGRQQSITSQLFSGRHHARSKWKFQGAGDSATGSSGGIASMFKCDYTLNADARSISSEQGETCQGMPNLAGLVLDACTQGIRSPGPSTATVEHTNLEASMSPELASQTHRPSISALKQSLIQVQGQTNSRHRAEDIDTAQYVPSATIDIPCSNPSTNTASVTHRADDSSTRSSLLSLFTQDVEEYIEASEVVLNESLVDSVVRKDLRRKRQLQQQCGATRAAEQAAETAKQPDAKKKKLPCSAAALSATASGVVQSETEEQHSDAEAEFVEVIIKWRDCLLDPQRTKLSIVSPDIASVIHKNSKRKVAMVFSKDEQFWVAPDLRLPPGIYKLQFLINGALRHSNFLPTATDSHSNIVNWFEVVPWYDRAEPYRDPAPEEVAMPPESPQLTAPAAGRPPLLKRGTSSSSRARVVERSNTPISDYTGISRSGSARPLLAHHKSANSIELSPIPRCVLQYSTEIPELFKPEGCPPDPNTAPGSFNENIQDCNQDELFRFLQEDWKMSAQEAEEVLVEKYPVPDLPVYLNSSYLNEIFTKLQRSSVTGDVKRSSFTHIIPHVNLNHLLTSSIRDEIISVGCTTRYEGKFITQIMYAPCYYESSRK

SEQ ID NO: 37469 - protein, 629 aa, Oryza sativa
MPEAVAAAVSPAAAAATAMCAEHREKLEHIERVTRNAGQEQRRVLEEILAQNAQAEYLRRLGVPGDAPGADEAFRRLAPLVTYEDILPDVLRIANGDTSPILSGKPVSEFLTSSGTSGGERKLMPTIEEEMERRSGLYSLLMPVMSRQVPGLDKGKAMYLYFVKSEWRTPGGLPARPVLTSFYRSRYFLERPHDPYTSYTSPDEAVLCEDAYQSMYAQLICGLVHRADVLRVGAVFASGFLRAIRFLEKHWPSLCRDIRAGELDGGVTDPAVRGAVGRVLRGADPALADAIEAECARPSWQGIIRRVWPSTKYIDVIVTGAMAQYIPTLEFYGGGLPLACTMYASSECYFGLNLNPMCKPSEVAYTLIPTMCYFEFLPVNSGANDVAAPEPDHRGLVDLVDVKLGHEYELVVTTYSGLYRYRVGDVLRVAGFKNAAPMFAFVRRKNAALSIDSDKTDEAELHAAVTEAVQHLAPFGASLVEYTSYADTATTIPGHYVLFWELRSPAGGTPVPASVFEDCCLAVEEGLNSVYRQCRAADRSIGPLEIRVVADGTFDKLMDYALSRGASINQYKAPRCVRPGPVVELLDGRVQATYFSPKCPKWCAGGNKQWISSGAAAKKTTTTCDSLAV

SEQ ID NO: 37470 - protein, 176 aa, Sulfolobus acidocaldarius
MEVATLGGGCFWCTEAVFKRVKGVVSVKPGYSGGKVPNPTYEEVCTDETGHAEVVQITFDPSVITYRELLEIFFEIHDPTTPNRQGNDVGSQYRSIILYHSEEQKKIAEEMIKLYERKLGKKVVTELVPFEAFYEAEDYHHDFYDKHKNYPYCKLVIDPKVKKFMKNFPDKASIRI

SEQ ID NO: 37471 - protein, 675 aa, Candida albicans SC5314
MSNEYILVTGGAGYIGSHTVIELISNGYKVVIVDNLSNSSYDAVARIEFIVKQHVPFYDVDIRNYEQLNKVFQDYKISGVIHFAALKAVGESTKIPLAYYDNNVSGTVNLLEVCKANDVKTIVFSSSATVYGDVTRFGDNSMIPIPEHCPMDPTNPYGRTKFIIESILKDIYNSDDAWKVAILRYFNPIGAHPSGLLGEDPLGIPNNLLPYLAQVAIGRREKLSIFGNDYNSRDGTPIRDYIHVVDLAKGHIAALAYLKNLQSKGLYREWNLGTGKGSTVFEVYHAFSKVVGRELPHEVVGRRAGDVLDLTAKPDRANKELQWKTELTIDDACKDLWKWTTENPFGFNIENYSWKEFDGFNNRLHSFVAGDLKVNLANRGALIQAITLKDSNMVKAYNNAEDFKSETNPFFGTTVGRYANRISNGEFKLNGKVYKLTKNEGANNLHGGANGFDKQDFFGPVVKSRDGKFFVDFLLVDKDGNDGFPGELEAIVHYTIDDSSVEIEYECQLLSGEATIVNMTNHSYFNVSNSDTIEGTEVKLITDKMLEVDSQLLPTGKFIENEKAASPIVLNENDVFDNCFIVDEECGIDTRDKPLKQVFEATSFVTNNKLKISTTEPAFQFYTGDGVNTKGFGKRCGFCVEPSRFINAINHKEWSNQVILKKGDVYGSKIKYEFQ

SEQ ID NO: 37472 - protein, 293 aa, Triticum aestivum
PRVRKNCLVIQGSGDNPNSLAGLTLNTPGDLAISLGTSDTVFGITAEAKPSLEGHVFPNPVEPDGYMVMLCYKNGSLTREDVRNQCAEKSWDVFNNYLEKTPPLNGGKLGFYYKDHEILPPLPVGFHRYIVENFNDASSNNLKEHEVQEFDPQSEVRAIVEGQMLSMRGHAERFGMPNPPKRIIATGGASSNESILKLIAQIFGCPVFTVERPDSASLGAALRAAHGWLCKEEGGFVPISRMYTGNLEKTSLGAKLAVPAPGEEGRELLKKYTVLMKKRMGIERRLVEKIGRA

SEQ ID NO: 37473 - protein, 373 aa, Ashbya gossypii ATCC 10895
MSEQDQELRNRQAQFAKELHGESVERSGLTALLGKNREAQQEAVAKYLRHWDGATDAEAEERRLADYNESTHSYYNVVTDFYEYGWGASFHFSRFYTGESFAMSMARHEHYLAHRAGITSGDLVLDVGCGVGGPAREIARFTGCRVVGLNNNDYQIMKGKHYSRKLGLGDQVSYVKGDFMNMDFPDATFDKVYAIEATCHAPSFEGVYGEIYRVLKPGGVFAVYEWVMTENYDETNPEHRRIAYDIELGDGIPKMYSVKVARDALAKVGFEILVDEDRADNDDPVPWYYPLTGEWAYIQTIADLGTFVRTSALGRRVTSAFVSLMETLRLAPRGSSEVVNALESAAAGLVAGGKSKLFTPMMLFVARKPETAE

SEQ ID NO: 37474 - protein, 178 aa, Zea mays
  misc_feature (146)..(146): Xaa can be any naturally occurring amino acid
  unsure (1)..(178): unsure at all Xaa locations
MAKMGLKPDPVTPNPTHNNAKEIRYRGVRKRPWGRYAAEIRDPGKKTRVWLGTFDTAEEAARAYDKAARDFRGAKAKTNFLELNEKVLSGGGGFARSPSQSSTLDYASPPAVTDGIVPPQLELSLGGGGGACYQIPMARPLYFLDXLMGVGNGGRGQLPVSPGDACLLRRNGLCGAQE

SEQ ID NO: 37475 - protein, 333 aa, Methanothermobacter thermautotrophicus str. Delta H
MRRFFMKIYYENDIDMEILADKKIAVIGYGSQGEAQARNMADSGLNVIVGLRRGGSSWKKAHDDGMNVMTIEDASREADIIHILIPDEIQETVFEQSIRPYLKEGNTISFSHGYNIHYGYIKAPEGVNVTMVAPKGPGAMVRRTYLEGFGIPGLVAVEVDATGDAMEQALAMAKACGLARAGVLETTFREETETDLFGEQAVLCGGVTELINTAFKTLVRAGYQPEIAYFETCHELKLIVDLIYERGFRGMWHNVSNTAEFGGLTRRGRIITEETEKEMDEILKEIQNGKFAKEWALENRAGAPMLKRMRKLESELEIEEVGSKLRKLCGLEK

SEQ ID NO: 37476 - protein, 479 aa, Triticum aestivum
  misc_feature (11)..(11): Xaa can be any naturally occurring amino acid
  unsure (1)..(479): unsure at all Xaa locations
LYSLLMPVMSXSLPGLDKGKAMYLLFVKAESRTPGGLAARPVLTSYYRSRQFLDRPHDPSSAYTSPNKAILCVDSYQSMYAQLLCGLVHRTDVLRVGAVFASGLLRAIRFLEKHWPLLCHDIRTGELDPEITDHAVRDAVGRLLHANPALASEIEAECSKPSWEGIIRRLWPRTKYIDVIVTGAMSQYIQTLEFYGGGLPLICTMYASSECYFGLNLNPMCKPGDVAYTLIPTMCHFEFLPVHCSNANAEPSHRDLVDLVDVKLGHDYELVVTTFSGLCRYRVGDVLRVAGFKNEAPMFSFVRRRNVALSIDSDKTDETELHTAVSSAVQHLAPFGASLVEYTSYADTAAIPGHYVLFWELREGSTAVPASVFEECCLSVEEALNSVYRQCRACDRSIGPLEIRVVSEGTFEKLMDYALSQGASINQYKAPRCVRPGPVVELLDARVQASYFSPKCPKWSPGNKQWNTSSKELLSIGDA

SEQ ID NO: 37477 - protein, 571 aa, Mycobacterium tuberculosis H37Rv
MARLRGAGAAGRCRPGRFGSSARRHGLADDGEPDRVLPARRRCSARRRHLVFGVQHPARRAADLRVRQRGDQGGHLRATVRRSRSRQRCAHRTHRLRRWRAPGTLSLTDLYAAASGDFFDFESTWRAVQPEDIVTLIYTSGTTGNPKGVEMTHANLLFEGYAIDEVLGIRFGDRVTSFLPSAHIADRMTGLYLQEMFGTQVTAVADARTIAAALPDVRPTVWGAVPRVWEKLKAGIEFTVARETDEMKRQALAWAMSVAGKRANALLAGESMSDQLVAEWAKADELVLSKLRERLGFGELRWALSGAAPIPKETLAFFAGIGIPIAEIWGMSELSCVATASHPRDGRLGTVGKLLPGLQGKIAEDGEYLVRGPLVMKGYRKEPAKTAEAIDSDGWLHTGDVFDIDSDGYLRVVDRKKELIINAAGKNMSPANIENTILAACPMVGVMMAIGDGRTYNTALLVFDADSLGPYAAQRGLDASPAALAADPEVIARIAAGVAEGNAKLSRVEQIKRFRILPTLWEPGGDEITLTMKLKRRRIAAKYSAEIEELYASELRPQVYEPAAVPSTQPA

SEQ ID NO: 37478 - protein, 141 aa, Zea mays
MMASPPTPSTVSTTVTTSPSSTGGSELGPDPQLAAERKRKRKESNRLSAQRSRARKQRQLDDLTAQVAALRARNGAMDAAARDAARRCVAVQAENAMLHARTVELSARLQSLVDLIQCMQAGDAMYQYQQLPLDATIYNYY

SEQ ID NO: 37479 - protein, 333 aa, Prochlorococcus marinus str. MIT 9312
MKSILEQLSSMTVVVADTGDLDSIKKFQPRDATTNPSLILAAAKNPDYVKLIDKAIESSENTLPNGFSEIELIKETVDQVSVFFGKEILKIISGRVSTEVDARLSFDTEATVKKARKLINLYKNFGIEKERILIKIAATWEGIKAAEILEKEGIKCNLTLLFNFCQAVTCANANITLISPFVGRILDWHKAKTGKTSFIGAEDPGVISVTQIYKYFKEKGFKTEVMGASFRNLDEIKELAGCDLLTIAPKFLEELKREKGVLIRKLDASTKINNSIDYKFEEKDFRLSMLEDQMASEKLSEGITGFSKAIEELEELLIERLSEMKNHKLISAN

SEQ ID NO: 37480 - protein, 540 aa, Arabidopsis thaliana
MDSLRFLRILLLSSSILLLSLRSTVTAGDIVHQDNLAPKKPGCENDFVLVKVQTWIDGVENEEFVGVGARFGKRIVSKEKNANQTHLVFANPRDSCTPLKNKLSGDVVIVERGNCRFTAKANNAEAAGASALLIINNQKELYKMVCEPDETDLDIQIPAVMLPQDAGASLQKMLANSSKVSAQLYSPRRPAVDVAEVFLWLMAIGTILCASYWSAWSAREAAIEHDKLLKDAIDEIPNTNDGGSGVVEINSISAIFFVVLASGFLVILYKLMSYWFVELLVVVFCIGGVEGLQTCLVALLSRWFQRAADTYVKVPFLGPISYLTLAVSPFCIVFAVLWAVYRVHSFAWIGQDVLGIALIITVLQIVHVPNLKVGTVLLSCAFLYDIFWVFVSKKLFHESVMIVVARGDKSGEDGIPMLLKIPRMFDPWGGYSIIGFGDILLPGLLIAFALRYDWLANKTLRTGYFIWAMVAYGLGLLITYVALNLMDGHGQPALLYIVPFTLGTMLTLARKRDDLWILWTKGEPERACPHHVRLEQCSEK

SEQ ID NO: 37481 - protein, 245 aa, Antirrhinum majus
WVLVQFGAFIVLCGATHFISLWTFQLHTRTVAVVMTTAKICTAVVSCATALMLVHIIPDLLSVKTRELFLKNKAAELDREMGLIRTQEETGRHVRMLTHEIRSTLDRHTILKTTLVELGRTLGLEECALWMPTRTGLELQLSYTLRHQNPVGFTVPIQLPVINQVFNTNNAVKISPNSPVARLRPAGKYMPGEVVAVRVPLLHLSNFQIHDWPELSTRRYALMVLMLPSDSARQWHMHELELVEV

SEQ ID NO: 37482 - protein, 445 aa, Vibrio sp. Ex25
MRSTWSEQSKEDNPMTKSSELYQKAQQTIPGGVNSPVRAFNGVGGSPLFIERADGPLIFDADGKAYIDYVGSWGPMILGHNHAVIREAVIDAAQRGLSFGAPTELEIAMAELVSELVPSMEQIRMVSSGTEATMSAIRLARGFTGRDKIMKFEGCYHGHADSLLVKAGSGALTLGQPSSPGVPADFAKHTLTATFNDLDSVRELFAANKGEIACIIVEPVAGNMNCIPPVEGFHEGLREICDQEGALLIFDEVMTGFRVALGGAQAHYNIKPDLTTLGKVIGGGMPVGAFGGRKEVMQYVAPTGPVYQAGTLSGNPVAMAAGYACLNLLKEEGNEKRLASKTKQLADGFKSLAEKHGIPLVVNQVGGMFGFFFTDQEKVTCYEDVTKCDVERFKRFFHLMLKHGVYLAPSAFEASFTSLAHGSKEIDATLEAADRCFATLAEEAK

SEQ ID NO: 37483 - protein, 450 aa, Glycine max
GNPRLNLASFVTTWMEPECDKLIMAAINKNYVDMDEYPVTTELQNRCVNMIAHLFNAPLEETEAAVGVGTVGSSEAIMLAGLAFKRKWQNRRKQEGKPYDKPNIVTGANVQVCWEKFARYFEVELKEVKLRDDYYVMDPEKAVELVDENTICVAAILGSTLNGEFEDVKRLNDLLIEKNKITGWDTPIHVDAASGGFIAPFIYPELEWDFRLQLVKSINVSGHKYGLVYAGIGWVIWRSKQDLPEELIFHINYLGADQPTFTLNFSKGSSQVIAQYYQLIRLGFEGYRNVMENCRDNMLVLKEGLEKTGRFSIVSKDNGVPLVAFTLKDHTHFDEFQISDFLRRFGWIVPAYTMPPDAQHVTVLRVVIREDFSRTLAERLVSDVEKVLHELDSLPARVISSTTVTLSAEENGKVVVAKKNPMETQREITAIWKKFVLERKKNNDKMNGVC

SEQ ID NO: 37484 - protein, 351 aa, Pseudomonas aeruginosa UCBPP-PA14
MFPKNAWYVACTPDELAGKPLGRRICDEPMVFYRGEDGRVAALEDFCPHRGAPLSLGFVEDGVLVCGYHGLAMGEDGRTRAMPGQRVRGFPCIRRFPVQERHGFVWVWPGAEEQADAALIPRLEWAESPDWAYGGGLYHIHCDYRLMIDNLMDLTHETYVHASSIGQKEIDEAAPTTRVEGDEVITSRHMQNVMAPPFWRMALRGNGLADDVAVDRWQICRFTPPSHVLIEVGVAHAGHGGYQAPAERKAASIVVDFITPESATSIWYFWGMARNFQAHDQALTESIREGQGKIFGEDLEMLESQQRNLLRHPRRDLLKLNIDAGGVQARRIIERLLADERQAAAPNRAQA

SEQ ID NO: 37485 - protein, 440 aa, Zea mays
MSTTKVKRRVGKYELGRTIGEGTFAKVRFARDTVTGEAVAIKILDKEKVLRHKMVEQIKREISTMKLIKHPNVVRIYEVMGSKTKIYIVLEFATGGELFDTIVNHGRMREDEARRYFQQLINAVDYCHSRGVYHRDLKPENLLLDSYGNLKVSDFGLSALSQQIKDDGLLHTTCGTPNYVAPEVLEDQGYDGAMADLWSCGVILFVLLAGYLPFEDSNLMTLYKKISNAEFTFPPWTSFPAKRLLTRILDPNPMTRITIPEILEDEWFKKGYKRPEFDEQYDTTLDDVDAVFNDSEEHHVTEKKEEEPVALNAFELISMSAGLNLGNLFDSEQEFKRETRFTSKCPPKEIVRKIEEAAKPLGFDVQKKNYKLRLEKVKAGRKGNLNVATEILQVAPSLHMVEVRKAKGDTLEFHKFYKNLSKTLKDVVWKSDDLQTQHAS

SEQ ID NO: 37486 - protein, 360 aa, Escherichia coli
MSQNTLKVHDLNEDAEFDENGVEVFDEKALVEEEPSDNDLAEEELLSQGATQRVLDATQLYLGEIGYSPLLTAEEEVYFARRALRGDVASRRRMIESNLRLVVKIARRYGNRGLALLDLIEEGNLGLIRAVEKFDPERGFRFSTYATWWIRQTIERAIMNQTRTIRLPIHIVKELNVYLRTARELSHKLDHEPSAEEIAEQLDKPVDDVSRMLRLNERITSVDTPLGGDSEKALLDILADEKENGPEDTTQDDDMKQSIVKWLFELNAKQREVLARRFGLLGYEAATLEDVGREIGLTRERVRQIQVEGLRRLREILQTQGLNIEALFRESICQKGQSQARLAFFFWLGSRCVCGLDKPR

SEQ ID NO: 37487 - protein, 277 aa, Arabidopsis thaliana
METLHPLLSHVPTSDHRFVVQEMMCLQSSSWTKEENKKFERALAVYADDTPDRWFKVAAMIPGKTISDVMRQYSKLEEDLFDIEAGLVPIPGYRSVTPCGFDQVVSPRDFDAYRKLPNGARGFDQDRRKGVPWTEEEHRRFLLGLLKYGKGDWRNISRNFVGSKTPTQVASHAQKYYQRQLSGAKDKRRPSIHDITTVNLLNANLSRPSSDHGCLVSKQAEPKLGFTDRDNAEEGVMFLGQNLSSVFSSYDPAIKFSGANVYGEGGYCISQDLETRK

SEQ ID NO: 37488 - protein, 465 aa, uncultured bacterium 105
MVTKETKAHSHTATSYTSDVLASVLERNTAEPEFHQAVEEVFTSLGPVLERRSDYRNARILERIVEPERVIMFRIPWQDDQGGIHVNRGFRIEMNSAIGPYKGGLRFHPSVNLGILKFLAFEQVFKNALTTLPMGGGKGGSDFDPKGKSDSEVMRFCQSFMTELARHIGPNTDIPAGDIGVGGREIGYMFGQYKRLRNEFTGVITGKGLNWGGSLIRPEATGYGSVYFAAEMLATKGKSLEDKVCLVSGSGNVAQYTVEKLIQLGAKVVTLSDSSGYVYDEAGIDKEKLEFIFDLKNVRRGRIKEYADKYKNVEYTASNPALDHNPLWNHQAQCAFPSATQNEINEKDAMAMLKNGVELVSEGANMPVTINGINQFLDAGIFYGPGKAANAGGVATSGLEMTQNAQRLVWTRAQVDERLQHIMKAVHKACYETAEHFGMPNNYLVGANIAGFVKVADSMLDQGIV

SEQ ID NO: 37489 - protein, 381 aa, Glycine max
MQIFVKTLTGKTITLEVESSDTIDNVKAKIQDKEGIPPDQQRLIFAGKQLEDGRTLADYNIQKESTLHLVLRLRGGMQIFVKTLTGKTITLEVESSDTIDNVKAKIQDKEGIPPDQQRLIFAGKQLEDGRTLADYNIQKESTLHLVLRLRGGMQIFVKTLTGKTITLEVESSDTIDNVKAKIQDKEGIPPDQQRLIFAGKQLEDGRTLADYNIQKESTLHLVLRLRGGMQIFVKTLTGKTITLEVESSDTIDNVKAKIQDKEGIPPDQQRLIFAGKQLEDGRTLADYNIQKESTLHLVLRLRGGMQIFVKTLTGKTITLEVESSDTIDNVKAKIQDKEGIPPDQQRLIFAGKQLEDGRTLADYNIQKESTLHLVLRLRGGC

SEQ ID NO: 37490 - protein, 332 aa, Prochlorococcus marinus str. MIT 9312
MKKKKVICIGEALIDRIRNKSNQGFTDFLGGAPANVACALRKLKIDSTFIGSLGSDDYGKKFITQFSELDVNLDFLQLDNDSSTRVVNVDRDQFGDRFFSGFEESSHSCFADEVLSKKLIEKEILNLEKSLLETQYLVTGTILLSSPISAETIFFLLEQAKKFEVKIVIDLNWREVFWDHSSFSSEISKSAKVKLIKNFLNNANVLKLAKEEATLFFEDENPFRISQQLSNRPDVIITDGKNPVAWYINGLQGITETPTSQKIVDTTGAGDAFLAGLISKLISSGYPSNELEIEDCIKFAGVCGLLTCLGEGAIEQQPYYEKVKKFLGSLIS

SEQ ID NO: 37491 - protein, 438 aa, Cytophaga hutchinsonii
MSQSILETLETPVERRHFLFRSTQTVLSVALLGGVASYGADASGTIASHDALTSTGPENDITLPPLDAKTEQDKGPLPNPHPVDQRIGYAIVGLGHLALEEVLPAFGACKKSKVVALVSGDKKKALIVAKQYGVSEKNIYDYENFDSIKNNKQVDVVYIILPNGQHAEFTIRAAKAGKHVLCEKPMANSVAECEQMIKACEEANRKLMIAYRVQYEPNNTEIKKLVREQKYGKVTNIVSVNSQNIGDPKQWRLNKKLAGGGSLPDVGIYCLNTIRFLTGEEPTEVYAQISTDTSDPRFKEVEDMVNFQLTFPGGVRAMCSTSYSQHQSRNYRVYAERAFFGMDPAFSYGGLQMYRSFADEDAEIYETPKRMPKNQFALEMDHLADCIRQNKKPYTPGEEGLQDMKIIEAIYLSARQNKPVSLEKLEGKDLFRGPEPQK

SEQ ID NO: 37492 - protein, 304 aa, Prochlorococcus marinus str. MIT 9312
MSLNKSETWKWKNWEISWSLSKESTSEKNIKILLVHGFGASKNHWRHNQDFLGKFSNCFAIDLLGFGESSQPSALLNYEPYKENSIKYSFDLWSDQISTFCSEVIKSPVYLVGNSIGGVIALKAAEILKDNCKGVILIDCAQRTMDDKRLKKSDVLMNLLRPVLKTLVRQRIISNTLFMRAANPKVIKQILRKAYPSGKNIDEELIEILYQPSKRKNSKEAFRGFINLFDDYLAPDLFDKVDTPIQLIWGEKDPWESLNEAKEWEKKFRNIKRLDIIKDAGHCPHDEKPEETNKLICEFLQETK

SEQ ID NO: 37493 - protein, 560 aa, Photobacterium profundum SS9
MMTEHNEWWRTATIYQIYPKSFCDSGCQGTGDIKGIISKLGYLQKLGIDAIWLTPIYCSPMIDNGYDISDYYNVNPDFGTMNDFDLLLDEAHQKGIRIVMDIVVNHTSTEHAWFKSALGNKQSPYRDYYIWKDPVDGAEPTNWASKFGGNAWALDEATNQYYLHLFAKEQADLNWENPKVRDEVKEVISFWAEKGVDGFRLDVINLISKQQDFPNDHIGDGRCFYTDGPHVHEYLRDISESVFQKYGSVTVGEMSSTTLEHCQQYSANDGKELSMVFNFHHLKADYENGEKWTKAPFDFLQLKQIFNHWQQGLNGKGWGALFWCNHDQPRVVSRLGDDQQYRVESAKMLATSIHMMQGTPYIYQGEEIGMTNPAYTSIEQYRDVESTNMYDIMVNQQGVSEADMLAILAQKSRDNARTPMQWDATEQAGFTQGKPWLAVAENYHEINAQQAVEDPNSVFYFYRKLIELRKEIAVITTGDYSDLMPDNMQLFCYRRESEQQLLVCINNYYGTDIECDLPSDIDTTQGRYILGNYEGYQDRTASQTVRLKPYECLVLLIDKV

SEQ ID NO: 37494 - protein, 344 aa, Prochlorococcus marinus str. MIT 9312
MVLFTKQHSIFMSSETLSENKLATISSLKASNDVDLVRSYLRDIGRVPLLSHEQEITLGRQVQEYMQVERAELEIIELTGDKPSIEELSSKLNLSIPIIKKRLRAGQRAKERMVAANLRLVVSVAKKYTKRNMELLDLIQEGTIGLVRGVEKFDPARGYKFSTYAYWWIRQGITRAIAEKSRAIRLPIHITEMLNKLKKGQRELSQEMSRTPTVSELAKYVELPEEDVKDLMCKAGQPVSLETKVGDGEDTVLLDLLAGGEDLPDEQIEMDCMRGDLHSLLHQLPDLQCRVLRMRYGMDGDEPMSLTGIGRVLGISRDRVRNLERDGLRGLRRLSDNVEAYFVS

SEQ ID NO: 37495 - protein, 431 aa, Clarkia concinna
MNVTMQSKKLLKPSIPTPTHLQKLNLSLLDQIQIPFYVGLIFHYETLSDNSHITLSKLESSLSETLTLYYHVAGRYNGTDCVIECNDQGIGYVETAFDVELHQFLLGEESNNLELLVGLSGFLSETETPPLAAIQLNMFKCGGLVIGAQFNHIIGDMFTMSTFMNSWAKACRVGIKEVAHPTFGLAPLMPSAKVLNIPPPPSLEGVKFVSKRFVFNENAITRLRKEATEEDGDVQKKKKRPSRVDLVTAFLSKTLIEMDCAKKEQTKSRPSLMVHMMNLRKRTKLPLENDVSVNFFTVVNVESKITVAPKITDLTESLGSARGEIISEVAKVDDAEVVSSMVLNSVREFYYEWGKGEKNVLVYTSWCRFPLYEVDFGWGIPSLVDTTAVPFRLIVLMDQGPTGDGIAVRACLSEHDMIQFQQHHQLLSYVS

SEQ ID NO: 37496 - protein, 471 aa, Psychrobacter arcticus 273-4
MSQHSSLPNDSLIDQAMNSTINSPTANTPATAQTKKRHKPPHFERTDDMRVVVTGMGAVTPLGLDVESSWAKLLKGESGITAISHFDASGYRAQIAGVVKDFDAKQYMNAKDARRYDEFIHYAVAASSMALHQAGFIEEVSAADAPVQGVDQERFGVIIGSGIGGIQNIENSRDTLREKGSSKVSPFIIPGSIVNMAAGLVAIKHCLKGPNLATSTACTTATHAIGLAARLIAYGDADVILAGGSEKGSSPLGISGFGAMHALSTRNDEPTRASRPFDKDRDGFVLGDGAGVMILESLAHAKARGATILAELVGFGMSDDASHITAPPEDGSGAARAMRNALNDAGIEPSVVGYVNAHGTSTPAGDVAESIAIETVFSPVKDTILVSSTKSMTGHLLGAAGGVEAIFTVLALQHQQVPPTINLDNIEDNCNLDYVANQSRQVDNLQYAVSNSFGFGGTNGSLIFARWPVNQ

SEQ ID NO: 37497 - protein, 460 aa, Bacillus licheniformis ATCC 14580
MTEDVTDNDIHEQKLSRGLKNRHIQLIAIGGAIGTGLFLGSGKSIHFAGPSILFAYLITGIICFFIMRSLGELLLSNLEYHSFVDFVRDYLGDMAAFITGWTYWFCWISLAMADLTAVGLYTQYWLPDVPQWLPGLIALIILLIMNLATVKLFGELEFWFALIKVIAILALIAIGLFMIFKGFSTHSGTAAFHNLWSHGGMFPNGLHGFLLSFQMVVFAFVGIELVGLTAGETKDPEKVIPKAINNIPVRVLLFYIGALLVIMSIYPWNVINPNESPFVQVFAAVGIIAAASIINFVVLTSAASASNSAVFSTSRMIYSLAKEHNAPGAMTKLTSRKVPGNALFFSAVVILIGIMLNYIMPEQVFTLITSISTICFIFIWGITVICHLKYRRTRPDLAKRNKFKMPLYPFSNYVVLGFLAFILIVLALAQDTRVSLFVTPVWFIMLIAIYKLRKPKSRQV

SEQ ID NO: 37498 - protein, 516 aa, Juglans regia
MEVESANKDMRAAQRSTLIRIVLVASIAAGVQFGWALQLSLLTPYVQLLGIPHTWAAFIWLCGPISGMLVQPIVGYYSDRCTSRFGRRRPFIAVGACFVAMAVFLIGYAADLGHLCGDHVDKPTRPRAIAFFVVGFWVLDVSNNMLQGPCRALLADLSGNDQKKMRTSNALFSFFMAVGNVLGYAAGSYTRFYKIFPFTKTKACDVYCANLKSCFFLSIALLSTVTILALTSVKERALSSQPKPENAAGEDEERVTESAGLPFFGEMWSAFKGLQRPMRILLLVTCLNWIAWFPFLLFDTDWMGKEVYGGTVERSGGKIVRSGVRAGALGLMLNSVVWGFTSLGVNVISRGIGGVKRLWGIVNFLLALCMAMTVLITKLAESARHTAAANGGATLSPPPAGVKAGALALFAVLGIPLAVTYSIPFALASIFSHASGAGQGLSLGVLNLAIVFPQMLVSVASGPFDALFGGGNLPAFVVGAISAAASGILSLTMLPFPTTDLLCFLKMQYPQFPAFH

SEQ ID NO: 37499 - protein, 462 aa, Vibrio vulnificus YJ016
MPNQHQYFGHPRGLFLLFGTELWERFSYYAMRAILVLYLTDTTINGGLGWTTKDALDLYGTYTGLVYITPLIGGYLADNYLGQRRSILIGGALMAIGQFTLALPADALGLGSLHTFYLGLALLIAGNGLFKPNISTMVGDLYQEGDNRRDGAFTIFYMGINLGALIAGVVSGSVTTEFGWKAGFVAAGIGMLISLVMQMSLAQSWLGDIGREPAAKRDLAIKKSAQKQALTKEEVDRIKVILVMSLFTIVFWAGFEQAGGLMNIYTQQYTDRMIGSFEIPAAWFQSLNPFFIITLAPVLAVLWVKLGKREPNSPVKFALAMFFLALGFLCMVGAVVEQSGDTSVKTSMLWLVGAFFFHTLGELCLSPIGLSLVTKLAPLRLASLMMGAWFGCNAIANYVAGYVGSHVGELGAFAIFSGIAVTATVSGVILLLFSNQLVHWMHGAESGSSTAEQIEEQQALVS

SEQ ID NO: 37500 - protein, 316 aa, Methanocaldococcus jannaschii DSM 2661
MVKLSGVYKGMRKGYGETLIELGKKYENLVVLDADLSGSTQTAMFAKEFPERFFNAGVAEQNMIGMAAGLATTGKIVFASSFSMFASGRAWEIIRNLVAYPKLNVKIVATHAGITVGEDGASHQMCEDIAIMRAIPNMVVIAPTDYYHTKNVIRTIAEYKGPVYVRMPRRDTEIIYENEEEATFEIGKGKILVDGEDLTIIATGEEVPEALRAGEILKENGISAEIVEMATIKPIDEEIIKKSKDFVVTVEDHSIIGGLGGAVAEVIASNGLNKKLLRIGINDVFGRSGKADELLKYYGLDGESIAKRIMEEMKKE

SEQ ID NO: 37501 - protein, 446 aa, Lactobacillus sakei subsp. sakei 23K
MADFQSDSARTIEPAPKLSHIKAAILGLQHLLAMYSGDVLIPLLVGAALHFNAAQMTYLVSVDIFMCGIATLLQLKRTPLTGIALPVVLGCAVEYVGPLTAIGTNSQLGIDVMYGSIIGAGVFILLISGVVARLRWLFPPIVTGSLITLIGFTLIPVAFQNLGGGDITAKSFGSVPNLIAGFSTIVLILIFSIWGRGFIQQIAILIGIIGGTLVGAAVGLVSLDPVGQASWFKLPELFYFGTPRFEWTSIASMSLAALTTMIESIGVFFALGEIVGRNITSNDLKRGFRAEGLAAILGGLFNTFPYSTFSQNVGIVQLSGIKTKKPVYYSAFFLIFLGLLPKIGAVATIIPTSVLGGAMVVMFGIVGIQGIKMLHKVDLEDNRNLLVATLSIGMGLGIAIHPTLLQALPASVQTILGNGLVVGSLTAVILNLLVNYRSLIEAKHQQ

SEQ ID NO: 37502 - protein, 680 aa, Zea mays
NSARGAAVETLQGKAATGELLEKSVNTIRFLAIDAVEKANSGHPGLPMGCAPMGHVLYDEVMRYNPKNPYWFNRDRFVLSAGHGCMLQYALLHLAGYDSVKEEDLKQFRQWGSRTPGHPENFETPGVEVTTGPLGQGIANAVGLALAEKHLAARFNKPDSEIVDHYTYVILGDGCQMEGIANEACSLAGHWGLGKLIAFYDDNHISIDGDTEIAFTEDVSTRFEALGWHTIWVKNGNTGYDDIRAAIKEAKAVTDKPTLIKVTTTIGFGSPNKANSYSVHGSALGAKEVEATRQNLGWPYDTFFVPEDVKSHWSRHTPEGAALEADWNAKFAEYEKKYADDAATLKSIITGELPTGWVDALPKYTPESPGDATRNLSQQCLNALANVVPGLIGGSADLASSNMTLLKMFGDFQKDTAEERNVRFGVREHGMGAICNGIALHSPGFVPYCATFFVFTDYMRGAMRISALSEAGVIYVMTHDSIGLGEDGPTHQPIEHLVSFRAMPNILMLRPADGNETAGAYKVAVLNRKRPSILALSRQKLPHLPGTSIEGVEKGGYTISDNSTGNKPDLIVMGTGSELEIAAKAADELRKEGKTVRVVSFVSWELFDEQSDEYKESVLPAAVTARISIEAGSTLGWQKYVGAQGKAIGIDKFGASAPAGTIYKEYGITVESIIAAAKSF

SEQ ID NO: 37503 - protein, 331 aa, Listeria monocytogenes str. 4b H7858
MTLKEAGLTEDKLIKMYETMLMARRLDERMWLLNRSGKIPFTISGQGQETAQIGAAFAFDLDKDYALPYYRDLAVVLAFGMTAKDIMLSAFAKAEDPNSGGRQMPAHFGQKSNRIVTQSSPVTTQFPHAAGIGLAAKMAGDEIAIYASTGEGSSNQGDFHEGINFASVHKLPVVFVIHNNQYAISVPASKQYAAEKLSDRAIGYGIPGERVDGTNMGEVYAAFKRAADCARNGEGPTLIETVSYRFTPHSSDDDDSSYRSREEVDEAKGKDPLKIFQAELLEEGYLTEEKIAEIEKSIAKEVNEATDYAESAAYAEPESSLLYVYDEEANS

SEQ ID NO: 37504 - protein, 172 aa, Ashbya gossypii ATCC 10895
MDDIRYNFLETLDHLPCEVIRTLWTVQGLELQGARGEAAVNEARHLQALVRQHIRRLEWQRAELKELAGVAERYSAHVRAQRAGREAPQPQLKIRISLKRSRLEAKQGAARAGDDEARYCFCGDVSYGRMVACDNSRCPHEWFHYGCVGLAAAPAANARWFCSERCRRQARR

SEQ ID NO: 37505 - protein, 274 aa, Methanocaldococcus jannaschii DSM 2661
MDNNLEIKDLEKIAKKVRYNIVKMVGLAKSGHPGGSLSATDIIVALYFKLMNYSPDNPYKKDRDRFVLSKGHAAPALYAVLSELGIIEEEELWKLRRLEGKLQGHPSMDTPGVEICTGSLGQGFSAAVGMALGCRLDKLNNYVYVLLGDGECQEGIVWEAAMAAAHYKLDNLIAFIDRNKLQIDGCTEDVMSLGDIKAKFEAFGWDVFEIDGHNFEEIINTVEKAKSMKNGKPKMIIAYTVKGKGVSFMENNVAFHGKAPNEEQLKQALEELSE

SEQ ID NO: 37506 - protein, 336 aa, Candida albicans SC5314
MKTKTTSSVTKVKSIRSSASASVATSTSTSPINPIWYILILIYLFGCFLLFLSAIGIQPHTITLPQFKFSNIPSASFIMSATAPFKTLSAKAAFQLDQELMSTGEFSIDQLMELAGLAVAKTIYKEYPPNEATTTTKNKFNPNKVLVLVGPGNNGGDGLVAARHLKLWNYDPIIYYPKRPASNQLYSRLIKQLQDLNVPELTTLTEVKHLLDSRDSKIKIIIDSIFGFSFKPPIREPFKDLINYLGQNHDHLPPIVSVDIPSGWDVDEGPGTEIDIQASCLISLTAPKPCAKLFVNSGPDKIHYLGGRFINPRIAKEYGIEDIVNKYQGDELIVKL

SEQ ID NO: 37507 - protein, 883 aa, Escherichia coli K12; identical to SEQ ID NO: 763

SEQ ID NO: 37508 - protein, 461 aa, Yersinia pestis CO92
MSTQSAELDTAPPSPAHPSELIYHLEDRPPLPQTLFAACQHLLAMFVAVITPGLLICQALGLPAEDTQRIISMSLFASGLASLLQIKTWGPVGSGLLSIQGTSFNFVSPLIMGGLALKNGGADIPTMMAALFGTLMVASCTEILLSHVLHLARRIITPLVSGIVVMIIGLSLIQVGLTSIGGGYGAMSDNTFGAPKNLLLAGAVLGVIILLNRQRNPYLRVASLVIAMAVGYLLAWALGMLPESRPVVDTALITIPTPLYYGLSFDWNLLIPLMLIFMVTSLETIGDITATSDVSEQPVRGPLYMKRLKGGVLANGLNSMLSAIFNTFPNSCFGQNNGVIQLTGVASRYVGFVVAIMLIILGLFPAVAGFVQHIPEPVLGGATLVMFGTIAASGVRIVSRETLNRRAIMIMALSLAVGMGVAQQPLILQFAPDWIKTLFSSGIAAGGITAIVLNLLFPQEK

SEQ ID NO: 37509 - protein, 770 aa, Arabidopsis thaliana
  misc_feature (231)..(231): Xaa can be any naturally occurring amino acid
  unsure (1)..(770): unsure at all Xaa locations
MESSEEDDEYPFIESITPQSKIDSVHQSLTEKGIRKLCCELMDLKDAVENMCGDMRTKYLAFLRISEEAVEMEHELVELRKHISSQGILVQDLMAGVCREMDDWNRLPGDVHDAEVEEDPLPNEVTDPKSEFLEKIDLLLAEHKVDEALEAMDAEERSSPDLKGSVEMSSYKSAFMERKAVLEDQLLRIAKQPSICVAELKHALIGLIRLGKGPSAHQLLLKFYATSLRRXRIEAFLPSCLTCPNTFPATLSKLVFSNISVATKESAAMFGDDDNPAYSNKVVQWAEREVEYLVRLVKENASPSETASALRAASICLQDCLNYCKVLEPQGLFLSKLFLVLFRPYVEEVLELNFRRARRVIFDLNETDEGLESPSDFVTILSEFAIASDTMMTDCSIRFMQIVQDILEQLTHLVVLHFGESVLTRILQLYDKYIDFLIKALPGHSDEDGLPELQDNTVLARAETDSEQLALLGAAFTILDELLPRSLVKVWKLQIENGGGEGENSAALNSSAAPELKEWKRHMVQAFDKLRNYFCLQFVLSFIYSREGLTRLDALIYLTETPDDLHLPSLPFQALFSKLQQLAIIAGDVLLGKEKLQKILLARLTETVIIWLSNEQEFWSAFEDESNPLQPSGLQQLILGMNFTVEIARFAGYPFKVVQNHASVVINRAINIFSERGINPQSSLPKTEWFTEAAKSAINRLLMGSEDASEPEEYECEEEEEDDHHIVLPEMDDDSDSEDTSSLSTVDSFESFASASMADLESPSFTDSES

SEQ ID NO: 37510 - protein, 381 aa, Trichodesmium erythraeum IMS101
MKVLVTGIGLTSSLGNLFQSWEKLLDGKSAIRLVKPFAELPPLPLGLINSQPVDLTNLIKQTVETAVKSSGLKLPLPECGVVIGSSRAYQRMLENLAKKQFVDDGQDHSQKDYGSFINFWPHQPAILTASQIGTKGTVLSPMAACATGILAIARGFELIQTGQCQQVIAGAVESPITPLTIAGFRKMGALAQIGAYPFDRAREGFVLGEGAAILLLESANFAKKRSAKVYGQIRSFGLTNDGIHSVIPDLSGKSAMLAIARSLARSGLAPEEIDYVHAHGTATKLNDRHEANLIQQIFPHKVAVSSTKGATGHTLGASGALGAAFCLMAVKHQVLPPCVGLNSPEFDLDLVRYARQSQVKNVLCLSFGFGGQNAALVLSKV

SEQ ID NO: 37511 - protein, 485 aa, Saccharomyces cerevisiae
MVHLGPKKPQARKGSMADVPKELMDEIHQLEDMFTVDSETLRKVVKHFIDELNKGLTKKGGNIPMIPGWVMEFPTGKESGNYLAIDLGGTNLRVVLVKLSGNHTFDTTQSKYKLPHDMRTTKHQEELWSFIADSLKDFMVEQELLNTKDTLPLGFTFSYPASQNKINEGILQRWTKGFDIPNVEGHDVVPLLQNEISKRELPIEIVALINDTVGTLIASYYTDPETKMGVIFGTGVNGAFYDVVSDIEKLEGKLADDIPSNSPMAINCEYGSFDNEHLVLPRTKYDVAVDEQSPRPGQQAFEKMTSGYYLGELLRLVLLELNEKGLMLKDQDLSKLKQPYIMDTSYPARIEDDPFENLEDTDDIFQKDFGVKTTLPERKLIRRLCELIGTRAARLAVCGIAAICQKRGYKTGHIAADGSVYNKYPGFKEAAAKGLRDIYGWTGDASKDPITIVPAEDGSGAGAAVIAALSEKRIAEGKSLGIIGA

SEQ ID NO: 37512 - protein, 494 aa, Geobacillus stearothermophilus
MKRKTKIVCTIGPASESVDKLVQLMEAGMNVARLNFSHGDHEEHGRRIANIREAAKRTGRTVAILLDTKGPEIRTHNMENGAIELKEGSKLVISMSEVLGTPEKISVTYPSLIDDVSVGAKILLDDGLISLEVNAVDKQAGEIVTTVLNGGVLKNKKGVNVPGVKVNLPGITEKDRADILFGIRQGIDFIAASFVRRASDVLEIRELLEAHDALHIQIIAKIENEEGVANIDEILEAADGLMVARGDLGVEIPAEEVPLIQKLLIKKCNMLGKPVITATQMLDSMQRNPRPTRAEASDVANAIFDGTDAVMLSGETAAGQYPVEAVKTMHQIALRTEQALEHRDILSQRTKESQTTITDAIGQSVAHTALNLDVAAIVTPTVSGKTPQMVAKYRPKAPIIAVTSNEAVSRRLALVWGVYTKEAPHVNTTDEMLDVAVDAAVRSGLVKHGDLVVITAGVPVGETGSTNLMKVHVISDLLAKGQGIGASRRSARPL

SEQ ID NO: 37513 - protein, 334 aa, Arabidopsis thaliana; identical to SEQ ID NO: 752

SEQ ID NO: 37514 - protein, 133 aa, Cucumis sativus
TTSADDRQFLNMLLKLINAKKTMEIGVYTGYSLLAPALALPEDGTILAMDINRENYELGLPVIEKAGVAHKIEFKEGPALPVLDDMVADKKNHGSYDFIFVDADKDNYINYHKRLIDLVKVGGVIGYDNTFWK

SEQ ID NO: 37515 - protein, 467 aa, Glycine max
  misc_feature (159)..(159): Xaa can be any naturally occurring amino acid
  unsure (1)..(467): unsure at all Xaa locations
MASSFLSAASHAVSPSCSLSTTHKGKPMLGGNTLRFHKGPNSFSSSRSRGRISMAVAVNVSRFEGIPMAPPDPILGVSEAFKADNSDVKLNLGVGAYRTEELQPYVLNVVKKAENLMLERGDNKEYLPIEGLAAFNKATAELLLGADNPAIKQQRLHPXVATVQGLSGTGSLRLGAALIERYFPGAKVLISAPTWGNHKNIFNDASVPWSEYRYYDPKTVGLDFEGMIEDIKSAPEGSFILLHGCAHNPTGIDPTPEQWEKIADLIEEKNHIPFFDVAYQGFASGSLDEDAASVRLFVARGIEVLVAQSYSKNLGLYAERIGAINVISSSPESAARVKSQLKRIARPMYSNPPVHGARIVADVVGNPVLFNEWKAEMEMMAGRIKNVRQQLYDSITSKDKSGKDWSFILKQIGMFSFTGLNKNQSDNMTNKWHVYMTKDGRISLAGLSLAKCEYLADAIIDSYHNVS

SEQ ID NO: 37516 - protein, 432 aa, Oryza sativa
MAMSSSRSAAAIRGRRVGALARARRHATRAMASLFGHVEPASKDPILGVTEAFLADPSPDKVNVGVGAYRDDNGKPVVLECVREAERRIAGNLNMEYLPMGGSIKMIEESLKLAYGEDSDFIKDKRIAAVQALSGTGACRLFADFQRRFLPNSQIYIPTPTWSNHHNIWRDAQVPQRTFTYYHPESRGLDFAGLMDDIKNAPNGSFFLLHACAHNPTGVDPTEEQWREISYQFKIKNHFPFFDMAYQGFASGDPERDAKAIRIFLEDGHQIGCAQSYAKNMGLYGQRAGCLSILCEDEMQAVSVKSQLQQIARPMYSNPPVHGALVVSIILNDPELKSLWLKEVKGMADRIIGMRKALRENLEGLGSPLSWDHITNQIGMFCYSGMTPEQVVRLTNEYHIYMTRNGRISMAGVTTGNVAYLANAIHEVTKTK

SEQ ID NO: 37517 - protein, 345 aa, Thermoplasma acidophilum DSM 1728
METVAVKLTGTKFFDTGLSTGTYFLFETAFASVTLALVSVVVLRKMKMSAFMLFSIIYFIFIWTIPAAWIWNPTGWLYKLGVRDFAGGLVVHVASGFAALAIMVRIWQEEKKMGLKESKKENLNLNSGWLTLSIILLWVGWFGFNPGSELAFTTETVIVVITTFLAAASAMVSTMLTKFLVSKQDPGLIYAVNGVLMGLIVITPLAGYVSPGSAIILGLISGPIFVSAESIFSKHKWYSDPIGVLPGHMVGGIFGLLMIAFFTQTPFADASGASNLPNGILFGGGIMALHQLGLEAMAVVVVGAFVFTVSYASVYAISLLLNGILRDSEYSPARPANRLAKDTGA

SEQ ID NO: 37518 - protein, 385 aa, Cytophaga hutchinsonii
MKAAVFHKPGHISVDTVEDPKIEKSDDIILKVTSTAICGSDLHIYDGFFPQARPLIMGHEFMGIVEEVGNAVTHLKAGDRIVVPFPIACGHCYFCNHDMQPNCEHSNPEHYGPEGDVLSGKGGGLFGYTDLYGGYAGGQAQYVRVPYADYSPRLVPESLSDEQVLFLTDIFPTGWSAIDWAQLKGGETVAIFGSGPVGLMAQKAAWLKGAGRVIAIDPLNYRLAKAKMVNNVETLNPHEVDVIEAIRAMTNGRGADVCVDAVGVEAERTFFDKVKAVVRFEKGTDKVLENCFKAVRRGGTVTVVGVYGTPYDNFPLHTMFDKGLTVRLGQAPVQKYIDHLFTLVQNEKVVLNDIVTHVLPLSHASHAYDIFKNKQEDCVKVILKP

SEQ ID NO: 37519 - protein, 462 aa, Thermobifida fusca YX
MAAKSEAMDTLVSLAKRRGLVYPSSEIYGGLRASWDYGPLGVELKNNVKRQWWRAMVQEREDIVGLDSCVILAREVWEASGHVDAFVDPLTECQSCHKRFRADHLTEAYEAKHGKPPANGLADLNCPHCGAKGAFTEPRMFSGLLRTYVGPVQDESGLAFLRPETAQGIFINYKNVEQSSRRKIPFGIAQIGKSFRNEITPGNFIFRTREFEQMEVEFFVRPGTDEEWHQYWIDTRLQWYIDLGINKDNLRLYEHPKEKLSHYSKRTVDIEYRFNFAGSEWGELEGIANRTDYDLSTHSKRSGTDLSYFDQETNTRFIPYVIEPSAGVDRTMLTFLLDAYTEDEAPNAKGKMEKRVVMRLDPRLAPVKAAVLPLSRNADLSPKARDLAAKLRKRWNVEFDDAGAIGRRYRRQDEIGTPFCVTIDFDTLEDNAVTVRERDSMAQERISIDQVEQYLAERLAGC

SEQ ID NO: 37520 - protein, 265 aa, Zea mays
MGRGRIEIKRIENNTSRQVTFCKRRNGLLKKAYELSVLCDAEVALVVFSSRGRLYEYANNSVKATIERYKKAHAVGSSSGPPLLEHNAQQFYQQESVKLRNQIQMLQNTNRHLVGDSVGNLSLKELKQLESRLEKGISKIRARKSELLAAEINYMAKRETELQNDHMNLRTKIEEGEQQLQQVTVAQSVAAAAATDVELNPFLEMDTKCFFPGGPFATLDMKCFFPGSLQMLEAQQRQMLATELNLGYQLAPPDTDVANNNPQQF

SEQ ID NO: 37521 - protein, 554 aa, Vibrio vulnificus YJ016
MCSVFGILDIKSDAAALRPIALEMSKKLRHRGPDWSGIYASDRAILAHERLAIVGLNSGAQPLYSPDKKLILAVNGEIYNHKEIRARYEGKYDFQTDSDCEVILALYQEMGADLLEELNGIFAFVLYDEEKDQYLVGRDHIGIIPLYQGYDEHGNYYVASEMKALVPVCKTISEFPPGSYYSSTDAGPQRYYIRDWNEYAAVQGNTSSKEELTAALEAAVKRQLMTDVPYGVLLSGGLDSSITSAVAKRYAAMRIEDDEQTEAWWPQLHSFAIGLDGAPDLKAAREVAAKIGTVHHEMTYTIQEGLDAIRDVIYHIETYDVTTIRASTPMYLMGRKIKAMGIKMVLSGEGADEIFGGYLYFHKAPNAQEFHEETVRKLLALNMFDCARANKSLAAWGVEGRVPFLDKEFIDVAMRLNPADKMCGNGKMEKHILRECFEHYLPDSIAWRQKEQFSDGVGYGWIDTLKAVAEEKVTDQQMEAAKFRFPYNTPTTKEGYVYREIFEELFPLPSAAECVPGGPSVACSSAKAIEWDESFKNCIDPSGRAVKAVHNEAY

SEQ ID NO: 37522 - protein, 643 aa, Azoarcus sp. EbN1
MEERLKSVAGLARSVAHQLAALNPARFPLILGGDHAIAIGTWPAIASRVATRGTLGLIWIDAHLDSHTGASTHSGNIHGMPLAAVLGEGDSLLTAIPGPRLDPHNVCIIGARSWEPEEFERLQRLGVTIFDMATIRERGLSAVFSDALGVVRRNTAAFGVTLDLDALDPTSFPAVTCLESGGLAADELSDALLALRACPDFAALEIVEYVPGLDPLGAGAAWIAEFAGAALGPGTALLRAKEQHFGAHNYAPLPVVFHRGQGVWLWDVEGRRYLDMMSAYSAVSFGHGHPRLLRALNDQAQRLALTSRAYSTDRLPLLLERLCTMFGYERALPVNTGLEAVETALKTVRKWAYKVKGVAPDRAGIIACEGNFHGRSIAIVGMSSEAQYRDGFGPFPPGFTLVPYADADALEAAITPDTAAFLVEAVQGEGGIIVPPDGYLARCAEICRRNNVLLVVDEVQTGLGRTGRLLACEHEGVHPDGVILGKALGGGLLPVSAFLADAAVMDVLHPGDHGSTFGGNPLGAAVALEVLDLLEETRPWENAARLGEHLMRRLADGAPPCVKAVRGRGLLVGIELDPRILDAATGAELLLARGIATKDTHHTVLRFAPPLVIDDAVLDGGIDVILDTLATASRRREHGPLHG

SEQ ID NO: 37523 - protein, 509 aa, Azoarcus sp. EbN1
MRLFRLAKIVTVGLRFGLDQMVLDADPSGRLLRLWHVVFFWRRPSAPRGVRLRQALESLGPIFVKFGQMLSTRRDLLPTDLADELALLQDRVPPFPTEQALKVLEDFYGRPVDDVFVDFARTPVASASVAQVHFARLPDGTEVAVKILRPGIERVIEHDLALLETAAMLLDRLWVEGRRLKPREVVAEFSKYLHDELDLMREAANCSQLRRNFKDSLLLVVPEVYWDWCGKSVMVMERMHGVPISQLATLRAQGTDLSRLSRAGVEIFFTQVFRDGFFHADMHPGNIFVHADGRYIALDFGIVGTLTEVDKNYLAQNFLAFFKRDYNRVARAHIEAGWVPAHTRVDEFEGAIRAVCEPIFDRPLKDISFGKTLLRLFQTARRFEMEVQPQLVLLQKTLLNIEGLGRQLDPDLDLWKTAKPFLERWMDERMGWRALLHGVRNEAPAWAGTLPQLPRLMHQALVEPTLHHAVQREQLERLTAAQRFQGRLLAVVALLLTAIVTIELYRGFA

SEQ ID NO: 37524 - protein, 304 aa, Oryza sativa
MATHFTLNTGARIPSVGLGTYKAGTGVVADVVSAAVKAGYRHIDCAPLYKNEQEIGGALKKLFDDGVVKREDLFITSKIWCSDLAPEDVPLAMDSTLKDLQLDYVDLYLIHWPFQIKKGTELSPENFVKPDIPSTWRAMEQLYDSGKARAIGVSNFSSKKLGDLLCVARVPPAVDQVECHPGWQQAKLRAFCHTSGVHLSAYAPLGRMKGIAVDSVLPSVAEMLGRTPAQVALRWGLQQGQSVLPKSVSEARLKENMDLFGWSIPEELCAKLSEIEQVKQIRGDGFAHPESVYKTYEELFDGEI

SEQ ID NO: 37525 - protein, 433 aa, Clarkia breweri
MNVTMHSKKLLKPSIPTPNHLQKLNLSLLDQIQIPFYVGLIFHYETLSDNSDITLSKLESSLSETLTLYYHVAGRYNGTDCVIECNDQGIGYVETAFDVELHQFLLGEESNNLDLLVGLSGFLSETETPPLAAIQLNMFKCGGLVIGAQFNHIIGDMFTMSTFMNSWAKACRVGIKEVAHPTFGLAPLMPSAKVLNIPPPPSFEGVKFVSKRFVFHENALTRLRKEATEEDGDGDDDQKKKRPSRVDLVTAFLSKSLIEMDCAPKELTKSRPSLMVHMMNLRKRTKLALENDVSGNFFIVVNAESKITVAPKITDLTESLGSACGEIISEVAKVDDAEVVSSMVLNSVREFYYEWGKGEKNVFVYSSWCRFPLYEVDFGWGIPSLVDTTAFPFGLIVLMDEAPAGDGIAVRACLSEHDMIQFQQHHQLLSYVS

SEQ ID NO: 37526 - protein, 476 aa, Arabidopsis thaliana
MADHSWDKTVEEAVNVLESRQILRSLRPICMSRQNEEEIVKSRANGGDGYEVFDGLCQWDRTSVEVSVSIPTFQKWLHDEPSNGEEIFSGDALAECRKGRFKKLLLFSGNDYLGLSSHPTISNAAANAVKEYGMGPKGSALICGYTTYHRLLESSLAQLKKKEDCLVCPTGFAANMAAMVAIGSVASLLAASGKPLKNEKVAIFSDALNHASIIDGVRLAERQGNVEVFVYRHCDMYHLNSLLSNCKMKRKVVVTDSLFSMDGDFAPMEELSQLRKKYGFLLVIDDAHGTFVCGENGGGVAEEFNCEADVDLCVGTLSKAAGCHGGFIACSKKWKQLIQSRGRSFIFSTAIPVPMAAAAYAAVVVARKEIWRRKAIWERVKEFKELSGVDISSPIISLVVGNQEKALKASRYLLKSGFHVMAIRPPTVPPNSCRLRVTLSAAHTTEDVKKLITALSSCLDFDNTATHIPSFLFPKL

SEQ ID NO: 37527 - protein, 165 aa, Arabidopsis thaliana
MNREKLMKMANTVRTGGKGTVRRKKKAVHKTNTTDDKRLQSTLKRIGVNSIPAIEEVNIFKDDVVIQFINPKVQASIAANTWVVSGSPQTKKLQDILPQIISQLGPDNMDNLKKLAEQFQKQASGEGNAASATIQEEDDDDVPELVGETFETAAEEKAPAAAASS

SEQ ID NO: 37528 - protein, 312 aa, Ralstonia metallidurans CH34
MKPRLLQHGRLPEKTEAQLAEQFDIHPFWAETDPAGYLAKHGGEFVAMTTRAAIGVDAAMLAALPNLRVISSFGVGTDKLDLETARARGIAVGYTPDVLNDCVADTAFALLMDAARQVSAADRFVRRGEWPKGPYPLTTRVSGKRLGIVGMGRIGRVIARRSIGFDMEVRYFGRKPQDGVDYGFEPSLEALASWADFLVVATSGGPSTRHLISASVLEALGPQGYLINIARGTVVDEAALVSALTDKRIAGAGLDVFEREPHVPEALFALDNVVLLPHVASGTHETRAAMADLVFDNLQSFFATGAVLKSAV

SEQ ID NO: 37529 - protein, 345 aa, Zea mays
MDMDSVECLSLPDAAMDVDDIEGRPHHGHLGLPLHPAHLPSSGAGRAFPKVNAGGAVAGPAGAAGTAGAGVGPPATSVHELLECPVCTNSMFPPIHQCQNGHTLCSTCKARVHNRCPTCRQELGDIRCLALEKVAESLELPCKYCSLGCPEIFPYYSKIKHEAQCSFRPYTCPYAGSECAVAGDIPFLVAHLRDDHKVDMHSGCTFNHRYVKSNPREVENATWMLTVFHCFGQYFCLHFEAFQLGMAPVYMAFLRFMGDENDARNYTYSLEVGGNGRKMVWEGTPRSIRDSHRKVRDSHDGLIIQRNMALFFSGGDRKELKLRVTGRIWKEQTNPDGACIPNLCS

SEQ ID NO: 37530 - protein, 341 aa, Methanococcoides burtonii DSM 6242
MIIGGFLGSGKTTTLLKLGKHLSDTGHKIAIIVNEIGEIGLDGDTLSSTGIVTEELTSGCICCTLKISMEYTLSNLSDEFHPDVIIIEPTGIAFPRQIKDDIALMKIENLSFAPIVNIVDGTRFNTEIKQTPKFIQTQIEDADILCINKVDIAEKEKVAEVRNFLEGLNPEAEVIEFSAKEADEKFQRLIDLLAGQSKERDARENINSIEASEVSSYSGELTIKDCELEAEKAEKYAIDVLTSIGKQIKKLNPDFVGHIKMALEYPETLMKASITSSESIPNIEFFETKSKECTLKFLSAVTNVEKEDLVKIVETTIKEHLKQEGIPFSNKVKNLQTIDIL

SEQ ID NO: 37531 - protein, 379 aa, Candida albicans SC5314
MSIDPETRRKLLNLQKTGENKKCFDCSAPNPQWASPKFGIFICLECAGVHRGLGVHISFVRSITMDQFKPEETLRMEIGGNERLKKYFIDNGVDLNLSPKQKYDNYVAEDYKEMLTCEVEGKEFVAKDHSGEKLPDINNTASTTTDPVSRGRPTPVPLTNEQKQKNEAYFADLGAKNDQRPDHLPPSQGGKYGGFGNTPAPSNTTSNNNNNNNSNNNNNNNNNNSSLSSFTLDNFQNDPLGTFTKGWGLFSSTVVKSVQEVNNSVIKPSIDQIQSSEITGQAKTAMAQFGQKMQQTGKYGQETFQTFTKDINENGLNKTLDSTFGGIFGHNNNNNGSNQGNQVPNAFGFKKPDNGVKYESLSGGSKKNDDDDDDKWDDF

SEQ ID NO: 37532 - protein, 196 aa, Triticum aestivum
MDTHIGSVDGPSPAAVNGAVGCPASAPGCPIMSSHPVVSAGEASLGRHLARRLVQVGVSDVFAVPGDFNLTLLDHLVDEPGLRLVGCCNELNAGYAADGYARARGVGACAVTFTVGGLSVLNAIAGAYSENLPVICIAGGPNSNDYGTNRILHHTIGIPDFSQELRCFQTVTCHQAVVTNLDDAHEQIDTAIATAP

SEQ ID NO: 37533 - protein, 584 aa, GIBBERELLA ZEAE PH-1
MSLKETNEANHEAKASTPAEAVRDITSPGVQRIKAMSEVITMTDRIFIFLGVFLISYAYGLDGTVRYAYQPSALNEFKEHSLQSSVNTLRAVIAAAAQPTAGKIADVFGRVELICISVFFYTIGTVIEAASQNLDTYSAGAVIYQIGYTMILLLVEVIIGDITSVRSRLFFSYIPALPFIINTWVSGDVTAAVLGATTWRWGIGMWCIIYPVCALPLIVSLLVVGRRAKKQGHLVGYRSSFQQLGLKSFTVELFWLLDIIGVILLIAVFALLLVPLTIAGGFESKWSSPQVVAPLVIGFVCIPVFVVWELRAPHPLVPFHHMKDRSVWAPMGIACMLNFAWTMQGDYLYTVLQVSFNFSIKAATRVQSLYSFASVVTGTILGLIVYKVRRFKVFIVSGTCLFLVAFGLLIRYRGDPSDSNQSGVIGAQILLGIAGGMFPYPAQASLQAYVTHERLAVMTGLYLALYQVGSAMGNAVSGAIWTQVLPARLASSFSGFGNETLAVYTYSQPLSAILDFPVGSVERDAMIDAYKHVQRLLTITGICLCIPLIAFSLCLRNPKLTDQQNLVEDDKPSEATERTTSASA

SEQ ID NO: 37534 - protein, 450 aa, Colwellia psychrerythraea 34H
MNSIIYPTTNFKHTATLIIERGDGAYVYDSNGKQYLEALAGLWCTSLGYNNHELIETASEQMSKLSFSHMFGGKTHQVGIDLAEKLSAMVPVENAKIFFGNSGSDANDTHIKMLRYYFNAIGKPQKYKIIARERSYHGVTVASASLTGLKPNHTHFNLPFDALGVLRTDAPHYYRNALPNESEAQFIDRIVNNLEQLILLEGADTIAAFIVEPITGASGVIVPPEGYYQKVQAVLQKYDILLWADEVITAFGRTGNDFGCKTVGIEKPAMMTLAKQLSSAYMPISASVIRGDMYDAMVEQSAQVGVFGHGYTYSGHPVSCAVALKTLEIYQRENIFDHAAKIGAYMQKRLHEFIHHPLVGEVRGKGMIGAIELVANKKTGQAFPDGTVGNFAMQACQNNGMICRAVAGSSLAFCPPLIVNKSQIDEMIEKTAKSLDQTLDFVVREGLLVR

SEQ ID NO: 37535 - protein, 652 aa, Arabidopsis thaliana
MNQIKNKTLPEMTTEQALLSMEALPLGFRFRPTDEELINHYLRLKINGRDLEVRVIPEIDVCKWEPWDLPGLSVIKTDDQEWFFFCPRDRKYPSGHRSNRATDIGYWKATGKDRTIKSKKMIIGMKKTLVFYRGRAPRGERTNWIMHEYRATDKELDGTGPGQNPYVLCRLFHKPSDSCDPAHCEEIEKVNFTPTTTTRCSPDDTSSEMVQETATSGVHALDRSDDTERCLSDKGNNDVKPDVSVINNTSVNHAETSRAKDRNLGKTLVEENPLLRDVPTLHGPILSEKSYYPGQSSIGFATSHMDSMYSSDFGNCDYGLHFQDGASEQDASLTDVLDEVFHNHNESSNDRKDFVLPNMMHWPGNTRLLSTEYPFLKDSVAFVDGSAEVSGSQQFVPDILASRWVSEQNVDSKEAVEILSSTGSSRTLTPLHNNVFGQYASSSYAAIDPFNYNVNQPEQSSFEQSHVDRNISPSNIFEFKARSRENQRDLDSVVDQGTAPRRIRLQIEQPLTPVTNKKERDADNYEEEDEVQSAMSKVVEEEPANLSAQGTAQRRIRLQTRLRKPLITLNNTKRNSNGREGEASHRKCEMQEKEDISSSSSWQKQKKSLVQFSSVVIIVAVIVVLVEIWKESRDAKCSFLFHQLDSFKGMFT

SEQ ID NO: 37536 - protein, 596 aa, Oryza sativa
MLGHREIVDGKAGAYVWKTYKEVFDLSTKIGNSIRSRGLAKGSRCGIYGANCPEWIITMEACNAHGIYCVPLYDTLGAGAVEFILCHAEVEIAFTEEKKIEQIFKTFPKSAEFLKTIVSFGKVTQEQKENASKYGLEIYSWDEFLSLADQEFDLPVKAKTDICTIMYTSGTTGDPKGVLISNASIICLVAGVDRLLNCVNEQLEQTDVYMSYLPLAHIFDRVVEELFMFHGASIGFWRGDVKLLVEDIGTLKPTILCAVPRVLDRIFSGLQAKIASGGFIKSTLFNLAYKFKQFRMMKGAKHNEAAAICDKVVFSKVKEGLGGNVRVILSGAAPLATHVEEYLRVVTCAHVLQGYGLTETCAGSFVSLPNQMCMIGTVGPPVPNIDVCLESVPEMNYDALATRPRGEICIRGETVFSGYYKREDLTKDVLIDGWFHTGDIGEWQPDGSMKIIDRKKNIFKLSQGEYVAVENLENIYGLVSAIDSIWVYGNSFESFLVAVVNPNKEALESWAAANGISGDLEALCENPKAKEYILGELSKVGKEKKLKGFEFIKAVHLEPVPFDMDRDLITPTYKKKRPQLLKYYQGTIDNMYRSAK

SEQ ID NO: 37537 - protein, 207 aa, Glycine max
SRWFNRKESNFVLHQRQRKRGSFLLLLFSSTQRHRFIALSLVRTQHAAHPCLDESTSYFGVYDGHGGKAVSKFCAKYLHLQVLKSEAYLAGDLGTSLQKSFLRMDEMMRGQRGWRELAILGDKIEKLSGMLEGFIWSPRSSEANDRVDDWAFEEGPHSDFTGPNSGSTACVAVVRGNKLVVANAGDSRCVLSRKGQAHNLSKDHKPE

SEQ ID NO: 37538 - protein, 234 aa, Antirrhinum majus
VLVQFGAFIILCGATHLISLWTFSLHSKTVAIVMTVAKIATALVSCVTALVLVHIIPDLLSVKTRESFLRKKAEELDREMGNIIKQEETSRHVRMLTHEIRSTLDRHTILRTTLVELGRTLELEECALWMPGQRGPNLQLSHTLNNLIPVGSTVPINLPIVNGVFNSEEAIKIPHTCPLAKIRPLGGGYVPPEVVAVRVPLLHLSNFHINNWPEQSSKSYAVMVLILEWHKNMA

SEQ ID NO: 37539 - protein, 579 aa, Schizosaccharomyces pombe
MKVVPSEKIKPNWWRETSVYQIYPASFKDSNGDGFGDLEGIISKVDYLKALNVESIWLCPIYPSPLKDMGYDVSDYKQIDSRYGTLEDLDRLMKALHERDMKLVMDLVLNHTSDQHEWFKESRSSKTNPKRDWYFWKPARYNEKGERLPPNNWRSYFDTSAWEWDEATQEYYLHLWSVGQPDLNWETPKVREAVHDILRFWLDRGVDGFRLDAINMISKDQRFLDAPITDDRYEYQLAYQYYANGPRIHEYLNGIGNILTEYDAFSVGEMPYVLDTNEILHVVGADRRELTMIFQFDFVDLDLDPNQHKYIEGSWELSDLKKSLKKWQSALLSGGGWNASFIENHDQTRTVSRYLSDSPKYRAYSSKLMALFIIFQSGTPFVFQGQELALANIPRDWPIDEYLDVETQNFWKLFMSGNPSQEEIEKTMDIVNKRARDNGRTPMHWDSSPNGGFTKAGVKPWMRVTNDYKEWNAANQVNDPESPYTFWSKALELRKELKDAVVYGSFELISEEDPSIVAFVRESSTYKLIILLNFTGNKVSYDCPLNLTSYEILLDNYKDFICMTSPVTLNPYQAVLLKL

SEQ ID NO: 37540 - protein, 406 aa, Arabidopsis thaliana
MSFKSLIQDMRGELGSISRKGFDVRFGYGRSRSQRVVQDTSVPVDAFKQSCWASMPPELLRDVLMRIEQSEDTWPSRKNVVSCAGVCRNWREIVKEIVRVPELSSKLTFPISLKQPGPRGSLVQCYIMRNRSNQTYYLYLGLNQAASNDDGKFLLAAKRFRRPTCTDYIISLNCDDVSRGSNTYIGKLRSNFLGTKFTVYDAQPTNPGTQVTRTRSSRLLSLKQVSPRIPSGNYPVAHISYELNVLGSRGPRRMQCVMDAIPASAVEPGGTAPTQTELVHSNLDSFPSFSFFRSKSIRAESLPSGPSSAAQKEGLLVLKNKAPRWHEQLQCWCLNFNGRVTVASVKNFQLVAAPENGPAGPEHENVILQFGKVGKDVFTMDYQYPISAFQAFTICLSSFDTKIACE

SEQ ID NO: 37541 - protein, 242 aa, Schizosaccharomyces pombe
MWSIFEARPKEAHSVNKIGWLRASVLGANDGILSLSGLLVGVVAANADIKVILITGVAGLMSGALSMAVGEYVSVSSQADLEDADLQLERREMDADWDAEVDELAAIYRGRGLDEELSRTVAVQLMEYNALEAHARDELGINIHTTAKPTLAALSSAASFSVGGIFPLLTSLITPLEYLSLVLPIATMFFLGMLGFVGAHIGGAKRVRAILRAVVLGLLAMAATALVGRLLEIHALSLQYAI

SEQ ID NO: 37542 - protein, 511 aa, Physcomitrella patens
MAMDMARIEVEPLVEVHNNTNNLLVHCVLDALPDSSPCLKSSETSFEAVVVKEDEEGGRPLFGKPELHPASPSSDTAAAANGEFARCLNFVTEADCGDVGVQCFEDFGTLPDCGEAGISREEGGGRDGEQVELLESMSLDGSRNSENLELGELGELLQGSETLDSVPGNEVGEEEALLLAKAAKATGVVVSASDSGECSSVDRKENQQSPKSCKSAAPGKKKAKVDWTPELHRRFVHAVEQLGVEKAFPSRILELMGVQCLTRHNIASHLQKYRSHRRHLAAREAEAASWTHRRAYTQMPWSRSSRRDGLPYLVPLHTPHIQPRPSMVMAMQPQLQTQHTPVSTPLKVWGYPTVDHSSVHMWQQPAVATPSYWQAPDGSYWQHPATNYDAYSARACYPHPMRVSLGTTHAGSPMMAPGFPDESYYGEDVLAATMYLCNQSYDSELGRAAGVAACSKPPETHLSKEVLDAAIGEALANPWTPPPLGLKPPSMEGVIAELQRQGINTVPPSTC

SEQ ID NO: 37543 - protein, 388 aa, Thermobifida fusca YX
MTKFNPSTPGKRRHTIRVVFPVSPKRASSMRDTAAEIVERRTPAGPAAAVERSGGPPVEAVGGEPEYVDRDDFAEHPETRTSSGDIVHAYLREIGRVPLLTAEEEVELAKAIEIGLYAEQKLRAARTGPVPAQYSPEWFEDLNELVREGKLAKRRLIESNLRLVVSVAKRYLGRGLALLDLIQEGNLGLIRAVEKFDYTRGYKFSTYATWWIRQAITRAIADQARTIRVPVHMVESINRLARTRRRLHQELGREPTLHELSRELNVDHDRVVEIHRVSQEPISLHTPIGEEDSAFGDFIEDTDAVPPVEAAAFVMLQDQLAQVLGGLSEREQRVITLRFGLEDGKPHTLEEVGRKFGVTRERIRQIESKTLAKLRQPSRARILRDYLG

SEQ ID NO: 37544 - protein, 300 aa, Brassica napus
  misc_feature (191)..(191): Xaa can be any naturally occurring amino acid
  misc_feature (255)..(255): Xaa can be any naturally occurring amino acid
  unsure (1)..(300): unsure at all Xaa locations
MGVREKDPLAQLSLPPGFRFYPTDEELLVQYLCRKVAGYHFSLQIIGDIDLYKFDPWDLPSKALFGEKEWYFFSPRDRKYPNGSRPNRVAGSGYWKATGTDKIIMSDGHRVGIKKALVFYAGKAPKGTKTNWIMHEYRLIEHSRSHGSSKLDDWVLCRIYKKTSGSQRQAVASPVQACLEDQSTNMSSSPXSSSQLDDVLDSFPEMKDRSFDLPRMNSLRTILNGNFEWASLAGLNPMPELAPMTYGLSNYGGYXAFQSAESGCRSSQVDQEQNSTELTQSLGYSSSGFGLSGQMYEFRQ

SEQ ID NO: 37545 - protein, 518 aa, Schizosaccharomyces pombe
MTTDMDLEQLEYEKEVEEIEKWWATPKQSQIKRPYTASTVAVLSEVTKAYYPSSQQALKLYDLLREHRNKGTATLTYGVVDPVLASQASKAGLETIFVSGCLCGLSSVDEPGMDHADYPWDTVPKAVDRIFRSQNWHARRQKQFHLMKPAEERKQLPKYDYLLPIIADGDMGFGSVTSTMKMTKRFVESGVAMIHLDDLAIGLKRFTVGQGRTVVPTSEYLRRLTAVRLQFDIMKAETMLLCRCDTDHAEFITSVVDPRDHAYVLGATTKIESLIKALKDAESTGVSMKKARENWIERAKLMTFDEAVKSTATPKEYENYISAISKKPFHSISERQELAEKYLSNEVFFDWELPRSSDGQYFFKPTVQTVIERAIAAAPLGEMTWARMDYPKWQDIKAFHEGVRAVYPDRMFAFGFTGNYDFKAAGFSEEQLRNLTSDMAKLGVCWQVQPYFTCQVLNKASVDYSNIWKKDGIFGYVKTVQEPALKEDVDGFENEWCGTYFADKLLSAAGSSDKTIPY

SEQ ID NO: 37546 - protein, 377 aa, Arabidopsis thaliana
MMIAQELGIYVVESKGGAILCLLLSLLCLGTWPALMALLERRGRLPQHTYLDYSITNFLAAIFIAFVFGGIGESTHEAPSFITQLTQIQDNWPSVLFAMAGTTVNYFLDNGLNRADILFSGVGCFMVAVCLGSAVHSSNSADIKAKLGKLSGDCETVTPEECQRLFGEEEEEEEKEMENVKEGSAAFLIALENKRAIKVLGKSMVVGLGITFFAGLSFSLFSPLFNLATNDQWHTLKQGVPKLIVYTAFFYFSLSCFVIAVALNISFLYKPVLDSPRSSFREYLSDWNGRGWALAAGLLCGFGNGLQFMGGQAAGYAASDAVQALPLVSTFWGIYLFGEYRRSSTRTYALLVGMLVMFTVAVGLLMASAGERETRFT

SEQ ID NO: 37547 - protein, 517 aa, Physcomitrella patens
MAMDMARIDESTAVEVNSLSLVHCVLDGLPDSPCLKSSPTSFEEAVAEGRSVFGDEEDIINNSNDQDNSSSCGAVVTTHEDFAECLNFVTEAECGDVGVRCFEDFDKLPDCGDEGETSKAEEEGCVRIGGGGEQGELLESVSLDCSRNSENLELRDLGELWEGSERPDSVPGNEVGEEEALLLAEAAKATGDVVSASDSGECSSVDRKDNQASPKSSKNAAPGKKKAKVDWTPELHRRFVHAVEQLGVEKAYPSRILELMGVQCLTRHNIASHLQKYRSHRRHLAAREAEAASWTHRRTYTQAPWPRSSRRDGLPYLVPIHTPHIQPRPSMAMAMQPQLQTPHHPISTPLKVWGYPTVDHSNVHMWQQPAVATPSYWQAADGSYWQHPATGYDAFSARACYSHPMQRVPVTTTHAGLPIVAPGFPDESCYYGDDMLAGSMYLCNQSYDSEIGRAAGVAACSKPIETHLSKEVLDAAIGEALANPWTPPPLGLKPPSMEGVIAELQRQGINTVPPSTC

SEQ ID NO: 37548 - protein, 180 aa, Medicago sativa
MALISSAAVTTVNRASSAQANLVAPFTGLKSSAGFPVTKKTNNDITSIASNGGRVNCMQVWPPVGKKKFETLSYLPPLTEEQLAKEVEYLIRKGWIPCLEFELEKGFVYRENHRSPGYYDGRYWTMWRLPLFGATDSSQVLKELADCKAEYPDSFIRIIGFDNVRQVQCISFIAHTPKNY

SEQ ID NO: 37549 - protein, 81 aa, Brassica napus
  misc_feature (57)..(57): Xaa can be any naturally occurring amino acid
  unsure (1)..(81): unsure at all Xaa locations
MSCCGGNCGCGSGCKCGNGCGGCKMYPDLGFSGESTTTETFVFGVAPTMKNQHEASXGEGVAENDACKCGSDCKCDPCTCK

SEQ ID NO: 37550 - protein, 380 aa, uncultured bacterium 105
MLKRLFVPLLLFVCGLLAGLVLTGRLRYAEETTAETVATVASQQAATLTITANVPDFTGIAAARIESVVNISSQTLEPRQISPFGGDPFFQYFFGDEPDLFGWDRQESLGSGVIVSQNGYILTNNHVVGNPDAEVTVTLADKREYAAEVIGVDQWTDLALLKINEETLQPAPWGDSSGLKVAEWVLAIGNPFQLNQTVTLGIVSAVGRANLGIATYEDFIQTDAAINQGNSGGALINGRGELVGINTAIYSQSGGDQGVGFAVPSNLARRVMKDFIEFGEVRRGSIGYIEIAPLTNRLATQLGVPDGRGALIQRMRRDSAAYDAGLRPGDVVITFEDTSVEDASHLLRLLADANIGKTVTLGVIRDGDLFEIEVQIALGQ

SEQ ID NO: 37551 - protein, 181 aa, Lactuca sativa
MASISSSAIATVNRTTSTQASLAAPFTGLKSNVAFPVTKKANNDFSSLPSNGGRVQCMKVWPPIGLKKYETLSYLPPLSDEALSKEIDYLIRNKWIPCLEFELEHGFVYREHHHSPGYYDGRYWTMWKLPMFGCTDSAQVMKEVGECKKEYPNAFIRVIGFDNIRQVQCISFIVAKPPGVL

SEQ ID NO: 37552 - protein, 324 aa, Stenotrophomonas maltophilia
MILDNVVWGFIGCGSVTEKKSGPALANTPGSRVAAVMRRNAALAEDYARRHAIPRWYADADALIADPEVNAIYVATPPSTHMHYALQAIAAGKPVYIEKPMAMDHGECQRIIEASARSGVPVFVAYYRRALPRFAQVKQLLDSGAIGTPRSVRATLHRPHSANAASPDFWRTNPAIAGGGLFVDLGSHTLDLLDHLLGPLSDVRGLASSLTGAYAAEDSVSMCFRTGTGVHGIAQWSFCAFRRQDEIEITGDRGQLRFATFEDVPVVLETEAGMQTFDIPNPPSIQQPLIATMVDELRGWGHSPSNGISAARTSAVIDQVLQAR

SEQ ID NO: 37553 - protein, 180 aa, Stellaria longipes
MASSIMSSAAVATRSNGAQASMVAPFTGLKSNASFPVSRKTNLDITSIASNGGRVRCMQVWPPINMKKYETLSYLPDLSSEQLLSEIEYLLKNGWVPCLEFETEHGFVYREHTSSPGYYDGRYWTMWKLPMFGCTDATQVAAEVQEAKKAYPDAHIRIIGFDNVRQVQCISFIAYKPEAF

SEQ ID NO: 37554 - protein, 494 aa, Oryza sativa
  misc_feature (401)..(401): Xaa can be any naturally occurring amino acid
  misc_feature (406)..(406): Xaa can be any naturally occurring amino acid
  unsure (1)..(494): unsure at all Xaa locations
MRKAAAAAVAAAAAVGVALLVRRQLREAKRWGRADAVLRELEERCAAPPGRLRQVADAMAVEMHAGLASEGGSKLKMIISYVDALPSGEEKGVFYALDLGGTNFRVLRVQLGGKEGRVIKQEHDEISIPPHLMTGGSNELFDFIASSLAKFVASEGEDFHLAEGRQRELGFTFSFPVKQTSIASGTLINWTKGFSIDETVGEDVVTELTKALERQGLDMKVTALINDTIGTLAGGRYDDNDVIAAVILGTGTNAAYVERANAIPKWHDLLPKSGDMVINMEWGNFRSSHLPLTEFDQALDAESLNPGEQVYEKLISGMYLGEIVRRVLLKMAEEASLFGDEVPPKLKIPFIIRTPYMSMMHCDRSPDLRTVGAKLKDILGVQNTSLKTRRLVVDVCDIVAXRPAHXAAAGIHGILKKLGRDVPNTDKQRTVIAVDGGLYEHYTIFAECVETPLRDLLGEDVSSTIVIKLAKDGSGIGAALLAAAHSQYREAEEL

SEQ ID NO: 37555 - protein, 319 aa, Psychrobacter arcticus 273-4
MRAVFLDKGTFSDNVDLPAPAGVTDYITYDETPQELIIERCQNADIIFTNKVQINAEVIAKLPKLKLIQLTATGMNNVDQDACTARNISLYNVAGYAVKSVPEHTFMLMLNAMRAGIYYHNKVTDGTWADNGNFCLLDIPLIDLEDKTLGIIGIGTIGKRVTEIARAFGMTVLWAERQGCAPRNDDYTAFDGVLARSDVISLHCPLNDATQHLINADTLAKMTKKPLIINVARGGIVDSQALADAINNEQVLGYGSDVFEQEPIAANDPLLALGEHPRVIFSPHNAWGSKSAQETLWQMLSKQVTDFINQANKIINNGF

SEQ ID NO: 37556 - protein, 255 aa, Burkholderia sp. 383
MNTQDHPLSHLFDNNDAWVKHKLEDDPQFFARLADQQAPEYLWIGCSDSRVPANEIIGLPPGEVFVHRNIANVVVHSDLNCLSVIQFAVDILRVKHIMVVGHYGCSGVNAALLNRRVGLADNWLHHVQDVRERHTALLDAWPVGEARYRRLIELNAIEQVVNVCRTTIVNDAWARGQSLTVHGLVYGVHDGRMRNLGMAVSNFEALDETYTRCVAALVAGGEHAPDNDMIAADAARLEGVAQAVAATLKPCDDAK

SEQ ID NO: 37557 - protein, 215 aa, Brassica napus
MASMLARRSLDTLRARHLVLSGQALQGSHLSRLQSRAISYGSKKDDEEEEQLAKEISKDWNTVFERSINTLFLTEMVRGLSLTLKYFFDPKVTINYPFEKGPLSPRFRGEHALRRYPTGEERCIACKLCEAVCPAQAITIEAEEREDGSRRTTRYDIDMTKCICPVDAIKEKSRDLISLRYNPVLYRMALIKMMKKLSNLLRRSPRTGALSLSGG

SEQ ID NO: 37558 - protein, 532 aa, Arabidopsis thaliana
MAGGGAPAPKADEPQPHPPKDQLPNISYCITSPPPWPEAILLGFQHYLVMLGTTVLIPTALVPQMGGGYEEKAKVIQTILFVAGINTLLQTLFGTRLPAVVGASYTFVPTTISIILSGRFSDTSNPIDRFERIMRATQGALIVASTLQMILGFSGLWRNVVRFLSPISAVPLVGLVGFGLYEFGFPGVAKCIEIGLPELLILVFVSQYLPHVIKSGKNVFDRFAVIFAVVIVWIYAHLLTVGGAYNGAAPTTQTSCRTDRAGIIGAAPWIRVPWPFQWGAPSFDAGEAFAMMMASFVALVESTGAFVAVSRYASATMLPPSILSRGIGWQGVAILISGLFGTGAGSSVSVENAGLLALTRVGSRRVVQIAAGFMIFFSILGKFGAVFASIPAPIIAALYCLFFAYVGAGGLSFLQFCNLNSFRTKFILGFSVFLGLSIPQYFNEYTAIKGYGPVHTGARWFNDMVNVPFSSEPFVAGSVAFFLDNTLHKKDSSIRKDRGKHWWDKFRSFKGDTRSEEFYSLPFNLNKYFPSV

SEQ ID NO: 37559 - protein, 576 aa, Listeria monocytogenes str. 4b H7858
MQFGFRRLSIIDVENGHQPLTYENERYWIIFNGEVYNYVELREQLVAEGMTFETESDTEVIIATYAKYKEKTAERLRGMFGFVIWDKQEELVYGARDPFGIKPFFYAEEDGKLFMGSEKKSILHALKEKELDEVSLQNYMTYQFVPEPDSLTKNVKRLEPGHQFTKKIGQPMEITTYWKASFAPVTKSEDAWIKEVRDVMYDSVKMHMRSDVPVGSFLSGGIDSSIIAAIAKEYHPAIKTFSVGFERDGFSEIDVAKETADKLGVENISYVISPEEYMKELPKIVWHMDDPLADPAAIPLYFLSREARKQVTVALSGEGADELFGGYNIYNEPNSLAMFNKMPSVFKSMLNSVARIMPEGMRGKSFLERGTTPMEERYIGNAKMFTEKEKQILLPKYQAGHDYTNITDPFYAETTNYHPVERMQYIDIHTWLRGDILLKADRMTMANSLEVRVPFLDKEVYNVARNIPDTMKTTNGTTKYILRKAAATFVPEHVLNRRKLGFPVPIRHWLKDEMNAWVKNIIKESPTDHLINKQYVLGLLDDHCAGKFDYSRKIWTVVIFMIWYDVYVADKYDFGK

SEQ ID NO: 37560 - protein, 326 aa, Ralstonia metallidurans CH34
MAKVVRIYETGGPDVLRFENATVGEPGPGEVRVRHVAVGLNFADTYFRSGLYKVPLPSSIGNEAAGVIEAVGSGVTHLAVGDRVTYTGFTPTLGAYSTDRLISADPLIKLPEAISCEVAAAMTMRGLSAAYLMRRIYPFKAGDTILLHAAAGGAGLIISQWAKLLGLTVIGTVSTDAKAEVARAHGCDHTINYSHEDVAKRVRELTDGVGVSVVFDSVGKDTFMSSLDSLKRRGLLVCVGFASGAVPAFDPAILARKGSAYLTRPGLADYIADPAEKAELVDELFGHVAAGRIRIDINRRYALEDAVQAHRDLEARKIVGSSIFAI

SEQ ID NO: 37561 - protein, 283 aa, Lactobacillus sakei subsp. sakei 23K
MTTLTTTYTLANGVQIPVLGFGTWQTPDGDTAIKSVKAALEAGYRHIDTAQAYQNEASVGTAIQESGVARQDLFLTTKIWNANHSYDLTMQSFEESLQKLQTDYVDLLLIHWPNPIDFRDNWETANAETWRAMEELYNAGKAKAIGVSNFRAHHLEALKKTAKVQPMVNQIFLAPGELEAETVQYSRDNGLLLEAYSPLGTGKIFDVPEMKTLAAKYQRSIPQIASRWSLQHGFLPLPKSVHANYIQENTQLFDFELTPEDMQTIDQLDGVVGKAKDPDTATF

SEQ ID NO: 37562 - protein, 367 aa, Blumeria graminis
MGNSHVKPCFSDEVNLSHFRLLRVVGRGAFGKVRIVERRDTGLTFALKYIRKGDVIRTESVRNILRERRMLEQLNYQFICNLRYSFQDIEYMYLVVDLMNGGDLRFHISRKVFTEEAVRFWISELGLAIRYIHSQGIIHRDIKPDNVLLDAEGHVHLADFNVASDFTPGKLLTSKSGTLAYLAPEVYKGKGYSSSVDWWSLGVLFYECIYNKRPFEKISSSDLQEQILKADPKFPVTDPPVSIVCMHAISSALEQDPNKRMGCTKDEGFSSFTDNPFFRAIDFYALERKEIEPVFVPSSGKTNFDATYDLEEMLLEEAPLEARARRQKPREQLREDATEKQIREEEMYQMIEEHFTPFDYTTIAYER

SEQ ID NO: 37563 - protein, 447 aa, Arabidopsis thaliana
MAASSSSAASFFGVRQDDQSHLLPPNSSAAAPPPPPPHHQAPLPPLEAPPQKKKRNQPRTPNSDAEVIALSPKTLMATNRFICEVCNKGFQREQNLQLHRRGHNLPWKLKQKSTKEVKRKVYLCPEPSCVHHDPSRALGDLTGIKKHYYRKHGEKKWKCDKCSKRYAVQSDWKAHSKTCGTKEYRCDCGTLFSRRDSFITHRAFCDALAQESARHPTSLTSLPSHHFPYGQNTNNSNNNASSMILGLSHMGAPQNLDHQPGSVPSLFSSSMQSPNSAPHMSATALLQKAAQMGSTSSNNNNGSNTNNNNNASSILRSFGSGIYGENESNLQDLMNSFSNPGATGNVNGVDSPFGSYGGVNKGLSADKQSMTRDFLGVGQIVKSMSGSGGFQQQQQQQQQQQQQQQHGNSRERVGSSSDSADRSSMNVNTGGGPASTSPPYGIHHASF

SEQ ID NO: 37564 - protein, 550 aa, Candida tropicalis
MAYTKIDINQEEADFQKEVAEIKKWWSEPRWRKTKRIYSAEDIAKKRGTLKIAYPSSQQSDKLFKLLEKHDAEKSVSFTFGALDPIHVAQMAKYLDSIYVSGWQCSSTASTSNEPSPDLADYPMDTVPNKVEHLWFAQLFHDRKQREERLNMTKEERANTPYIDFLRPIIADADTGHGGITAIIKLTKLFIERGAAGIHIEDQAPGTKKCGHMAGKVLVPVQEHINRLVAIRASADIFGSNLLAVARTDSEAATLITSTIDHRDHYFIIGATNPESGDLAALMAEAEAKGIYGDELARIETEWTKKAGLKLFHEAVIDEIKAGNYSNKEALIKKFTDKVNPLSHTSHKEAKKLAKELTGKDIYFNWDVARAREGYYRYQGGTQCAVMRGRAFAPYADLIWMESALPDYNQAKEFADGVKAAVPDQWLAYNLSPSFNWNKAMPADEQETYIKRLGQLGYVWQFITLAGLHTTALAVDDFANQYSQIGMRAYGQTVQQPEIEKGVEVVKHQKWSGANYIDGLLRMVSGGVTSTAAMGAGVTEDQFKETKAKV

SEQ ID NO: 37565 - protein, 291 aa, Triticum aestivum
LAWSRPRWALNVIFNIYNKKVLNAFPYPWLTSTLSLACGSAMMLFSWVTCLVEAPKTDLDFWKALFPVAVAHTIGHVAATVSMSKVAVSFTHIIKSAEPAFSVLVSRFILGESFPMPVYLSLLPIIGGCGLAAATELNFNMIGFMGAMISNLAFVFRNIFSKRGMKGKSVSGMNYYACLSIMSLVILTPFAIAMEGPQMWATGWQKALADVGPNVLWWIGAQSVFYHLYNQVSYMSLDQISPLTFSIGNTMKRISVIVSSIIIFRTPVRPVNALGAAIAIFGTFLYSQAKQ

SEQ ID NO: 37566 - protein, 337 aa, Ustilago maydis 521
MSQVNIGINGFGRIGRIVFRNSVVHNTANVVAINDPFIDLEYMVYMLKYDSTHGVFNGDISTKDGKLIVNGKSIAVFAEKDPSNIPWGQAGAHYVVESTGVFTTIDKASAHIKGGAKKVVISAPSADAPMYVCGVNLDAYDPKAQVVSNASCTTNCLAPLAKVIHDKFGIVEGLMTTVHATTATQKTVDGPSAKDWRGGRAAAANIIPSSTGAAKAVGKVIPSLNGKLTGMAFRVPTTNVSVVDLTARLEKGASYDEIKAEVKRASENELKGILGYTEDAVVSQDFIGNSHSSIFDAAAGISLNNNFVKLVSWYDNEWGYSNRCLDLLVFMAQKDSA

SEQ ID NO: 37567 - protein, 447 aa, Malus x domestica
MGKEKFHINIVVIGHVDSGKSTTTGHLIYKLGGIDKRVIERFEKEAAEMNKRSFKYAWVLDKLKAERERGITIDIALWKFETTKYYCTVIDAPGHRDFIKNMITGTSQADCAILIIDSTTGGFEAGISKDGQTREHALLAFTLGVRQMICCCNKMDATTPKYSRARYDEIVKEVSSYLKKVGYNPDKIPFVPISGFEGDNMIERSTNLDWYKGPTLLEALDQINEPKRPSDKPLRLPLQDVYKIGGIGTVPVGRVETGVIKPGMVVTFGPTGLTTEVKSVEMHHEAMQEALPGDNVGFNVKNVAVKDLKRGYVASNSKDDPAKEAANFIAQVIIMNHPGQIGQGYAPVLDCHTSHIAVKFAELVTKIDRRSGKELEKEPKFLKNGDAGFVKMLPTKPMVVETFSEYPPLGRFAVRDMRQTVAVGVIKSVEKKDPTGAKITKAAAKKK

SEQ ID NO: 37568 - protein, 303 aa, Alcaligenes faecalis
MLQMAHTHDHSHEPNSYGFAFGFGILLNLAFVAIEGFYGWRANSLALLADAGHNLSDVGGLVLAWVAYGAAKMRPNQRHTYGWRKASILASFVNAVILLVAMGSLASEAISRLGDPGTPNAQTIIIVAGVGVLINAVTAWLFMAGSRNDLNIRGAFLHMAADAAVSLGVVASGCLALWQSWVKLDPVVSLVIAVIIIFATLSLFKRSLHMLFDGVPDDIDLNAVRSVLLEIPGLKSLHDLHIWNLSTTETALTVHLVLDENIDVDAALRGATNILIERFSIHHSTIQCESPRFATDCTLNVRH

SEQ ID NO: 37569 - protein, 318 aa, Synechocystis sp. PCC 6803
MTARTSPDSVRAYLREIGRVPLLTHEEEIVYAKQIQQVVSLNEIKKSLAEGKDGEPVSPSEWAKAADLSIRELEKAIKEGERAKRKMVEANLRLVVSVAKKYLKRNLDLLDLIQEGTIGMQRGVEKFDPTKGYRFSTYAYWWIRQAITRAIAEKSRTIRLPIHITEKLNKIKKAQRQLSQEKGRAASIAELAEHLELTPKQVREYLERSRHPLSLDLRVGDNQDTELGDLLEDDGPLPEDFATYASLQLDLDSLMAELTPQQREVLILRFGLNDGQPLTLASIGSMLSISRERVRQIEREALNKLRKRKSMIQEYLAS

SEQ ID NO: 37570 - protein, 447 aa, Arabidopsis thaliana
  misc_feature (381)..(381): Xaa can be any naturally occurring amino acid
  unsure (1)..(447): unsure at all Xaa locations
MEKNAEKKRIVLVPFPLQGHITPMMQLGQALNLKGFSITVALGDSNRVSSTQHFPGFQFVTIPETIPLSQHEALGVVEFVVTLNKTSETSFKDCIAHLLLQHGNDIACIIYDELMYFSEATAKDLRIPSVIFTTGSATNHVCSCILSKLNAEKFLIDMKDPEVQNMVVENLHPLKYKDLPTSGMGPLERFLEICAEVVNKRTASAVIINTSSCLESSSLSWLKQELSIPVYPLGPLHITTSANFSLLEEDRSCIEWLNKQKLRSVIYISVGSIAHMETKEVLEMAWGLYNSNQPFLWVIRPGTESMPVEVSKIVSERGCIVKWAPQNEVLVHPAVGGFWSHCGWNSTLESIVEGVPMICRPFNGEQKLNAMYIESVWRVGXLLQGEVERGCVERAVKRLIVDDEGVGMRERALVLKEKLNASVRSGGSSYNALDELVHYLEAEYRNT

SEQ ID NO: 37571 - protein, 331 aa, Nostoc sp. PCC 7120
MARMYYDEDANLDLLAGKTIAIIGYGSQGHAHALNLKDSGLNVIVGLYPGSKSAEKAQAAGLTVKNVADAANIADFIMILLPDEVQKTVYKNEIEPNLQEGNTLAFAHGFNIHFGQVVPPANVDVVMVAPKGPGHLVRRTYEQGQGVPALFAVYQDASGKARDRALSYAKGIGGTRGGVLETTFREETETDLFGEQAVLCGGLSALIKAGFETLVEAGYQPELAYFECLHEVKLIVDLVVEGGLAKMRDSISNTAEYGDYTRGPRIVNEQTKAEMRKVLSEIQSGQFAREFVLENQSGKPGFTAMRRQEAEHPIEEVGKDLRAMFSWLKKV

SEQ ID NO: 37572 - protein, 339 aa, Solibacter usitatus Ellin6076
MRAAFFEGNRTLRVGDCAEVAPGAGQVQINVEFCGICGTDLHLFHGAMAHRLTLPHVMGHEMSGTLAAVGEGVAGWQAGDRVTVRPLDPCGTCPACRMGHSHICHNLKFIGIDTPGALQGMWTVPAHTLHRLPDSLSLREGAMVEPIAVACHDVRMSELQAGEFAVVIGGGPIGILIALVAKARGARVLQAEVNPFRLQLARDLGIDAVNPAETDLPALVNQHTAGAGADVVFEVSGSSAGCEMMTRLPRTRGRIVVVAIYAEPQKVDLFRFFWRELRLAGARVYEPEDFDGAIALAASGKLPLDRLITDVLPLSRLEEAMHRMERGGDCMKILVSCTD

SEQ ID NO: 37573 - protein, 252 aa, Azoarcus sp. EbN1
MKLYRELGFTEAPAYYPTPIEGTLFLALDLDNWSEEEVANENLFHLFDYNRAWARQMQQIDPGFFEKLSKLQSPEYLWIGCSDSRVPANQIIGLLPGEVFVHRNVANVVVHTDLNCLSVIQFAVDVLKVRHIMVVGHYGCGGVKAALGRERIGIVDLWLRHVQDVHVKHRQAVDGLPPELAHDRLCELNVLEQVVNVAQTVVVQDAWKRGQPLAVHAWIYGLKNGLVRDLGLNVTRPEDLVPRYVAALETLA

SEQ ID NO: 37574 - protein, 323 aa, Stenotrophomonas maltophilia
MILDNVVWGFIGCGSVTEKKSGPALASTPGSRVAAVMRRNAALAEDYARRHAVPRWYTDADALIGDPDVNAVYVATPPSTHMQYALQAIAAGKPVYIEKPMALDLAECERILEASARRGVPVFVAYYRRALPRFAQVKQLLDSGAIGTPRSVRATLHRPHSVNAASPDFWRTNPAISGGGLFVDLGSHTLDLLDHLLGPLSDVRGLASSLAGAYAAEDSVSMCFRIGPGVHGIAQWSFCAFRRQDEIEITGDRGQLRFATFEDVPVVLETEAGVQTFDIPNPSSIQQPLIAHLVDELRGSGRSPSTGVSAARTSAVIDQVLQA

SEQ ID NO: 37575 - protein, 375 aa, Photobacterium profundum SS9
MPGKVLSGEGLRGQSAGSTAICTVGKTGAGLTYRGYDISDLAESADFEEVAYLLLKGKLPTQAQLDAYKTVLISYRGLPLALKVVLEQIPADAHPMDVMRTGCSMLGNLEQEHEFSEEYDKADRLLALFPAIICYWYRYSHHGVRIETYCDQDSLGGYFLKMLTDKSPSELHKRAMHCSLILYAEHEFNASTFAARVCASTLSDLHSCIATAIGTLRGPLHGGANEAAMAMIEQWQTTDEAEAGILTMLANKDKIMGFGHAVYSESDPRNVLIKRWSKLLSEEADDAVLYAISERVETVMKREKGLFCNADFFHASAYHFLNIPTKLFTPIFVMSRLTGWAAHVFEQRAHNRIIRPSADYIGPEHQDWLPIDKRH

SEQ ID NO: 37576 - protein, 73 aa, Nematanthus villosus
ISGTNGEVMPGQWEFQVGPSVGIEAADHTWCARYLLERITEQAGVVLSLDPKPIEGDWNGAGCHTNYSTKSTR

SEQ ID NO: 37577 - protein, 73 aa, Koellikeria erinoides
ISGTNGEVMPGQWEFQVGPSVGIEAGDHIWCARYLLERITEQAGVVLSLDPKPIEGDWNGAGCHTNYSTKSMR

SEQ ID NO: 37578 - protein, 333 aa, Oryza sativa
MTSAVAAPPATGGKRPVLLLRRINDRLAAELRSRFRVLNFYESSAPLLAFLAAAAAGPDPPLAAVVVAGGAIQVNAAFLDAVPSLGCVVTTGAGVDHIDLAECARRGVAVAGAGTVFSTDVADHAVGLLVDVLRRISASDRYVRRGLWAARGDYPLGSKLSGKHVGIIGLGSIGSLIAKRLQAFGCTISYNSRRPKDSVSYNYFPDVTDLAAASDVLIVACALNDETRHIVDSSVLEALGKDGVVVNIARGGIVDEAELIRALKEGRIAGAGLDVFEKEPDVPAELLSMDNVVLTAHEAVFTTESNWDLADLMIANLEAFFSGGPLLTPVLPK

SEQ ID NO: 37579 - protein, 470 aa, Pseudomonas fluorescens Pf-5
MADAGTVLQRGLSTRHIRFIALGSAIGTGLFYGSAAAIQRAGPSVLLAYLIGGAAIYLTMRALGEMAVRTPVSGSFGHYASSYLGRFAGFLTGWSYAFSMLMVCLADVTAFGVYMGLWFPDTPRWIWVLSIVLGIGALNLCSVKVFGELEFWLSLLKVGAIVAMIVGGFTLLFFGIQLGEEQSRGGLANLWEYGGFFPNGVEGMIASFTIVMFAFGGIEVIGITAGEAKDPQRMIPKAINSVPLRILIFYVLTLLILLTLAPWSSIGSHGSPFVQIFSSLGISSAATVLNIVVISAVVSAINSDIFSAGRMMYGMAAIGQAPAVFARTSRFGVPWMTVLVMSVALLLGVLLNYWIPQELFLIFASLVTFSVVWVWLMILLSQMAMRRGMSAREIHELKFPLPLGTAGQACAVVFMLFIFGVLGAFADTRLALYVGLGWLALLSLAYWIWIKPDTTGSAAAESGIGTQEKG

SEQ ID NO: 37580 - protein, 432 aa, Listeria monocytogenes str. 4b H7858
MDHSMSKKLHDEALLHIVGGVNSPSRSNKGVGGGIPVTMERASGAYFYDVDGNKYIDYLAAFGPIITGHAHPHITEAITKAAQNGVLYGTPTKHEITFAKMLKEAIPSLEKVRFTNSGTEAVMTTIRVARAYTGRDKIIKFAGCYHGHFDLVLVEAGSGPSTLGIPDSAGVTKSTAEEVITVPFNDLASFKEALAVWSDQVAAVLVEPIVGNFGMVAPEDGFLEAVNELAHANGSLVIYDEVITAFRFMYGGAQNYLGVIPDLTAMGKIIGGGLPIGAYGGRIDIMEKVAPLGPAYQAGTHAGNPASILSGIACLEVLQEEGLYERFEKYGSMLKDGIEKAALKHGIAVTVNQIVGALTVYFTEDPVTNYAEAGATNGELFGRFFKGMLEEGINLAPSKYEAWFITSAHSEADILETIQAVDTVFGKMVQDN

SEQ ID NO: 37581 - protein, 533 aa, Glycine max
  misc_feature (257)..(257): Xaa can be any naturally occurring amino acid
  unsure (1)..(533): unsure at all Xaa locations
MAGGGGAPAPKIDEPQPHPPKDQLPNVSYCITSPPPWPEAILLGFQHYLVMLGTTVLIPTALVPQMGGGNEEKAKVIQTLLFVAGINTLLQTLFGTRLPAVIGGSYTYVATTISIILSGRFSDEPDPIEKFKRIMRATQGALIVASTLQIVLGFSGLWRNVARFLSPLSAVPLVSLVGFGLYELGFPGVAKCIEIGLPELILLVFVSQFVPHVLHAGKHVFDRFAVLFTIAIVWLYAYLLTVGGAYNHAAPKTQSTXRTDRAGLIESAPWIRVPYPFQWGAPTFDAGEAFAMMMASFVALVESSGAFIAVYRYASATPLPPSILSRGIGWQGVGILLSGLFGTGNGSSVSVENAGLLALTRVGSRRVVQISAGFMIFFSILGKFGAVFASIPPPIVAALYCLFFAYVGAGGLSFLQFCNLNSFRTIFVLGYSIFMGLSVSQYFNEYTAINGYGPVHTKARWFNDIINVPFQSKAFVAGCVAYFLDNTLHKKEAAIRKDRGKHWWDKYRSFKTDTRSEEFYSLPFNLNKYFPSV

SEQ ID NO: 37582 - protein, 58 aa, Helianthus annuus
TRGMLAYVEKIQREERKHGVDTLAHQKWSGANYYDRVLRTVQGGMTSTAAMGKGVTEE

SEQ ID NO: 37583 - protein, 94 aa, Bacillus licheniformis ATCC 14580
MLKPLGDRVVIELVESEEKTASGIVLPDSAKEKPQEGKVVAAGSGRVLESGERVALEVKTGDRIIFSKYAGTEVKYEGTDYLILRESDILAVIG

SEQ ID NO: 37584 - protein, 544 aa, Bacillus licheniformis ATCC 14580
MAKDIKFSEEARRSMLRGVDALADAVKVTLGPKGRNVVLEKKFGSPLITNDGVTIAKEIELEDAFENMGAKLVAEVASKTNDVAGDGTTTATVLAQAMIREGLKNVTAGANPVGVRKGIEQAVAVAVESLKEISKPIEGKESIAQVASISAADEEVGSLIAEAMERVGNDGVITIEESKGFTTELEVVEGMQFDRGYASPYMVTDSDKMEAVLENPYILVTDKKITNIQEILPVLEQVVQQGKPLLLIAEDVEGEALATLVVNKLRGTFNAVAVKAPGFGDRRKAMLEDISILTGAEVITEDLGLDLKSTQINQLGRASKVVVTKENTTIVEGAGDTEQIAARVNQIRAQVEETTSEFDKEKLQERLAKLAGGVAVIKVGAATETELKERKLRIEDALNSTRAAVEEGIVSGGGTALVNVYNKVAALEAEGDELTGINIVLRALEEPIRQIAHNAGLEGSVIVERLKNEEIGVGYNAATGEWVNMIDKGIVDPTKVTRSALQNAASVAAMFLTTEAVVADKPEENKGGAGMPDMGGMGGMGGMM

SEQ ID NO: 37585 - protein, 576 aa, Ricinus communis
MAASFSGPSMIMEEEGRFEAEVAEVQAWWNSERFKLTRRPYTARDVVALRGNLKQSYASNELAKKLWRTLKTHQANGTASRTFGALDPVQVTMMAKHLDSIYVSGWQCSSTHTTTNEPGPDLADYPYDTVPNKVEHLFFAQQYHDRKQREARMSMSREERARTPYVDYLKPIIADGDTGFGGTTATVKLCKLFVERGAAGVHIEDQSSVTKKCGHMAGKVLVAISEHINRLVAARLQFDVMGVETLLVARTDAEAANLIQSNVDTRDHQFILGVTNPNLRGKSLATLLATGMANGKTGAELQATEDNWLAMAQLKTFPECVMDAIKNMNAGEDEKRRRMNEWMNHTSYDKCLSYEQGREIADRMGLKNLFWDWDLPRTREGFYRFKGSVMAAVVRGRAFAPHADIIWMETAKPDFAECTAFAEGVKSMHPEIMLAYNLSPSFNWDASGMTDEQMRDFIPRIARLGFCWQFITLGGFHADALVIDTFAKDYARRGMLAYVERIQREERKNGVDTLAHQKWSGANYYDRYLKTVQGGISSTAAMGKGVTEEQFKETWTRPGAMEMGSAGSEVVAKARM

SEQ ID NO: 37586 - protein, 240 aa, Medicago truncatula
MGRGRVQLKRIENKINRQVTFSKRRAGLLKKAHEISVLCDAEVALIVFSHKGKLFEYATDSCMEKILERYERYSYAERQLVANDSESQGNWTIEYTRLKAKIDLLQRNYRHYMGEDLGSMSLKELQSLEQQLDTALKLIATRRNQVMYESISELQKKEKVIQEQNNMLAKKIKEKEKIAAQQQAQWEHPNHHGVNPNYLLQQQLPTLNMGGNYREEAPEMGRNELDLTLEPLYTCHLGCF

SEQ ID NO: 37587 - protein, 134 aa, Brassica napus
  misc_feature (112)..(112): Xaa can be any naturally occurring amino acid
  unsure (1)..(134): unsure at all Xaa locations
HFHIHKIFLLCNYILLGVPTRCLLLTPSLRRIPPIRRLLLILLHTTTSAAAVSRRTDPLFGRYQGHPAHTVVSVLTASFHGSASTLIFTNTANFLGSLKSYVREEDAAVVFXLGGGLCVVVFCLDWVVLVLAFF

SEQ ID NO: 37588 - protein, 197 aa, Zea mays
MSASRFIKCVTVGDGAVGKTCMLISYTSNTFPTDYVPTVFDNFSANVVVDGSTVNLGLWDTAGQEDYNRLRPLSYRGADVFLLAFSLISKASYENVSKKWVPELRHYAPGVPIILVGTKLDLRDDKQFFVDHPGAVPISTAQGEELRKLIGAAAYIECSSKIQQNIKAVFDAAIKVVLQPPKQKKRKKKVQKGCTIL

SEQ ID NO: 37589 - protein, 235 aa, Trichodesmium erythraeum IMS101
MEKQVKLLEDKEQLIKQALDICLAKIQEAIRERNQCTIALAGGNTPRPLYEFIKNQNIDWDKIHVFWGDERYVAPDHPDSNQKMAREAWLDQVTIPATNVHPMETGSGDPEADALKHDAHLRDFFQVSTGEFPSFDLILLGMGGDGHTASLFPHTNALKVSDRLITVGNKDGQPRLTFTVPLINQARCVIFLVAGADKQAALDEVFAEKGDDMNYPSRLIQPKGELQWLLTGVNI

SEQ ID NO: 37590 - protein, 427 aa, Streptococcus pyogenes SSI-1
MTHSTKQEHSHSQSAVLGLQHVLSMYAGSILVPIMIAGALGYSARELTYLISTDIFMCGVATFLQLKLTKHTGVGLPVVLGCAFQSVAPLSIIGAQQGSSAMFGALIASGIYVILVAGIFSKIARFFPPIVTGSVITVIGLSLVGVAMGNMGDNVKEPTAQSMMLSLLTIVIILLVQKFTKGFVKSISILIGLVAGTLVSAMMGLVDTTPVVEASWIHVPTPFYFGMPTFEITSIVMMCIIATVSMVESTGVYLALSDLTNDQLDEKRLRNGYRSEGIAVFLGGLFNTFPYTGFSQNVGLVQISGIKTRRPIYYAAGILVVIGLLPKFGAMAQMIPSPVLGGAMLVLFGMVALQGMQMLNRVDFQKNEYNFIIAAVSISAGLGFNGTNLFTSLPETAQMFLTNGIVIATLTSVVLNLVLNGKDKQDE

SEQ ID NO: 37591 - protein, 487 aa, Brevibacterium linens
MSTSGEDLTLVWFRDDLRVADHEALTAARADGRVIAVWIRETRDEEGLGPRPLGGACRWWAHESLTVLHEELSDLGIPLLFAAGRAEKIIVQLASSLGVTAVRWTRRYASASRALDGQIKTVLNDQGFTVHSHTGALLVEPWTAAPQSSDHYKVFTPFWKAVAGRDVGDVLPKPQAQSPLSQTLLSRAHECPAVMELDGLGLLDGTETGAGEAAAASGPRWWQDTIAGHWSPGLRAAEDQLDDLSAIIDGYTTSKDVPSDAASTSRLSPRLRHGELSPRQLLQAARTTSSLTQDDRAAWIRQLYWREFSWHLTYHYPHIDSAPIRPEFHNFPYEDDDDALTHWRAGTTGYPLIDAGMAQLWQTGWMHNRVRMVTASFLTKNLLQHWWFGEQWFWDTLVDADEANNPVSWQWVAGSGADAAPYFRVFNPERQRERFDPDDAYIEDWLPYTPATAPPPLVDLRQSRQAALSAYDHMKNRSTTRDNPGES

SEQ ID NO: 37592 - protein, 370 aa, Zea mays
  misc_feature (221)..(221): Xaa can be any naturally occurring amino acid
  unsure (1)..(370): unsure at all Xaa locations
MEAMDVKYKPVMFPNGAGLKKPKPAAAVALAGEPLYRECLKNHAASLGGHAVDGCGEFMPSPGANPADPTSLKCAACGCHRNFHRRTLEGSPPPPAPAPLALPPPPSVMHGQPHRAREETPEDRHPGVVDADDSDSDSEGSEYDEERSVSPPPPPHHLLPAPVAQQPPPPSYFPTAPHMVLSLGSGVPGPAVAVSPAQRLAPTQLTPSSAPPHAGGAMPMXRKRFRTKFTAEQKQRMQELSERLGWRLQKRDEAIVDEWCRDIGVGKGVFKVWMHNNKHNFLGGHSARRSASSPAPAPAAASLQTPAAGAGAAAAPSFHPSRITPPPPVLTSSPTAATGFNINGAASSAPTVATDYTTDNANGASSPHSA

SEQ ID NO: 37593 - protein, 338 aa, Leuconostoc pseudomesenteroides
MEALVLTGTKKLEVENIEQPEVKPNEVLIHTAFAGICGTDHALYAGLPGSADAVPPIVLGHENSGVVAEIGSDVTNVAVGDRVTIDPNIYCGQCKYCRTARPELCENLSAVGVTRNGGFEEYFTAPASVVYQIPDNVSLKSAAVVEPISCAVHGIQLLKVTPYQKALVIGDGFMGELFVQILQAYGIHQVDLAGIVPEKLAMNKEKFGVKNTYNTKDGDKIPEGTYDVVVEAVGLPQTQEAAIEASARGAQVLMFGVGGPDAKFQMNTYEVFQKQLTIQGSFINPNAFEDSLALLSSGKLDVESLMSHELDYQTVDDFVNGKLGVVSKAVVKVGGEEA

SEQ ID NO: 37594 - protein, 226 aa, Crocus sativus
MGRGKIEIKRIENTTNRQVTFCKRRNGLLKKAYELSVLCDAEVALIVFSTRGRLYEYANNSVKGTIDRYKKACTDTSNSGTVSEANSQYYQQEASKLLQQIAQLQNSNRNLMGESLSTMSPRELRQLEGKLEKGINKIRAKKNELLYAEIEYMQKREMELQNDNMYLRNKISENERAQQHMNMLPSATATEYEAMPPFDSRSFLQANLVDPNHHYSHQQQTALQLG

SEQ ID NO: 37595 - protein, 228 aa, Crocus sativus
MGRGKIEIKRIENTTNRQVTFCKRRNGLLKKAYELSVLCDAEVALIVFSTRGRLYEYANNSVKGTIDRYKKACTDTSNSGTVSEANSQYYQQEASKLLQQIAQLQNSNRNLMGESLSTMSPRELRQLEGKLEKGINKIRAKKNELLYAEIEYMQKREMELQNDNMYLRNKISENERAQQHMNMLPSATATEYEAMPPFDSRSFLQANLVDPNHHYSHQQQTALQLGFV

SEQ ID NO: 37596 - protein, 330 aa, Stenotrophomonas maltophilia
MILDNVVWGFIGCGSVTEKKSGPALASTPGSRVAAVMRRNAALAEDYARRHAIPRWYADADALIADPEVNAVYVATPPSTHMQYALQAIAAGKPVYIEKPMAMDHDECQRIIAASARSGVPVFVAYYRRALPRFAQVKQLLDNGAIGTPRSVRATLHRPHSANAASPDFWRTNPSIAGGGLFVDLGSHTLDLLDHLLGPLSDVRGLASSLTGAYAAEDSVSMCFRTGSGAHGIAQWSFCAFRRQDEVEITGDRGQLRFATFEDVPVVLETEAGMQAFDIPNPPSVQQPLIASLVDELRGNGRSPSTGISAARTSAVIDQVLRDYRTRQSR

SEQ ID NO: 37597 - protein, 435 aa, Debaryomyces hansenii CBS767
MTSPNFNISSELAVKYETDYSAHNYHPLPVVFTKAKGAHVWDPEGKEYLDFLSAYSAVNQGHCHPKIVEALVDQASKLTLCSRAFSSDVFGVFAKYITEYFDYEMVLPMNTGAEAVETGLKLARRWGYVEKGIPEDEAVILSAVNNFHGRTLGVISMSTDPEATSKFGPYLQGVGPQIPGEPKGTLLRYGEIEDVEKAFNNAGDKIAAILLEPIQGEAGIVVPPEGYLTKVQALCKKHNVLLICDEIQTGVARTGKMLCYEHSANVKPDVILLGKAISGGVMPVSAVLSSKKIMLCLEPGSHGSTYGGNPLACRVATAALQVVKDENLVDRSNKLGELLRSKLEELKAKSNGVISEVRGKGLLCAIVIDDSKTNGRTAWDLCLLMKDHGVLAKPTHDHIIRLAPPLVISEADLLKGVDSIEKSLLELNDAPKAAH

SEQ ID NO: 37598 - protein, 137 aa, Zea mays
MSLGLHVEIFVMFVFLLQGGWENDETVEEAAAREAIEEAGVRGDIVHFLGLYDFKSKTHQDACCPEGMCRAAVFALHVKEELASWPEQSTRQRTWLTVPEAASSCRYQWMQEALLTGFSDWHDKWSRGGGGTNCDPA

SEQ ID NO: 37599 - protein, 413 aa, Listeria monocytogenes str. 4b H7858
MLVYLIIGAILFFVMRALGELLIHNPTTGSFTEFAEQFIGPWAGFITGWTYWFCWIVTGIAEITAVGMYVKFWVPDLPQWIPALACVLILLLFNLATVKAFGEIEFWFAIIKVVVIIALIVIGFVLVFIGYKHGTSTASFSNLVDYGGFFPNGIAGFLLAFQMATFSFVGIELVGVTAGEADDPERTLPKAINNIPIRILIFYIGALLVLMSIYPWSNIDPNTSPFVSVFTMIGIPAAAGIINFVVLTAAMSSCNSGIFSTSRMLYTLSAEGKAPKKMHHLSSNGVPATALITSTACLLIGVFLNYFLPEQVFILVTSIATICFIWVWGVILVAHLRFRHKHPEIAEKSKFKMPLSPLMNWVSLIFFGGLLVILGFAADTRIALFVTPVWFLILGIAYQVLKASNRKTKIRHN

SEQ ID NO: 37600 - protein, 213 aa, Methanococcoides burtonii DSM 6242
MFNTLIFDADGVLVNSMPFHADAWIQTFSEVGIDVIRQDIYDIEGSNFVGIIELIFKKAGRDADPELIEKLRVRKRELFFKYEKATAFEGMYDFLNEKKDKYNLAVVSGSDRPIIDKMFNKLYPDIFDLLISGADVAHGKPHPEPYLKAVEYFGVDKEKCLVIENAPLGVESAKNASLYCVAVSTHVNPKGLEKADKVFNNHSELLEFLKQLV

SEQ ID NO: 37601 - protein, 490 aa, Xanthomonas campestris pv. campestris str. ATCC 33913
MPRFPDQLLYIGGRYVPARGGHTFEVVNPATGEVLANVHNADADDLDAAVDSAKAGQRHWAALTVVERSRILLRAVALLRERNDALAELETLNTGKPLSETRSVDIVTGADVLEYYAGVAQALQGVQVPLREGSFFYTRHEPLGVVGAIGAWNYPIQIALWKAAPALAAGNAMIFKPSEVTPLTALKLAEIFTEAGLPDGVFNVLPGDGASVGHALTEHPEIEKISFTGGTATGRKVMASASSSSLKDVTMELGGKSPLIVCADADLDLAADIAMMANFYSSGQVCTNGTRVFVPRALRTAFEARLLARVQRIHIGDPLDERTTFGPMVSAAHMQRVLEHIEQGKAEGARLLFGGERLRDGALAQGCYVAPTIFSDCTDVMTIVREEIFGPVLSLLTYDDEDEAITRANATSYGLAAGVVTPDLSRAHRLIHRLEAGICWINTWGESPAPMPVGGYKQSGVGRENGLATLQAYTRTKSVQVELERYASVF

SEQ ID NO: 37602 - protein, 75 aa, Populus tomentosa
MAYQNEPQESSPLRKLGRGKVEIKRIENTTNRQVTFCKRRNGLLKKAYELSVLCDAEVALIVFSSRGRLYEYSNN

SEQ ID NO: 37603 - protein, 197 aa, Leptospira interrogans serovar Copenhageni str. Fiocruz L1-130
MFNLKILIFIYIIFFSPNLMATPKTEKATFAGGCFWCMEGPFESLPGVISVVAGYSGGKEFYPTYQEVSRGKTGHRESVQIEFDSSKIRYEELLTVFWNQIDPTDNGGQFADRGNQYRTGIFYHNQTQKKAAEKSKREISESKKFPGSIVVEIIPFTSFYPAEDYHQNYYKTNSEQYKKYKKYSGREDYLEKMCRQR

SEQ ID NO: 37604 - protein, 297 aa, Oryza sativa (japonica cultivar-group)
ACANLKGAFLVAVIFLSLCLVITLIFAKEVPFKGNAALPTKSNEPAEPEGTGPLAVLKGFRNLPTGMPSVLIVTGLTWLSWFPFILYDTDWMGREIYHGDPKGTDPQIEAFNQGVRAGAFGLLLNSIVLGFSSFLIEPMCRKVGPRVVWVTSNFLVCIAMAATALISFWSLKDFHGTVQKAITADKSIKAVCLVLFAFLGVPLAVLYSVPFAVTAQLAATRGGGQGLCTGVLNISIVIPQVVIALGAGPWDELFGKGNIPAFGLASGFALIGGVAGIFLLPKISKRQFRSVSMGGGH

SEQ ID NO: 37605 - protein, 515 aa, Glycine max
MGNCSSGAGAPTTYSDDHPHHNGITVLPPNSNPSPQLPKPPPTSSSSSSLGRVLGRPMEDVRSIYIFGRELGRGQFGVTYLVTHKATKEQFACKSIATRKLVNRDDIDDIRREVQIMHHLTGHRNIVELKGAYEDRHSVNLVMELCAGGELFDRIITKGHYSERAAANSCRQIVTVVHNCHSMGVMHRDLKPENFLFLSKDEDSPLKATDFGLSVFFKPGDVFKDLVGSAYYVAPEVLRRSYGPEADIWSAGVILFILLSGVPPFWSEKEQGIFDAILRGHIDFASDPWPSISSSAKDLVKKMLRADPKQRLSAVEVLNHPWMREDGASDKPLDVAVLSRMKQFRAMNKLKKVALKVIAENLSEEEIIGLKEMFKSMDTDNSGTITLEELKAGLPKLGTKVSESEVRQLMEAADVDGNGTIDYIEFITATMHMNRMEREDHLYKAFEYFDKDRSGYITMEELESTLKKYNMGDEKTIKEIIVEVDTDNDGRINYDEFVAMMRKGKPDLVTNRRRK

SEQ ID NO: 37606 - protein, 75 aa, Populus tomentosa
MEYQNESLESSPLRKLGRGKVEIKRIENTTNRQVTFCKRRSGLLKKAYELSVLCDAEVALIVFSTRGRLYEYSNN

SEQ ID NO: 37607 - protein, 459 aa, Prochlorococcus marinus str. MIT 9312
MIKKILEFQFDLIVVGAGSGGLAAAKRAASYGAKVAIIEVNKIGGTCVIRGCVPKKLMVYAAKSKKNMDSSEGYGLKSEGISFESDILLKNVREEVSRLSDLHRNSLNKLDVTVFEGLGRFTAQNELEIICPKTKKIINKISSKKILISVGGKPKKLNIPGMDLAWTSDDIFELENFPKSILIVGGGYIACEFASIFRNLGTEVTQLIRGQRLLNGFDEDLSSCLEESPTFTGINIIFNTQLKSIRRVNGNLESTLDSGEKILTNNILIATGREPNLIPLNLDFLNLKMDGQYLDVNELNQTSNANIFAVGDIINRPNLTPVAIEQGRVFSDNFFNDQKRKVNYENIPKAVFTIPEISTVGLSEKRAKEVYSEKNIKIFKCKFTPMSNTFKEKKTKCMLKIVVNSITDKVLGCHMFGETSSEIIQMVSIALNAGITKKDFDTTMALHPTISEEFVTMYG

SEQ ID NO: 37608 - protein, 382 aa, Carboxydothermus hydrogenoformans Z-2901
MQKKYLMIPGPTPIPPEVTLAMSRPMIGHRSGDFAKLHERVVAKLKQVFKTQNDIFILTNSGTGGMEMAVANVVNPGDEVLALSTGNFGERFAKIAKEYGAKVDMVDFGWGNAVDLAVVEEKLRQNPNYKAVLATHNETSTGVKNDIAGIAALTKNHRAVLIVDAVSSLGGMEFDTDGWGVDVVVTGSQKALMLPPGLAFISFSQKALEAAQDNKNPKFYFSLPAAKKALAEWNTAYTPAVSLFFGLEAALDLILEEGLDKVIKRHKLLAKACREGVKALGLKLFPAEENASDTVTAVAGDDRYDPEQLRKVLRTKYGVTFAGGQKDLKGKIFRIGHMGYVDKLDIIVAIGALEMALKEIGYPVELGAGVKKAMEVITGGEA

SEQ ID NO: 37609 - protein, 352 aa, Nostoc sp. PCC 7120
MKAQVFRGVNQLSYEEIPLPILEPDEVLVQVQVVGLCQSDIKKIRYPLYEPPRIFGHETAGTIAAVGSQVQGWQVGQRVAVMHHIPCMRCAYCMNENFSMCDVYKNISTTAGFNASGGGFAEYVKVPGHIVENGGLIPIPDGISFEEASFVEPTNCCLKAVKKAQIAPGQTVLVTGAGPIGLMFVMLVKYFGAKAIATDLLPSRIEKALNVGAEAAFDARDPDLPAKVHALTNGLGVDVTLLAVPSEKAFFQALECTRKGGKILFFAEFPDELEIPINPNILYRREIDLMGSYSSSYRLQNLSADIVFNRRIDVQALISDRYPLKDLSAAVDQAIAPTPETYKILIYPKIGD

SEQ ID NO: 37610 - protein, 280 aa, Prochlorococcus marinus str. MIT 9312
MKDNKMQITKNESLSKVDEKFYELKKNKKIALMPFIMAGDPNIEITSEILLKLQENGADLIELGIPYSDPLADGPVIQVAASRALKSGTTPRKVITILESLKGKLNIPIILFSYLNPLLCFGFEQFCETASNAGVSGLIIPDLPLEEACKFSKIVSNHSMDLILLVAPTTPFERMKQISNHTKGFTYLVSVTGVTGERNKMENRVENLIAKLKEINSNPIAVGFGISTPEHVNKVREWGADGVIIGSAFVKRISSSSERDVVDHVGEFCKDMRLAADQKK

SEQ ID NO: 37611 - protein, 394 aa, Methanosarcina acetivorans C2A
MKAVVYKGPRNVDVEEVKKPEIEKPTDVIIKVTSSGICGSDLHLYDGHGPDGLGTILGHEPMGVVEEVGDAVELVKPGDRVVIPFNVACGSCLNCIRGLTNMCLTMNPDAAIANYGYPGAGPYAGGQAEYLRVPYGDWACLKLPGEPGDEFEDDFVMLADIFPTAYYAAELAKVKTGKTVAVFGAGPVGLLAAYSSMLMGASEVYVVDKSDKRLKLAESIGAVPINFTDGDPVEMIMQIRQNNKNLMSSLRPGEEKVLGVDCAIDAVGYQALDRNNSEEFKPNQVLMDIARIIAPGGSIGVIGVYSPDPAGKDENEKQGYLTLPWAELWFKGVSIGTGPTPVKQMHGFLRNLIFNGKAKPSFIVSDRISIDEAPEAYKQFDKRDDVVKPIIKFH

SEQ ID NO: 37612 - protein, 429 aa, Nocardia farcinica IFM 10152
MALESSRTAFERARRSVGGGVGSGLRAAMRPHPLFVREARGAHLWDLDGDRYVDYVMAWGPLVLGHSDPRILSAVSEAATKMQVVGTGHALEYLAAEAVLDAVPHGERLLWSNTGTEAVQVALRLARAATGRRRVLKFAKSYHGWHDTVYAGMSEDDSDRPARPGSKGQSPSVLDDLVVARFNDIHLAERLLRESVERDIAAVLIDPVMSNAGVEAPAPEFLSTLRDLCDRHGVVLVFDEVIAGFRIARGGAAEKYGVLPDLSVYGKAMAGGFTQSAVVGRADLVDQVTTGVTHAGTFNANPIALAAVEATMRVLADPDVYEALETISAEFHSVVGAVLGSVPGSGSFNRVGSLLQYVPAGGTTGLHGTGGLWTTIMEGMLRRGFLFMPSGKIFLSTAHTTADIEATAAALLHVISLSSSRDGSDRTLD

SEQ ID NO: 37613 - protein, 127 aa, Brassica napus
MGRLFVIDLQGETYSCKHCHTPFALTDDLISKSFHCKHGRAYLFENVVNVTVGEMEHRIMMTGWHTVADIFCVCCGSLVGWKYEIAYEKSQKYKEGKFIIERFKVLGPDGGGYDMNEDEPMIGSDEE

SEQ ID NO: 37614 - protein, 80 aa, Poa secunda
MSCCGGSCGCGSGCKCGNGCGGCKMYPGMDEGLTTSQTLIMGVAPSSKPSFEDDAAAATGAENGGCKCGDNCTCNPCTCK

SEQ ID NO: 37615 - protein, 370 aa, Oryza sativa
MGAVQGSQEPTMAGDGLPRIAVVGAGIFARTQYIPRLREIAHLVLLKTIWSRTKESAEAAAELARDFAPEIQPRWGDAGLEEIMGDASISAVAVVLAGQVQVDLSLKMLKAGKHVIQEKPASGSTMEAETALSVYNSFPNQFPYKPIWALAENYRFEPAFVESRKLMSDIGDMMNIQVIVEGSMNSSNPYFNSSWRRNFVGGFILDMGVHFIAGLRMMVGSEIATVSSISRHVDKALPPPDNICSLFQLENGCAGVFVFAVNSRTPKILWRVDGTRGTVQIERGIASGKHGYQVLFTNENGQCQTTFYPFCGVNEELKAFVHDIVQANKDGDHKAEPRSSYVEGARDVAVLEAMLESSAKQGTMVQVKKF

SEQ ID NO: 37616 - protein, 459 aa, Saccharomyces cerevisiae
MPSNVRSGVLTLLHTACGAGVLAMPFAFKPFGLMPGLITLTFCGICSLCGLLLQTRIAKYVPKSENASFAKLTQLINPSISVVFDFAIAVKCFGVGVSYLIIVGDLVPQIVQSIFYRNDDNMSGSQEHHMFLDRRLYITLIIVFVISPLCFKRSLNSLRYASMIAIVSVAYLSGLIIYHFVNRHQLERGQVYFMVPHGDSQSHSPLTTLPIFVFAYTCHHNMFSVINEQVDKSFKVIRRIPIFAIVLAYFLYIIIGGTGYMTFGENIVGNILTLYPNSISTTIGRLAMLLLVMLAFPLQCHPCRSSVKNIIIFIENFRKGKLYDNRASFIPLDNFNSEDPQEAPTQQNNEEPNLRSESLRHINIITLCILLFSYLLAISITSLAKVLAIVGATGSTSISFILPGLFGYKLIGSEFTGTNERVPTSIKIFKYLSLSLFIWGIAVMVASLSAIVFLGTSSH

SEQ ID NO: 37617 - protein, 306 aa, Arabidopsis thaliana
IDSMNWLPEAEAEDDFKGLLSGDFFDDLINHLDVPLDDIDTTNGEGDWVDRFQDLEPPPMDMFPTLPSDLTSCGSGMAKAPRVDIQRNIPALKQSYSSEALSSTLHQSSAPPEIKVSKLFQSLSPVSVLENSYGSLSTHNNGSQRLAFPVKGMRSKRKRPTTLRLSYLFPSEPRKPEKSTPGKPESECYFSSEQHAKKKRKIHLTTRTVSSTLEASNSDGIVRKCTHCETTKTPQWREGPSGPKTLCNACGVRFRSGRLVPEYRPASSPTFIPAVHSNSHRKIIEMRRKDDEQFDSSMIRAVISRG

SEQ ID NO: 37618 - protein, 325 aa, Pseudomonas fluorescens Pf-5
MAKRIQFRAHGGPEVLEYVDYQPAEPGPQQVRVSNKAIGLNFIDTYFRSGLYAPPALPSGLGAEGAGVVEAVGSAVTRFKVGDRVAYGSGPLGAYSDVHVLPEANLVRLPDAISFEQAAGVMLKGLTVQYLLRQTYELQGGETVLFHAAAGGVGSLACQWAKALGVKLIGTVSSPEKAAIAKALGAWETIDYSHEDVARRVLELTGGKKCPVVYDGVGKDTWLTSLDCLAPRGLMVSFGNASGAVDGVNLGILSAKGSLYVTRPTLASYANNAENLQRMADDLFGMIASGKLKIEIGQRFALVDAAKAHIELSARRTTGSTVLLP

SEQ ID NO: 37619 - protein, 211 aa, Mycobacterium bovis AF2122/97
MANTDRPALPHKRAVPPSRADSGPRRRRTKLLDAVAGFGVTLGSMFKKTVTEEYPERPGPVAARYHGRHQLNRYPDGLEKCIGCELCAWACPADAIYVEGADNTEEERFSPGERYGRVYQINYLRCIGCGLCIEACPTRALTMTYDYELADDNRADLIYEKDRLLAPLLPEMAAPPHPRAPGATDKDYYLGNVTAEGLRGVRESQTTGDSR

SEQ ID NO: 37620 - protein, 782 aa, Thiomicrospira crunogena XCL-2
MKTHLLGYPRIGAKRELKFALEAYWKGESSEQRLYEVAQHLRQTHWQTQLNAGMDLLPVNDFAYYDQVLNMSTLLGVIPKRFRQTSYTLDIAFRMARGRAPSDDVVNCCAGHTDPSCEQESKADYAGAMKKWFDTNYHYIVPELEDDTEFVMTDTRLFEEVAEAIQFTGKAKNVKPVLVGPITYLYLAENKGTAIPKLSRLQALLGVYTQILKRLAEQDIEWVQIDEPILVLDLSDDWQTAFKDAYEGLAQAPVNILLATYFETLSNNLDLTCHLPVAGLHYDALRGAHQLNDVIANYPAEKVLSLGVVDGRNIWKTDLTDAARQLEPAKTKFGDRLWLAPSCSLLHVPVNLEVEVNLNSELKNYLAFAKQKLSEIKLLADAVEGQANEEALQINRQALEEKAASTLIHDAKVQARIATLDSIALDRATAYAERTKGQKAKFQLPLFPTTTIGSFPQTQAIRQARRQFKQGDLSETRYIAAMQAEIHEVIERQERIGLDVFVHGEPERNDMVEYFGEQLDGYAFTQFGWVQSYGSRCVKPPIIYGDVSRPKAMTVSWSQYAQSQTDKIMKGMLTGAVTMLQWSFVRNDQPRETTCNQIALALRDEVQDLEAAGIEMIQIDEAALREGLPLKQSDWADYLRWAVNSFRLTTSGVKDSTQIHTHMCYSEFNDIIDAVAKMDADVITIETSKSQMTLLEAFVDFDYPNEIGPGVYDIHSPNIPSVEQMVDLIQKAAENIPVERLWVNPDCGLKTRGWSETEPALTHMVQAAKMLRKQFEDQVKSA

SEQ ID NO: 37621 - protein, 389 aa, Streptomyces coelicolor A3(2)
MRDAVVVEAVRTPIGKGKPNGALAHVHPVELLAHTLRTLVERSGVDPALIDDVIGGTVDQVGEQAMNTTRYALLSAGFPESVPATTVDRQCGSSQQAVHFAAQGVMAGAYDLVVACGVESMSRVPMWSNVPPGADPFGPGVAARYPQGLVPQGISAELIAAKWSLSRERMDAFAVSSHQKAATAHAAGRFDAEIAPLDGVSHDECVRPDSSVEVLAGLRPAYHDPAFAERFPQIGWNVTAGNASPVNDGASAVLITSGDTAARLGLRPLARLHSFAVTGSDPLLMLTGVVPATEKVLRRASLSLGDIDLFEVNEAFASVVLAWQRETGADLAKVNVHGGAIALGHPLGASGTRLTTTLVHALHERGARYGLQTMCEAGGLANAMILEAV

SEQ ID NO: 37622 - protein, 750 aa, Leptospira interrogans serovar Copenhageni str. Fiocruz L1-130
MALKPKEHIMNILYSFPRVSWDNLRHDFSAGLVVFLISLPLCIGIGFASGAPIVSGLISGIVGGIVISLISKSPLSVSGPAAGLTVIVFDSIKTLGNFNDFLLALCLAGIFQIILGFLKAGILSNFFPSAVVKGMLAAIGVVLILKQIPHAIGYDIDYEGDMGFFQKDRENTFSEILTAFYRFTPGAIILFTVALVLILIWEKFKLHEKFIIHGSLVAIVTGVLLNEMFRIFELGIVVSGEHLIQPIQLNGALDLFLDDYSPNFSQWKNQTIYFIAIKLCLVMSLETLLNLDAIEKIDPQRRIVSKNRELVAQGTGNLCSAILGGLPITSVIIRSSANLHAGARTRFSSFLHGLLILVSVILIPVWIAKIPLASLAAVLLVVGYKLTDYKILQTQYKKGMDQFLPFISTLVGIVFTDILVGIGIGCLFSVFFIMRRNILNPYQFNKKEMAYGVEVKIDLSEDVSFLNKSSMLYKLDKVPDNAHLIIDGSRSKYIDPDVLEIIEDFKIVARSRNIKLEIIDVTSSYEKIQNKPLDLVLQQDYQKLFENNRIWVEEKLSKDPDYFKNLALGQTPQYLLISCSDSRLSVNEMTGTSAGELFVHRNIANLVIDTDMNLMSVLQYSVEVLKVKHIVVCGHYDCGGVKTAIDGKYHGLIDAWLRHIKQVYRMNRKELSGILDENEKHERLVELNVREQVYNLCMTTIVQNAWSRGNDLQLHGWVYDLKQGKILDLNIDIDKDFRDYDIFRYQFETH

SEQ ID NO: 37623 - protein, 465 aa, Glycine max
MVKSEIEKKGCSTRQWLWLVMALVAVFVAMAMSSKTSPKALFGAIDRACPCARGTPKYSGMVEDCCCDYETVDRLNEEVLHPSLQELVKTPFFRYFKVKLWCDCPFWPDDGMCRLRDCSVCECPENEFPESFKKPDRRLSMTDLVCQEGKPQAAVDRTLDSKAFRGWTEIDNPWTNDDETDNDEMTYVNLQLNPERYTGYTGPSARRIWDAVYSENCPKYPSQELCQEEKILYKLISGLHSSISIHIASDYLLEEATNLWGQNLTLMYDRVLRYPDRVRNLYFTFLFVLRAVTKASDYLEQAEYDTGNPNEDLTTQSLIKQLLYNPKLQAACPIPFDEANLWKGQSGPELKQKIQQQFRNISALMDCVGCEKCRLWGKLQVLGLGTALKILFSVDGQENSSHTLQLQRNEVIALTNLLNRLSESVKFVHEVGPTAERIMEGGHFSAHTRTLISSWKKIWSYVSKT

SEQ ID NO: 37624 - protein, 75 aa, Populus tomentosa
MAYQNEPLESSPLRKLGRGKVEIKRIENTTNRQVTFCKRRNGLLKKAYELSVLCDAEVALIVFSSRGRLYEYSND

SEQ ID NO: 37625 - protein, 395 aa, Bradyrhizobium sp. BTAi1
MTEAVIVSTARTPIGKAYKGALNHTGGATLLGHAISAALSRSGVDGAEVEDVVMGCAMQQGTTGSNIARKALLRAGLPVSVAATTIDRQCASGLQAIALAARSVLFDGVTVAIAGGGESISLVQNDKMNAFHAVDPELHAMKADAYIAMLDTAEVVAERYGISRERQDEYSLESQRRTAAAQQAGRFNDELAPISTTMAVADKATGTISYQPVTLSTDEGPRPDTTAAGLAGLKPAKGPGFTVSAGNASQLSDGASAAVIMSDTLAAQKGLKPLGIFRGFVSAGCEPNEMGIGPVLAVPRLLARHGLKVDDIDLWELNEAFAVQVVYCRDKLGIDPERLNVNGGSIALGHPYGMTGARLVGHALIEGRRRKAKYAVVTMCVGGGMGAAGLLEIVH

SEQ ID NO: 37626 - protein, 429 aa, Geobacillus stearothermophilus
MELFKYMETYDYEQVLFCQDKESGLKAIIAIHDTTLGPALGGTRMWMYNSEEEALEDALRLARGMTYKNAAAGLNLGGGKTVIIGDPRKDKNEAMFRAFGRFIQGLNGRYITAEDVGTTVADMDIIYQETDYVTGISPEFGSSGNPSPATAYGVYRGMKAAAKEAFGSDSLEGKVVAVQGVGNVAYHLCRHLHEEGAKLIVTDINKEVVARAVEEFGAKAVDPNDIYGVECDIFAPCALGGIINDQTIPQLKAKVIAGSADNQLKEPRHGDIIHEMGIVYAPDYVINAGGVINVADELYGYNRERAMKKIEQIYDNIEKVFAIAKRDNIPTYVAADRMAEERIETMRKAASQFLQNGHHILSRRPRPLTAARAGLRRADDGGTTTMQEQKFRILTINPGSTSTKIGVFENERAIASKKRSATRAGASAI

SEQ ID NO: 37627 - protein, 82 aa, Triticum aestivum
MASTRRMAAAPAVLLLLLLLVATEMGTMKTAEARTCLSQSHKFKGTCLSNSNCAAVCRTENFPDGECNTHLVERKCYCKRTC

SEQ ID NO: 37628 - protein, 377 aa, Deinococcus radiodurans
MSNIAKGLEGVLFTESKLTFINGSEGILTHLGIPIQEWAEKSTFEELSLALLDAKLPTAEELAKFDAELKANRAIPDQLVGIIRDMPKGVHPMQALRTAVSYLGLLDPQAEDITPEARRAISTRMIAQFSTIIAAINRAQEGQDIVAPRADLTHAGNFLYMLTGNEPTPEQARLFDIALVLHADHGMNASTFTAIATSSTLSDMYSCMVSAIGALKGPLHGGANEAVMTMLDEIGTVDKAEAYITGKLDNKEKIMGVGHRVYKYFDPRSRVLRDYAEHVANKEGKSNYYQILEAIEKIIVDRMGAKGIYPNVDFYSGTVYSDLGIKKEYFTPIFALARISGWCASVIEYSQDNRLLRPDAEYTGARDQHYVDIKDRQ

SEQ ID NO: 37629 - protein, 91 aa, Picea mariana
MEQQQDRRELDAKAREGETVVPGGTGGKSLDAQERLAEGRSRGGQTRKEQIGSEGYQEMGRKGGLSSAGGPGGERASEEGRPIDESKYRHP

SEQ ID NO: 37630 - protein, 191 aa, Xylella fastidiosa Ann-1
MASPCLSVALKALCFRGASTHLSINRVRRLSMNVVRYTPWPGQAVLQNEIKQVFDRFFEHNGDTDESAVVTAQWVPRVDIKEEPNQFVLYADLPGIDPADIEVQMDKGILSIKGERKTESSSQTEHFSRIERRYGSFHRRFALPDSADADGITASGSHGVLRILIPKQAATTPRRIQVGNAVSSDVALQSM

SEQ ID NO: 37631 - protein, 405 aa, Arabidopsis thaliana
MDSVFSNVARAPEDPILGVTVAYNNDPSPVKINLGVGAYRTEEGKPLVLDVVRKAEQQLVNDPSRVKEYIPIVGISDFNKLSAKLILGADSPAITESRVTTVQCLSGTGSLRVGAEFLKTHYHQSVIYIPKPTWGNHPKVFNLAGLSVEYFRYYDPATRGLDFKGLLEDLGAAPSGAIVLLHACAHNPTGVDPTSEQWEQIRQLMRSKSLLPFFDSAYQGFASGSLDTDAQSVRTFVADGGECLIAQSYAKNMGLYGERVGALSIVCKSADVASKVESQVKLVVRPMYSSPPIHGASIVATILKSSDMYNNWTIELKEMADRIKSMRQQLFEAIQARGTPGDWSHIIKQIGMFTFTGLNKEQVEFMTKEFHIYMTSDGRISMAGLSSKTVPHLADAMHAAVTRLG

SEQ ID NO: 37632 - protein, 930 aa, Dunaliella salina
MLSSHAKSSSSSRNLAGMLENGGFEGEGSGSCGGSRQQARDPRRTSLSVNSGRVIIASNHLPLRVKKSSTGEWQFEFDEDALTAQAKDGVPRSHFQEVLYVGGLPVDVEPEEQENIAIKLKDLYNCCPVYLDSAVKERFYKGFCKQQLWPLFHYVLPGSPSSSQRFNVEFWQAYVKANKCFADKIVEESLTDTEFVWIHDYHLLVLPSLLRKRFNRIRAGVFLHSPFPSSEIFRTFPKREELLRSLLNADLIGFHTFDYARHFLSCCSRMLGLEHETSRGSITIDYYGRTVGIKIMPTGVNPKRYLDGFSWDEFKWRRGELEAQFKGMTVLAGVDDMDSFKGIDLKLQAFERLLEYHAEWRGKVVLVQVTNPPRSTGHDITELHAFVTNLVASINYKYGNPSTNYVPVHYLERHVPLHERMAFYSIADCVVVTATRDGMNLVPYEYIVCRQGSDTTPCAESTVESGPRDSMLVVSEFVGCSPSLSGAIRVNPWSIDSGYNGMYAAICMPLEHRRLRHQKHWRYVSQHTVAFWAQSYLMDLVRVTRNHVTMKCYGLGLGLDTFRMVALDANFRKMEESQVAATYKSSKSRVFFLDYDGTLTAGQHTSITLAPLDEVLQVLRALTAEPLNKVVLFSGRPKAELQEWFASVPNLALVAENGCYLRLGEGQTWRSHLTPGLQVADQSWVSLVVAADFGWKKMALPILQQYQESTDGSSIEAKESALVWYYKDADPDFGSWQAKELLDHLEGVLSNKPVEIVGGSSAVEIKPQGVSKGQAVEKMLGQLYGYPAIAERRSSSSRPMGRPSSDASERRPSSSRFSMSDRGPSAGSAAVQSAASSVQGGGAEAAAQQELAAAGKGPDFVLCIGDDRSDEDMFTSIEMMRASPQMMSSEVYACTVGQKPSRAPFYLNDPGEVLHLLARLVGINLPNLPL

SEQ ID NO: 37633 - protein, 536 aa, Prochlorococcus marinus str. MIT 9312
MSKFVFVTGGVVSSIGKGIVAASLGRLLKSRGYSVSILKLDPYLNVDPGTMSPFQHGEVFVTEDGAETDLDLGHYERFTDTAMTRLNSVTTGSIYQAVINKERRGSYNGGTVQVIPHITREIRERIHRVASNSNADIIITEIGGTVGDIESLPFLEAIREFKNDVNRNDVAYIHVTLLPYIKTSGEIKTKPTQHSVKELRSIGIQPDLLVCRSDKSINEGLKKKLSGFCGVNINSVIEALDADSIYSVPLSLKKEGLCKETLKYLELEDKECDLKNWEKLVHNLRNPGTPIKVALVGKYIELGDAYLSVVEALRHACIEQKALLDLHWVSAEMIEKDSAETYLNEVDAIVVPGGFGNRGVNGKISAIKFARENKIPFLGLCLGMQCAVIEWARNVANLPDASSSELDPKTPNPVIHLLPEQEDVVDLGGTMRLGVYPCRLTNNTIGKKLYDEDVIYERHRHRYEFNNYYKQSFLNSGYKISGTSPDGRLVELIELDNHPYFLACQYHPEFLSRPGKPHPLFKGLIKSSQENLTQSN

SEQ ID NO: 37634 - protein, 324 aa, Candida parapsilosis
MSTATASPAVKLNSGYEIPLVGFGCWKLTNDVASDQIYRAIKSGYRLFDGAEDYANEQEVGEGIKRAIKEGIVKREELFITSKLWNSFHDKKNVEVALMKTLSDLNLDYVDLFYIHFPIAQKPVPIEKKYPPGFYCGDGDKWSIEEVPLLDTWRALEKLVDQGLAKSIGISNFSAQLIYDLIRGCTIKPVALQIEHHPYLTQPKLVEYVQLHDIQITGYSSFGPQSFLEMDLKRALDTPVLLEEPTVKSIADKHGKSPAQVLLRYQTQRGIAVIPRSNSPDRMAQNLSVIDFELTQDDLQAIAELDCNLRFNEPWDFSNIPVFV

SEQ ID NO: 37635 - protein, 270 aa, Pseudomonas fluorescens Pf-5
MSRLQTRFAQLKEQNRAALVTFVTAGDPNYDTSLAILKGLPAAGADVIELGMPFTDPMADGPAIQLANIRALGAKQNLAKTLQMVREFREGNSDTPLVLMGYFNPIHHYGVPRFIADAKAAGVDGLIVVDMPPEHNSELCDPAQAAGIDFIRLTTPTTDDARLPKVLDGSSGFVYYVSVAGVTGAGAATLEHVEEAVARLRRHTDLPISIGFGIRTPEQAAAIARLADGVVVGSALIDHIASAESSEQAVDGVLSLCAALSEGVRKARVS

SEQ ID NO: 37636 - protein, 292 aa, Zea mays
MRASALVCFVAVSACIACIAHGGNFYQDTEMTWGDGRGKVVDGGRGLDLTLDRTSGSGFQSKDEYLFGKIDMQIKLVPGNSAGTVTAYYLSSQGDAHDEIDFEFLGNVSGEPYTLHTNVFTRGRGQREQQFRLWFDPTADFHTYSILWNPRHVIFAVDGTPVRDFANREARGVAFPRTQPMRLYASLWNADDWATQGGRVKADWSKAPFVASFRGFSADACVWDGGRQRCPEGTMEAAAVAGAGSGRGWWNQQLSDMSYRRMRWVQRKFMIYNYCADAKRFPQGVPAECKLR

SEQ ID NO: 37637 - protein, 413 aa, Arabidopsis thaliana
  misc_feature (93)..(93): Xaa can be any naturally occurring amino acid
  unsure (1)..(413): unsure at all Xaa locations
MESRVLLRATANVVGIPKLRRPIGAIHRQFSTASSSSFSVKPIGGIGEGANLISGRQLRPILLLDSSAINGGEKREILKPVKAAAAEGGDTAXGKRDAKVGFLAKYPWLVTGFFFFMWYFLNVIFNILNKKIYNYFPYPYFVSVIHLFVGVVYCLISWSVGLPKRAPIDSNLLKVLIPVAVCHALGHVTSNVSFAAVAVSFTHTIKALEPFFNAAASQFIMGQSIPITLWLSLAPVVLGVAMASLTELSFNWLGFISAMISNISFTYRSIFSKKAMTDMDSTNVYAYISIIALFVCIPPAIIVEGPKLLNHGFADAIAKVGMTKFISDLFWVGMFYHLYNQLATNTLERVAPLTHAVGNVLKRVFVIGFSIVIFGNKISTQTGIGTGIAIAGVAMYSIIKAKIEEEKRQGKKA

SEQ ID NO: 37638 - protein, 75 aa, Populus tomentosa
MEYQNESLESSPLRKLGRGKVEIKRIENTTNRQVTFCKRRSGLLKKAYELSVLCDAEVALIVFSSRGRLYEYSNN

SEQ ID NO: 37639 - protein, 142 aa, Yarrowia lipolytica CLIB122
MSDSEVIAEVEVAAAAPSGGLTLEDALKTVLKKAVINDGLVRGLRECSKALSRREAELCVLCDSVTDESYLKLVEALCNEPEEKIPLVKVPDAKQLGEWAGLCQLDREGNARKVVGASCVVITNWGEDSEARQFLLDSIASQ

SEQ ID NO: 37640 - protein, 323 aa, Vibrio cholerae O1 biovar eltor str. N16961
MNALVRLSSNHILRSDSMSRVWLTGDAVVDLIPDGQQHYLKCPGGAPANVAVAIARLCGRSAFFGRVGNDPFGRFMQQTLTDEQVDCQHLYFDPVHRTSTVVVDLDEHGERSFTFMVKPSADQFLQLSDIPSFQNGEWLHVCSIALANQPSRSSTFAAIAQMKEVGGYVSFDPNLREEVWSEPQELQATVMRAVGLADVVKFSEEELQFLTGTQSIEEGLQAIADFQIPLVVVTLGAKGALVVTPNSRQIVSGKAVKPIDTTGAGDAFVGGLLYRLSVAQDWHNQATILDAVKWANGCGALATTQKGAMTALPNQAALYAFLE

SEQ ID NO: 37641 - protein, 165 aa, Arabidopsis thaliana
MNREKLMKMANTVRTGGKGTVRRKKKAVHKTNTTDDKRLQSTLKRIGVNSIPPIEEVNIFKDDVVIQFINPKVQASIAANTWVVSGSPQTKKLQDILPQIISQLGPDNMDNLKKLAEQFQKQASGEGNAASATIQEEDDDDVPELVGETFETAAEEKAPAAAASS

SEQ ID NO: 37642 - protein, 666 aa, Deinococcus radiodurans R1
MTDQSVSQNVARLSVNTIRTLAIDAVQAANSGHPGAPLGMAPMGYVLWHKFLRHNPAHPEWPGRDRFVLSAGHASMLIYSLLHLTGYQEMTLDDLRHFRQWGYHTPGHPEFFHTKGLDATTGPLGQGAAMTVGMAMAEAHLAARYNREGFPIFDNRTYAIMGDGDLQEGINHEAAALAGHLKLGKLIWLHDDNHIQLDTPTNKAESEDTAARFRAYGWNVLKVEDGDNLDEIEKAIAEARSQSERPTLIQVRTIIGFGSPRAGTSKAHGEPLGEEGVAETKKALGWEYPAFTVPDEVAAHMNARAKGAQLEADWEKLMADYRTAHPDLGKEVDALLARELPANLADLLPKYEVGGKAAATRNASGEVINALAKVLPGLMGGSADLSGSTKTTIKDGGEMEAGTMGGRNVLFGVREFGMSAAGNGLSLYGGLHPMVGTFLVFADYLKPAFRLSALQMQPVTYVLTHDSIGLGEDGPTHQPVDQLAMLRAVPGAHVIRPADANETAAAWLMALEYDKGPTALALSRQDLPILPANIEGVKKGAYVLRDVDGADGQGAQVILIASGSEVALALSSAERLAEEGVQARVVSMPCMEVFRQQEQSYRDSVLTPGVKRVAIEAASPQPWYEWTLGGPVIGMTTFGASAPAKVLFEKFGFSVENVVKVVHSVL

SEQ ID NO: 37643 - protein, 436 aa, Prochlorococcus marinus str. MIT 9312
MANIFEVPQPGNDLLEKADQVRLASIKISQTENHNRIKALNSMADCLEKSTKEILEANNEDYTRAQKKGISKALLSRLKLSKEKLNSGIEGVRKVGDLADPVNQVQIKRELAKGLILERKTVPIGVLGVIFESRPDAVMQISSLAIRSGNGVMLKGGSEANLTNTAIVKALKKGLYESGLDKNAICLLTSRKDSMSMLNLEKYINLIIPRGSNELVKFIQENTRIPVLGHADGICHLFIDNEANLEMALSVALDSKIQYPAACNAIETLLVHKDIAQVFLEKAIPLFNSNDVKLIGDKRTVELGVKYEASVEDWQTEYLDLILSIKIVDDLEEAINHIQKFSSKHTDGIITENSTSAKKFMNVVDSAGVFHNCSTRFADGFRYGFGAEIGISTQTLPPRGPVGLEGLVTYKYFLNGDGNIVDDFSSGKAIYTHKDL

SEQ ID NO: 37644 - protein, 369 aa, Synechocystis sp. PCC 6803
MSDMSSLSTPNTSAVDQWQALDGLADGQAIANDDPPAIEVTLGDGQQGSFNKAVSEDTVGAFFKEMARYPLLSAAEEVELARQIRLLVSAEDVRQQLTQQLERTPSLQEWGQALEFPQVRQFEIWLYQLRAAKRRMIRSNLRLVVSIAKRYLNRGVPFLDLIQEGAIGLNRAAEKFDPDKGYKFSTYAYWWIRQAITRTIANDARTIRLPIHVVEKLNKIKKAQRSLKQELKRNPNEGELAAALDITPAQLRQLLQLRRQSLSLNHRVGKGEDTELVDLLEDQQLQLPEDLMNESMLRREIVEVLAEVLTEREMEVICLRYGIASHQSYTLEEVGNMFNLSRERVRQIQSKAMRKLRRPQVARRLKGWL

SEQ ID NO: 37645 - protein, 551 aa, Saccharomyces cerevisiae
MPDLSNAIVAQDEMGTPFIIVKDQGNKKRQHGLEAKKSHILAARSVDSIIKTSLGPRGLDKILISPDGEITITNDGATILTQMELDNEIAKLLVQLSKSQDDEIGDGTTGVVVLASALLDQALELIQKGIHPIKIANGFDEAAKLAISKLEETCDDISASNDELFRDFLLRAAKTSLGSKIVSKDHDRFAEMAVEAVINVMDKDRKDVDFDLIKMQGRVGGSISDSKLINGVILDKDFSHPQMPKCVLPKEGSDGVKLAILTVHLNLLKPKTKHKLDISSVEEYQKLQTYEQDKFKEMIDDVKKAGADVVICQWGFDDEANHLLIQNDLPAVRWVGGQELEHIAISTNGRIVPRFQDLSKDKLGTCSRIYEQEFGTTKDRMLIIEQSKETKTVTCFVRGSNKMIVDEAERALHDSLCVVRNLVKDSRVVYGGGAAEVTMSLAVSEEADKQRGIDQYAFRGFAQALDTIPMTLAENSNLDPIGTLSTLKSKQLKEKISNIGVDCLGYGSNDMKELFVVDPFIGKKQQILLATQLCRMILKIDNVIISGKDEY

SEQ ID NO: 37646 - protein, 367 aa, Wolinella succinogenes
MYEKELAALESSHRLRRRVLWDERLVDFASNDYLGLSSKSNLLELAHKRVKKLSHHSPKASLLVNGYSPLHAEFEEILCYFNGFESGLLLGSGFLANLALIESLVRPKDILFMDSDYHASGKLAAKLLGDRVIFFDHNDPNHLLELIEKHRPQGRMIIAIEGIYSMSGAVAKKEFAQIADFYGALLIVDEAHSSGTLGDHLLGYFDYHALPRAPHYVKMGTLSKAYASYGAYILASKEIISFLENRAKSVIYTTALSLLDTALALENFLYIQEHKERLSQKLQERQDIASSMLGVTLSSPILAYPIPSTPRLLEVAKKLEAAGYLVGAIRKPTVETPILRVILRCSNKKSQVTHLCEKILEYSERES

SEQ ID NO: 37647 - protein, 365 aa, Arabidopsis thaliana
MESRCKKGYFRLAVIGLSKAKDCWEKNACAVTFIGDGGTSEGDFHAGLNFAAVMEAPVVFICRNNGWAISTHISEQFRSDGIVVKGQAYGIRSIRVDGNDALAVYSAVCSAREMAVTEQRPVLIEMMIYRVGHHSTSDDSTKYRAADEIQYWKMSRNSVNRFRKSVEDNGWWSEEDESKLRSNARKQLLQAIQAAEKWEKQPLTELFNDVYDVKPKNLEEEELGLKELIEKQPQDYMMLKELIPNWILGIGTLALRYDFQETLFNGWHAIAELQQLKLKIKLNSLLNDQADTESLKAARNSALNVIQAMIIHLVLTLKGRFSLPLTEETVRFNEPIQLNQNMVKDGGYTAELFPIRKEEQGEVRR

SEQ ID NO: 37648 - protein, 488 aa, Shigella flexneri 2a str. 301
MKKVNHWINGKNVAGNDYFQTTNPATGEVLADVASGGEAEINQAVAAAKEAFPKWADLPMKERARLMRRLGDLIDQNVPEIAAMETADTGLPIHQTKNVLIPRASHNFEFFAEVCQQMNGKTYPVDDKMLNYTLVQPVGVCALASPWNVPFMTATWKVAPCLALGNTAVLKMSELSPLTADRLGELALEAGIPAGVLNVVQGYGATAGDALVRHHDVRAVSFTGGTATGRNIMKNAGLKKYSMELGGKSPVLIFEDADIERALDAALFTIFSINGERCTAGSRIFIQQSIYPEFVKRFAERANRLRVGDPNDPNTQVRALISQQHWEKVSGYIRLGIEEGATLLAGGPDKPSDLPAHLKGGNFLRPTVLADVDNRMRVAQEEIFGPVACLLPFKDEAEGLRLANDVEYGLASYIWTQDVSKVLRLARGIEAGMVFVNTQNVRDLRQPFGGVKASGTGREGGEYSFEVFAEMKNVCISMGDHPIPKWGV

SEQ ID NO: 37649 - protein, 339 aa, Prochlorococcus marinus str. MIT 9312
MGIPLESAKSSSDNNFDEPRLPNTAGKSRKSKSSLTAKQSQKKSGRLASDSIGYYLSSIGRVPLLTPAEEIELAHHVQNMKKLLQIPETDRTQRNLYQIKIGKRARDRMMAANLRLVVSVAKKYQNQGLELLDLVQEGAIGLERAVDKFDPAMGYKFSTYAYWWIRQGMTRAIDNSARTIRLPIHISEKLSKMRRVSRELSHKFGRQPTRLEMATEMGIDQKDLEDLISQSAPCASLDAHARGEEDRSTLGELIPDPNCEEPMEGMDRTIQKEHLGTWLSQLNEREQKIMKLRFGLDGEEPLTLAEIGRQINVSRERVRQLEAKAILKLRVMTTHQKAA

SEQ ID NO: 37650 - protein, 493 aa, Oryza sativa
MFSHGADSAHDAGAVSTGASGVPTRFVWPYGGKRVYLTGSFTRWTEHLPMSPVEGCPTVFQAICSLSPGIHQYKFCVDGEWRHDERQPTITGDYGVVNTLCLTRDFDQINTILSPSTPGSRMNMDVDNDNFQRTVSLSDGIIQEGPQRISEAAIQISRCRVADFLNGQTGYDLLPDSGKVIALDVNLPVKQSFHILHEQGIPVAPLWDSFRGQFVGLLSPLDFILILRELETHGSNLTEEQLETHTISAWKEAKRQTYARNEGSWRANHHLVHATPYESLREIAMKILQNGVSTVPIMFSSSPDGSYPQLLHLASLSGILKCICRYFKNSQGNLPILSQPVCTIPLGTWVPKIGDPNGRPLAMLRPNTSLSAALNLLVQAGVSSIPIVDDNDSLLDTYSRSDITALAKDKVYTHIRLDEMTIHQALQLGQDANSPFGFFNGQRCQMCLRSDTLLKVMERLANPGVRRVFIVEAGSKRVEGIISLSDIFKFLLS

SEQ ID NO: 37651 - protein, 252 aa, Photobacterium profundum SS9
MSVITPYLIKFCTAKLWTGRLMMIKKLVAEFIGTFWLVLGGCGSAVLAAAFPDVGIGLLGVALAFGLTVVTMAYAIGHISGCHLNPAVTVGLWSGGRFPANEIIPYIVFQVLGAIAGAFVLYIIASGQAGFDLAGGLASNGYGEHSPGGYTMLSGFVTEFVMTFMFLFIILGVTHKLANPGMAGLAIGLALTLIHLISIPVTNTSVNPARSTGPAIFVGDWAMSQLWLFWVAPIFGAIVAGIVYRWLCPNED

SEQ ID NO: 37652 - protein, 437 aa, Haemophilus influenzae
MEILMKSGDLNKYDLVKNALVLVLAGGRGSRLHELTDKRAKPALYFGGNRRIIDFALSNCINSDLNRIGVVTQYAAHSLLLHLQTGWSFLPQERGEFVDMLPARQQIDDSTWYRGTADAVYQNMAIIKNHYRPKYILILAGDHIYKQDYSVMLMDHVNSGAKCTVGCIEVPRSEAHEFGVMAVNENLKVKAFVEKPKDPPAMVGKPDVSLASMGIYVFDADYLYKMLEQEVNTPQTSHDFGKDVLPKCLEEGALYAHPFSRSCMGRNTEGEIYWRDVGTLDSFWQSNIDLVSENPQLDIYDQSWPIRGNPIQAYPSKFFYKHSNVHPVDNSLIGGGCVITDASISNSVLFDHIKIDAFSKVDHCVVLPQVKIGKNCVLKNCIIDRECEIPDGMQIGVDMEEDKKRFRISSTGKVILVTSKMLKILEGHEIGEEGHLD

SEQ ID NO: 37653 - protein, 521 aa, Nicotiana tabacum
MESGSMEMKVQQPYLAVPVLPPRWKIVMVASIAAGVQFGWALQLSLLTPYLQLLGIPHRYASIIWLCGPISGMIVQPAVGYLSDNLSSTFGRRRPFIAAGSSLVAVAVIFIGFAADIGHAFGDPLDTKTKPLGIITFIVGFWYLDVANNMLQGPCRAFLADLSGGKACRIRTGQSCYAFFMAVGSILGNAAGSYSHLYTIFPFTKTEACGVQCANLKSCFLISVVLLLTLTTLALTAVDEKVLPQKDHFINSEYLGSSGKKGGLLFFGEMFEALKHLPRSVWILLMVTAVNWIAWFPFTLYGTDWMGKEVYGGRVRDGNLYNKGVHAGVFGLLLSSVVLCLMSLGVECVGKWLGGAKRLWGIVNFILAICLAMTVFVTKMADKSRRYDGDGELLPPDQGVKISALLLNAVTGIPLAVLYSIPFAMASIYSSNVGAGQGLSQGVINLAIVVPQTLVSISGRPFDALFGGGNLPAFVAGAVAAAVSGILALTLLPSPTEPCQTYPHFRRCFPMTKYWTSQNKF

SEQ ID NO: 37654 - protein, 420 aa, Psychrobacter arcticus 273-4
MQNQIFELQYALDTFYLLMCGALVMWMTAGFTMLEAGLVRSKNTVEILTKNIALFATACTMYMICGYAIMYDGNLFLSGIAGTESLVADALATSAENGFDGDAVYSSASDFFFQVVFVATCMSIVSGAVAERMKLWSFLLFAVVMTGVIYPLEGSWTWGGKAVFGLYSLGDLGFSDFAGSGIVHMAGAAAALAGVLLLGARLGKYGSKGEIRAIPGANLPLAALGTLILWMGWFGFNGGSVLKLGDIASANSVAVVFLNTNAAAAGGAIGALLIARLIFGKADLTMLLNGALAGLVAITAEPLTPSALQATLFGMTAGIIVVLSILLLDKIKIDDPVGAISVHGVVGLFGLLIVPLTNPAASLIGQLAGAATIFAWVFVSSLIIWSIIKFVIGLRISEEEEYQGADIAECGMEAYPEFIR

SEQ ID NO: 37655 - protein, 307 aa, Zea mays
  misc_feature (105)..(105): Xaa can be any naturally occurring amino acid
  unsure (1)..(307): unsure at all Xaa locations
MAFLNMEQQTWAFTFGILGNIVSLMVFLSPLPTFYRVYRNKSTEGFQSTPYVVTLFSCMLWILYALLKPGAELLVTINGVGCVVETVYLAMYLVYAPKAARVLAXKMLLGLNVAVFGLVALVTMLLSDAGLRVHVLGWICVSVSLSVFAAPLSIMRQVIRTKSVEFMPISLSFFLVLSAVVWFAYGALKKDVFVAFPNVLGFVFGLAQMALYMAYSRNRKPAAALVILPEQSKEEAAEGKASCGGAEVHPIDIAEVHDLQAVVVDVDVEPVTYAAASGMVDGSVGRPRAPEQLVIKPDMVTVIAAEA

SEQ ID NO: 37656 - protein, 484 aa, Rhizobium sp.
MKKLTNATGAPVADNFNIQTAGPRGPALLQDIWLLEKLAHFDRELIPERRMHAKGAGAYGTFTVTHDITRYTKASIFSSVGKETPLFVRFSSVAGERGSADAERDIRGFAVKFYTDEGNWDIVGNNTPVFFFRDPLRFSDLNHVVKRDPSPALRNATSNWDFWTLLPEALHQVTSVMSDRGLPTSFRHMHGFGSHTFSLIDRDNKRVWVKFHFVCQQGIENLSDAEAEAVVGKDRESNLRDLYEVIEQGNFPRWKLCIQVMEEEQALNYRHNPFDLTKVWPHAARVIEVGIMELNRNSRKANFAEIEQAAFSPANVVPGVSFSPDRISRARLFSYGDAQRYRLWLNFNHIPVNAPRCPASSYHRSYHRDGAMHADGNLGGTASYFPNSVGEWQDSPERAEPPLPLEGFDQHYDHRLEEDHYEQPGNLFRLLDPARNELLFDNTARAMNGVPQRIRQRHMTIAPKPSPAYGFGVAEALERLVPLG

SEQ ID NO: 37657 - protein, 352 aa, Xanthomonas campestris pv. campestris str. ATCC 33913
MPKPFNLAVVGYGYVGRTFHAPLIASTPGLQLHSVVSSKPQQPQADFREVRVLPDLEAALADPALDAVVIATPNQTHAPMALQALAAGKHVLVDKPFALDAAQARTVVDAAAEAGKIVSVFQNRRWDADFLTVRRLIEDGQLGEVVEFHSHFDRYRPQVRDRWRESDIPGAGLWYDLGPHLLDQALQLFGMPQAISADLQRQRTQARSDDYFNVVLRYPRLRVILHAGSLVADGSLRFAVHGTRGSYLKHGADTQEDQLRAGRRPGTAGWGMDPLPGTLTRVDDEGRVHTHQPDGVPGDYRHCYAAFRDAMAGTAPPPVSAADAVRLMELLELAQRGAALGQVLWLEGNSSD

SEQ ID NO: 37658 - protein, 264 aa, Haemophilus influenzae R2866
MDKSLKANCIGEFLGTALLIFFGVGCVAALKVAGASFGLWEISIMWGMGVALAVYATAGLSGAHLNPAVTIALWKFACFDGKKVIPYIISQMLGAFFAAALVYALYRNVFIDYETAHNIVRGTQESLSLAGTFSTYPHPSLSIGGAFAVEFVITAILMALIMALTDDGNGVPRGPLAPLLIGILIAVIGGAMGPLTGFAMNPARDFGPKFFAYLAGWGELALTGGREIPYFIVPMVAPVLGALAGAWLYKKAIGGNLPCNCGCE

SEQ ID NO: 37659 - protein, 1690 aa, Candida albicans
MSFLRRDKSKANFRDGSATGLEEPVSPTTHFSPNVPPPLDGNHGDHYHDPDSPRSSVVSLPQLIHNSATHHLKENYRGFHANKRPKGIANVPPLAQPIKPRFKKKSNSLLNKLIYSTKKEDDEAATSGKESRSSSIISDEKRKSASSASSGSSRQKFRFSSFDSNLSTSSSSPPKDKKVSVSDTVSDSSTVTASMSNMPTISIDLNLDEMHDIIKSPETPTPTAGLPTQKAEKKASPTAIKNWQAPESWDVKAPIKKEEPHAPKIEEVAENDVAIDNVLEKKRLPVLYGTHQVPHVTNSKDIKSSHIIRVFKEDNTFTTILCPLETTTSELLAIVQKKFFLESTTNFQLSVCIGNCVKVLEDFEKPLKIQMGLLLLSGYTEEDKLRMLGREDLSFVCKFVVENIFLRSLTHDEEVLLSRNYVDVNISSLNLKNVPIIFHQHTYEIEKLNVANNPSIYLPLDFIQGCTSLAYVDFSHNGCSKFPNNLLEAPQLTHLNLEMNFLDEIPQRISCLSNLTNLKLSSNQLYSLPHSFSTLTNLKQLDLSSNYFDSYPEAVNKLTNLVELNFSYNDLSIIPESIANLINLQKLNLCTNKLSGTLPGYLSQLKALKRLDIRYNYISNVDVLGIIPNLEVAYASKNAISTFSDQMKCLRLLHFDRNPITELKFNTQMQMLSVLDLSRAKITAFPAEFVEKVPNIEKLVLDKNHLVSLPNELCQLSKLVSLSVHANNLQSLPANIGDLRFLKYLDLHSNNLKSLPDQIWDLCHLTSLNVASNNLTSFPKAPYSVVKRLSSSLVDVHLESSQTLSLADSLLILILSDNRLSDDCFDEISFLIALKSLNVSYNDLIEIPQGTLSRLTRLNELYLSGNELTTLPADDLEVLKSLKLLYMNNNKLVSLPAELSRIANLQHLDVSSNQLKYNISNWPYDWSWHWNKNLKYLNFSGNKRFEIKQSHIKNPETGEDFDSLLVLKQLRVLGLIDVTLTTTNVPEQAVDLRLRTTASEFDNFGYGVSDSLGMRDHVSARDLFVQKFRGKENEMLLCAFDGKHGATNQGHRISLVAKNMFVRNFTKELDEIKSDDEIENALRKAFLNFNKEINGILTAKKNKSFTPVPNMSKEALELNLVDDGNAGCTVSVIYIKDKKLYSANIGDIEALLCRNNGDQFLLTEKHDPTNREEFERIRASGGYVSGGGELDGQLSVSRGVGFFNFLPHTHCGPTIRRFKITNDDDMIILGSKQLWDFISYESAVDIIRKDKNDPMVAAQKLRDFAICYGATDKICVIVLTFGNRQKQAANMYSNYGVDRRRRDKQQVVGGDSNLRKLEQEIEPPIGPLALVFTDIKNSTLLWDSYPAPMRSAIKIHNTIMRRQLRITGGYEVKTEGDAFMVAFPSPTAALLWCFQVQQNLVTADWPSEILETDQCCVVSDSENNTIFRGLSVRMGIHWGSPVCEPDVITGRMDYFGPMVNRASRISAIADGGQIAVSSDFLDVLNSLTVKHNNIKNNVESLIDAYQGNENAGMTIERELNALEDLGCNYFKIGERKLKGLETPEPITLVFTNRLKLRYDIFQKRLDANHSTRVAGTLPVEIIYGLRTVSLRLENLCSSINNGGNYCSEGFESSSGVISQKMNSSFKDSDLISLLNHVTTRIESCTTTLFLRQQLSQIKGNGGLIETNNSPSLDVIMDEVADIMKTVNELK

SEQ ID NO: 37660 - protein, 449 aa, Porphyromonas gingivalis W83
MRYDLAIIGGGPAGYTAAERAAKGGLKTLLIEKNALGGVCLNEGCIPTKTLLYSAKVLHQIATASKYAVSGTADGLDLGKVIARKGKIIRKLTAGIRSRLTEAGVEMVTAEATVTGCDADGIIGITAGEAQYKAANLLLCTGSETFIPPIPGVEQTEYWTNREALQNKEIPTSLVIIGGGVIGMEFASFFNGIGTQVHVVEMLPEILNGIDPEHAAMLRAHYEKEGIKFYLGHKVTSVRNGAVTVEYEGESKEIEGERILMSVGRRPVLQGFESLGLVLAGKGVKTNERMQTSLPNVYAAGDITGFSLLAHTAVREAEVAVDQILGKTDETMSYRAVPGVVYTNPEVAGVGETEESLRKAGRAYTVRRLPMAFSGRFVAENEQGNGECKLLLDEENRLIGAHLIGNPAGELIVTAAMAIETGMTDRQIERIIFPHPTVGEILKETLAGG

SEQ ID NO: 37661 - protein, 842 aa, Nostoc sp. PCC 7120
MRAVLMAGGSGTRLRPLTCDLPKPMVPILNRPIAEHIINLLKRHHITEVIATLHYLPDVLRDYFQDGGDFGVQMTYAVEEDQPLGTAGCVKNIAELLDETFLVISGDSITDFDLGEAIAFHKQKQSKATLILTRVPNPIEFGVVITDEAGKIKRFLEKPSTSEIFSDTVNTGTYILEPEVLEYLPSNTECDFSKDLFPLLLAKDEPMYGYVAEGYWCDVGHLDAYREAQYDGLDRKVKLDFAYRENSPGLWIGQNTYIDPSAHIEAPAVIGNNCRIGARVQIEAGTVIGDNVTIGADANLKRPIVWNGAIIGEEAQLSACVISRGTRVDRRAHVLEASVVGSLSTVGEEAQISPGVRVWPSKKIESGAILNINLIWGNTAQRNLFGQRGVQGLANIDISPEFAVKLGAAYGSTLKPGAKVTVSRDQRNVSRMVTRSLIAGLMSVGVDIQNLDATAIPIARTVIPTMGVAGGIHVRVHPDRADYILIEFMDHKGINISKAQEKKIEGAYFKEDMRRALTHEIGDVAYPSQVIDLYCTAFEKLLNVSTLNNSRAKVVIDYVYAVSGAVLPQMLDKFGADAVVLNASLNKNAVTTTDRETLLTQLGHVVEALKANFGVQVSANGEQLILVDESGYPIRGELLTALMVDMILTSNPRGTVVVPVHASSAVEQVARRHDGRIIRTKANATALMEACQKNPNVVLGGSGETGFIFPQLHPGFDSMFCIAKIIEMLTIQERSLATVRSELPRVIYRTHTIRCPWSAKGALMRYLVETHPAQNLELIDGVKIRQPFDDSWLLVLPDASEPLVHLYANSHERDWVDETVRDYRSRVQSFVERQQEYHPAEV

SEQ ID NO: 37662 - protein, 664 aa, Zea mays
PSANSPYPGIRMGSKASFRVTLLLLLLAAAWGPAAQADDAGIAELPDHIAITLKEQVSSTKIPVRLKSGSPLCSACENFTGKAVSYISEKQTQDKVMGFLHDACSQSFSFEQKCDELMDSYATLLFAKITEIKPEAFCKQYGLCRGTALFSGVTSDSTCVFCHHLLDEVMSKLKDPDAEFEIIQILIKECNKIEGHVQQCKRLVLQYIPLILVNGEKFLEKNDVCALVGTGFAGSRLNNDSSRHITWLADAGGIGLRMRKSRVNPSRQERSGGMATPRRLIRERAEAAVATLVAVRPHEIPPLMSAAATFFFILSAYFVVLPLRDEGAISLGLDTLPGLFAGSLLLTVVAAPIASLAFSLPSIPKPKVLKMRALSLLYVARCFDDDTQVFQHISSCIFCALVYLYTRAVRTYLPVLKMIIDLNNSLHLKVALLNLITISSTWARVIDVMDSEFLISLLVQSGSRLFGFIGAGATLGQLFGSLFAASMAWLGPCFWLILRSPYLIYISLFLWLSAVVSSVFYFQGHILTVAGVTVAICASPFVAASNLVALAVWPTWVAVAVTETIRKVTTYVLTRPGRELLFTVVSQDEKYKAKVCIDVIVQRLGDATAAGIYRWLFSSLEKKTSKVTLFALPLCFLWLVIAFHLGRLQTNLARLQAASAPSYS

SEQ ID NO: 37663 - protein, 230 aa, Glycine max
MSSTAPPVLPISNPQTTAGTTGAGGGAIEAPANNPAFRAFINNLSNSLRHGLDQRRPWSELADRSAFSKPESFSEATLRVRKNFSYFRVNYYAVVSLILAVSLLTNPFSLILLVGLLASWTFLYLFRPSDQPLVILGRTFSDFETLALLSAFTVFVVFLTSVGSVLVSALMLGVAVVCLHGAFRVPEDLFLDDQENSQATGFLSFLRGPASAAAAAAAAAAAVPTVASRV

SEQ ID NO: 37664 - protein, 609 aa, Campylobacter lari RM2100
MIDYGINIWGANNFIIENGKVCVNHGKKPAIIDIVNTLRDDGYKGPLLLRFPHLIHKQIEQIYDKFAKAKKEFNYKGSFNAVYPLKVNQYPGFVKNLVNLGREYNYGLEAGSKAELLLAMAYNNEGAPITVNGFKDKELINMGFIACEMGHNITLTMEGLNELEAMIEIAKNRFKPKPNIGLRVRLHSAGVGIWAKSGGINSKFGLTSTELIEAVNLLKANKLLDQFTMIHFHLGSQITEIHPLKKALNEAGNIYTELRKMGAKNLKAINLGGGLAVEYSQFKNETSRNYTLSEYANDVVFILKSIAEQKKDLEPDIFIESGRFVAANHAVLVAPVLELFSQEYTESKLLLKDKNPKLIDELYDLYKSIKASNALEYLHDSIDHMESILTLFDLGYVDLQDRSNSEILVHLIMRKAISLVGDQADLSSLQNEVQEKYLVNFSLFQSLPDFWGLEQNFPIMPLDRLNKKPTRSASIWDITCDSDGEISYSKDNPLFLHDIDVEAEDYFLGFFLVGAYQEVLGMKHNLFTHPSEACISINEKGFEVESVLEAQSILDTLEDLDYDIHAIMDNINEKIYASKLVNENQKKHILGEIYLFLNDNGYLKSIGSK

SEQ ID NO: 37665 - protein, 205 aa, Cytophaga hutchinsonii
MYTKKNKQFVLMGLTYSLMMFVSSCLGINSDVKNRPSATDSMATVDKTQSIYSIKVTTLDGQPFDLSTLKGKKILIVNTASKCGYTPQYEELQQLHALHGDSVAVLGFPCNDFGGQESGSESEIGAFCTKNYGVTFQMFEKVHIKGNEQHPLYKWLTDPALNGWNKDAPTWNFCKYLINEKGELVNFFGSGVKPMSKTVLDAIRK

SEQ ID NO: 37666 - protein, 604 aa, Cytophaga hutchinsonii
MNTNYSDCLLTEVAWEVCNQVGGIYTVIRSKVPTMTEVWGDRYCLVGPYFHNKAIAEFEAIDTYEADDVFAQAVLRMRNLGYEVHYGHWLVSGRPKVVLINHFSAFYRLGEIKYSLWENHGISSPEGDDLLNQVIAFGFLAKVFHQQLDETKGELPCVSHFHEWMTGTAIPEMRREHVKTSIVFTTHATLLGRYLAMNDPNFYDNLPYYDWNKEAVNFNIEPAVKIERAAAHGANVFTTVSEVTARECQSLLGRNPDMVLPNGLNIERFTALHEFQNLHKEHKDQIHEFVIGHFFQSYTFDLDKTLYFFTSGRYEYKNKGFDITLEALARLNWRLKEENTDTTVVMFFITKQPYHTINPQVLQSRAVMEEVRSNCDAIVQQLGDKLFEAAASSGDLKLPDLNKFVDEYWKLRLRRTLLSWKSHELPKVVTHNLVYDNQDEILNFLRHSNMVNNEHDKVKVVYHPDFIASTNPLFGMEYGQFVRGCHLGVFPSYYEPWGYTPLECMASGVPAITSDLSGFGDYVLKNIPNNENKGIYVTNRFHKSYHDAAQQLADQMYHFVHLSRRDRITQRNRVESASEHFDWQNLGSYYDKAHRLAFSIAVNA

SEQ ID NO: 37667 - protein, 346 aa, Bacteroides fragilis NCTC 9343
MLAYTYVEHGKFELLEKLRPQIKDARDAIVRVTLGSICTSDLHIKHGSVPRAVPGITVGHEMVGIVEEVGSGVISVRPGDRVTVNVETFCGECFFCRHGYVNNCTDPDGGWALGCRIDGGQAEYVRVPYAEQGLNRIPDNVSDEQALFVGDVLATGFWATRISEISEDDTVLIIGAGPTGICTLLCVMLKKPRRIIVCERSAERIRFVREHYPDVLVTEPENCRDFVLCNSDHGGADVVLEVAGSEETFRLAWECARPNAIVTIVALYDKPQFLPLPDMYGKNLIFKTGGVDGCDCAEILSLIEQGRIDTTPLITHRFPLNEIEEAYRIFENKLEGVIKIAITGGR

SEQ ID NO: 37668 - protein, 309 aa, Oenococcus oeni
MDNEEYYKILGVAKSASQDEIKHAYRKMSKKYHPDLNHQPGAEDKYKQVQEAYETLGDPQKRAAYDQYGKAGANANNGQGGFGGFQQSGFNFNGQDFGDFSDIFSQMFGGSFNPNAPRKGRDLQYRINLTFEEAVFGKETEIKYVRQESGANSKEHTVKVTIPAGVETGQQMRLAGQGEAGTHGGPYGDLYVEFIVGKSKDGFERQGANIYLEEPINFVQAALGDKIKVKTVHGDVELTIPAGTQTDTEFRLRGKGAPYVNSSRIGDEYVKVIVQVPKRLNEKEKKALKTYADLRGENVNPQKRRGLFG

SEQ ID NO: 37669 - protein, 88 aa, Zea mays
TFANLQHYKQESARLRQQIVNLQNSNRALIGDSITTMSHKELKHLETRLDKALGKIRAKKNDVLCSEVEYMQRRVDSNKNTFFLSGPY

SEQ ID NO: 37670 - protein, 302 aa, Burkholderia sp. 383
MSGGTFPAFVSAGDILTDMVRAGDAQWTSVPGGAGWNVARAVARLGVPSALAGSIGEDCFSDVLWHTSEAAGLDLRFLQRVARPPLLAIVHETRPPAYFFIGEASADLAFDPAQLPAGWTDHVKWAHFGCISLVREPLAGTLAALAADLHARGVKISFDPNVRNLMTAAFQPTLAKMAALADLIKVSDEDLRHLFGGDGPDAIGAVRALNPHAAVLVTRGAQAATLYADGDVHEASPPRVEVADTVGAGDASIGGMLFSLMAAPQRSWREHLVFALAAGAAACRHTGAHAPTLDEVVALIER

SEQ ID NO: 37671 - protein, 253 aa, Chlamydia trachomatis
MSKLTQVFKQTKPCIGYLTAGDGGTSYTIEAAKALIRGGVDILELGFPFSDPVADNPEIQVSHDRALAENLTSETLLEIVEGIRAFNQEVPLILYSYYNPLLQRDLDYLRRLKDVGINGVCVIDLPAPLSHGEKSPFFEDLLAVGLDPILLISAGTTPERMSLIQEYARGFLYYIPYEATRDSEVGIKEEFRKVREHFDLPIVDRRDICDKKEAAHVLNYSDGFIVKTAFVHQTTMDSSVETLTALAQTVIPG

SEQ ID NO: 37672 - protein, 394 aa, Pseudomonas syringae
MLKMSGLSASEARGDGAWVEDTQGGRWLDFGSFGVHLLGHSHSGVVSALVEQIQRFGLSDENLSNEPIVLAAERLLVMAGPEKDKVIFGNTGSEVVEAALKLARIVTGRRRVIAFEQAYHGRTAAALSVSHGYMRHAGLLTEGDVVFCPIDDLDAVANALEAGDIAAIIIEPIQGEGGIRPVENEFLRGLGDLAQAFDCRLIFDEIQTGLGRIGSLRVDVPCDILLLGKVLGGGVFPISAALFTSKRFDAAARDPVVHASSFAGSALAGAVVNAVLDVVSAPDFTLRVQRLGDRVLSYLGQRLADNPLITDIRGQGLMIGVEFKRLDHVGEMIIEAAKRDLLLAFCLTDPKVLRLYPPAVISDADLETGLEHFCQSVEAITRTEFDKEIPLCQQ

SEQ ID NO: 37673 - protein, 424 aa, Campylobacter coli RM2228
MTNKKAFKIACSLIAGGVNSPVRAFANVQSEPRFISHGKGAHIFDIEGNSYIDYVQSWGPLLFGHCDKDILKACNEALKKGSSFGAPTLLETQLAELVLEDFPHLDKIRFVSSGTEATMSAIRLARGFTKKDKILKFEGCYHGHSDSLLVSAGSGAATFNSPSSLGVLADVAKHTLVATYNDIESVKELFEKNKDIACVIIEPIAGNMGLVPGKQDFLEELVKICKENDTLLIFDEVMSGYRASYLGSYGINHIQADIVTFGKVIGGGLPAAAFAARAEIMDILSPLGGVYQAGTLSGNPLAMAAGIASLSKAKKKKDLYTKLGKLAKRLTKGMKELANERGVALQTCYVGSMFGYFFTQDPVYNYKDALKSDLKLFSKFHQNMLKNGIYLAPSQFETGFICAKMNKELIDKTLQSTYESFKKL

SEQ ID NO: 37674 - protein, 493 aa, Haemophilus somnus 2336
MGNYFNTLNLRQQLDQLGRCRFMDREEFADEVNFLKGKKIVIIGCGAQGLNQGLNMRDSGLDIAYALRPEAIEEKRASFQRASENGFVVGTYQQLIPTADLVINLTPDKQHSKVVADVMPLIKQGAALGYSHGLNIVELGEKIRQDITVVMVAPKCPGTEVREEFKRGFGVPTLIAVHPENDPKGEGLAIAKAWAAATGGHRAGVLESSFVAEVKSDLMGEQTILCGMLQAGSLVCYDKLIADGKDPAYAGKLIQYGWETITEALKQGGITLMMDRLSNSAKLRAFSLSEQIKEKLDFLFKKHMDDIISGEFSRVMMEDWANGDANLLEWREQTGKTAFENAPKGENIKISEQEYFDHGVLMVAMVKAGVELAFDTMVETGIYEESAYYESLHELPLIANTIARKRLYEMNVVISDTAEYGNYLFANVAAPILAKEIIPTLKRGDLGESTPATEIDNILLRDVNDAIRQHPIELIGQELRGYMTDMKRISSQE

SEQ ID NO: 37675 - protein, 299 aa, Sulfolobus solfataricus P2
MKKVSIITGGAKGIGAAIGYRLGKQGYAVVIADVDEEAGKYRENHFRGEGIDSFFIKTDVSSEMDVSNMVEKVYGRYGRIDVLVNNAGIGFSGKSIEEQTLDEWRRVIETNLTGVWLCSKYAVKYMKNNGGVIVNIASTRAFQSEPNTEPYSASKGGIIALTHSLAVSLSKYNIRVVSISPGWIDTSRWQVPPRESTLSGLDHGQHLTRRVGKPEDVASLVTFLVSDDASWISGVNFTIDGGMTVKMIYIDENVIQDSLTMLFNDVEVSYQIRKLIEKIKKADNKENIKSKLDELLRSL

SEQ ID NO: 37676 - protein, 968 aa, Sulfolobus solfataricus P2
MRNINELEARLILTLGNSFRNLRQLRWNLENHNKAYLEIEGKGNSYLLIVDHKGSGLIRLDDKPYFELDRYHTLIPIPFGNHKISLELSHYMDFGEKVDISAGIPFYTEIDSNAYKLYVYGSQILDLVRSINDNEVKDDLISALSKALHEAYFETISKEQLFILSKLIRTTLDVSRMVQEIEEPLDVYKEDENRSKFEGALNTLRSELSKLVNKYGKRGVLVGTGHAHIDTAWLWPFDETRRKVLRTFSTILTLLDKYDFHFIQSAAIYYEWVKADSPELFVRIKEKVKEGKWELAALYVESDANMVSGESLARQFLYSQRFYLENFGKLANILWLPDTFGFSASLPQIAKLGGVKAFATHKVFWNDTNKFPYNVFKWVGPNGDYLPAIAFGHGKGGYNSDFSASSVLEQYNNWAQKDQPMLYSYGYGDGGGGPNEDMLIRAEAVNLLPILPKVELSGVNSYIQRIVPVEEWRGELYLETHRGVLTSHSKMKLLNRSAEIALREAELWSTLARTYDKEVFTKLWKVVLKDQFHDVLPGSAIKDVYKVAYQELEEVINKANNVASEAMQKLVGGSGDKTFVFNSLSWDREEYIEADGKLVKVRVPSVGFSLLEPVEVRDKAVINENNAEYLVENKYFRVRISKSGQVLSLFDKEANREVLRDKSNLLIAYENIPGWADAWDIEKGFEDRSFEIRASSSEIVNNDGIVASIKFTYKFRRSEIIQIVRVYADSRRIDFITTLRMRDRELLVKSWFNFDLNVERAVSDIPFGVVERFTWSNTSWDKARFEVPIQKFVDFSESEYGAALLNNGKYGATLRGSSVGLSLTKTPIYPDPSTDLEEVTFIYSLYPHIGDWKRAEVIKRAYELNVPLRVVKGVSEVKRKSFIRINDSKLILEAVKVAEDDNNSVVLRLYEYENTRGEAYVEVPFNVTEARSLDLLELNEVPRDIVIEGNRIKVKYKNRDILTISVRG

SEQ ID NO: 37677 - protein, 181 aa, Hyaloperonospora parasitica
VPLSTDYKKLFEAISGYGLGGSSIAMFGRVGGGIYTKAADVGADLAGKVVENIPEDDPRNPATIADNVGDNVGDVAGMGSDLFGSLAEATCACLVISTQSPEIIAAGWPAVLFPLVITATGVFVSAMVSFLATHVWPVKKEKDVETVLKVQLFASTLLMTVLVIPVAMWLLPSSFSIGGFV

SEQ ID NO: 37678 - protein, 91 aa, Oenococcus oeni
MIKPLGDRIVLSIDQPEEEKVGGILIANNAKEKPVMGSVVAISETSVGDSKAPKSVKVGDKVMFDKYAGSQVTIDGEDYLIVHEKDILGVL

SEQ ID NO: 37679 - protein, 411 aa, Cytophaga hutchinsonii
MRRVVVTGIGALTPIGNTSNEFWNNLLAGKSGAAPITYFNTEKFKTKFACEIKGYNPLNYFEKGEARKYDLFTQYALITVKEAIEQAKIDFDSLNKDRIGVIWGSGNGGILTTQEQIMEYAKGDGTPRFNPYFVPKILVDIASGVISIKYGLRGINYTTVSACASSTTSVIDAFNYIRWNKADMIITGGSDAPINESLIGGFGALKALSTQNENPESASRPFDNSRDGFVMGEGAGAIILEEYEHAVKRGATILCEVIGGGMCADAYHLTGSHPEGDGAYMGMKLTLEDAGISAADVDYINPHATSTPIGDQSELKAIQRLFGDASNASISASKSMTGHLLGAAGAIEAIICIQAVQHNMIPPTINTTAVEAGYENLNLVLNKAVAKEVNVAISNTFGFGGHIAALMVKKI

SEQ ID NO: 37680 - protein, 308 aa, Synechocystis sp. PCC 6803
MATIQAFWRFSRPHTIIGTTLSVWAVYLLTILGDGNSVNSPASLDLVFGAWLACLLGNVYIVGLNQLWDVDIDRINKPNLPLANGDFSIAQGRWIVGLCGVASLAIAWGLGLWLGLTVGISLIIGTAYSVPPVRLKRFSLLAALCILTVRGIVVNLGLFLFFRIGLGYPPTLITPIWVLTLFILVFTVAIAIFKDVPDMEGDRQFKIQTLTLQIGKQNVFRGTLILLTGCYLAMAIWGLWAAMPLNTAFLIVSHLCLLALLWWRSRDVHLESKTEIASFYQFIWKLFFLEYLLYPLALWLPNFSNTIF

SEQ ID NO: 37681 - protein, 208 aa, Bacillus halodurans C-125
MKSNSQDAASIVWHPQLVTKQARNQSNGHKSRMIWFTGLSGSGKSTIANAVQAELFKRGIQVYVLDGDNLRHGLNADLSFSMEDRKENIRRTAEVGKLFVDAGLVVLAALISPVEEERQRARSRFAEDEFLEVYVSCTLQECEKRDPKGLYKKARKGEIPQFTGIHQPYEEPKNPDICIDTTDRTVEQSVQIILPIILEKIAWKEGEQ

SEQ ID NO: 37682 - protein, 531 aa, Nocardia farcinica IFM 10152
MTATPAVPDDPRRSWWRSAVFYQVYPRSFADSDGDGVGDLGGVREKLGYLELLGVNALWICPVMRSPMADGGYDVSDPRDIDPLFGGMAAMDALIAEAHARDIKVTMDLVPNHTSDRHPWFAEALRSAPGSPARARYIFRDGRGPDGSLPPNNWPSIFGGPAWTRVTEPDGTPGQWYLHLFAREQPDLNWENPEVVADFEKTLRFWLDRGVDGFRIDVAHGMAKPADLPDMAAVSTKMLIHDDSDPRFNNPGVHDIHRRIRKVLDEYPHAVSIGEVWVDDNTRFGEYVRPDELHLAFNFRLAETPFRAEAVREAIENSLAAVAEVGAPPTWTLSNHDIEREVTRYGGGARGVARARAMILVELALPGAVFLYNGSELGLPNVDDLPEEVLQDPVWERSGHTERGRDGCRVPLPWEGERPPFGFTRAERSWLPIPPEWADLTVEAQLERLDSTLCLYRMAVDLRGTRPEFAGEGLEWYGSPPGRLAFRRPGGLVCVLNTTEEPIPLPPGEPLLTSTPLDNGHLPPDAAAWLV

SEQ ID NO: 37683 - protein, 363 aa, Xylella fastidiosa Ann-1
MADIIPTAWQPFKSETPLTTFPFRFPAEWEPQSAILIAWPHANTDWSAHLADVEETYIALVAAITRFQMVIICVLDDDLQTYTEARLRSASVAMQQVRFTVASYNDTWLRDSGPITLIGINGDFRLLDFRFTGWGGKFEAKADDQLVSALHANGLFKNTQMHSINFALEGGAIETDGAGTLLTTWRCLHERHPQRTRTTLDANLTAWLAQNRVLWLEHGYLEGDDTDAHIDTLARFASTDSIVYQSCDNTTDSHYAELQAMANELTALRTTEGRPYRLFPLPWTKPILDQDRRLPASYANFLIIEGAVLMPTYDDPADTIAQSVLAEAFPTREIVPVPCRPLIWQNGSLHCITMQIPAGLLAT

SEQ ID NO: 37684 - protein, 473 aa, Hydrogenophilus thermoluteolus
MRHTKIVATLGPASSDPATLERLLLAGVDVVRLNFSHGTADEHRARASLVRALAQQTQRPVGILGDLQGPKIRIGRFTTNAVTLSKGQRFRLDCDLAPGDATRVGLDYPELIDDVEVGDILLLDDGKIRLQIVEKCADALITQVLVGGTLSNHKGINKLGGGLSAPALTAKDRAVPISRSLPKSASITVAVSFVKHAEEMHEARHLARAAGSRARLIAKIERVEAIANLDAILEASDGVMVARGDLAVEVGDAAVPALQKRILRRAREMNRLSITATQMMESMVHSPVPTRAEVSDVANAVLDGTDAVMLSAETAAGQYPVEAVEAMARVCAEADASNDAHLDQELLGRRFHRVDEAIAVSAVWSGYHLGVKAIVALTQSGATALWMSRIASILPIYALTPDPVTFGHLTLFRQVTPVRFDLNPASDPAMLLTQIRTLLVSNGWAAPGETIAVTFGEPMGQPGGSNTLKIVTL

SEQ ID NO: 37685 - protein, 564 aa, Plasmid NR1
MSTLKITGMTCDSCAVHVKDALEKVPGVQSADVSYAKGSAKLAIEVGTSPDALTAAVAGLGYRATLADAASVSTPGGLLDKMRDLLGRNDKTGSSGALHIAVIGSGGAAMAAALKAVEQGARVTLIERGTIGGTCVNVGCVPSKIMIRAAHIAHLRRESPFDGGIAATTPTIQRTALLAQQQARVDELRHAKYEGILEGNPAITVLHGSARFKDNRNLIVQLNDGGERVVAFDRCLIATGASPAVPPIPGLKDTPYWTSTEALVSETIPKRLAVIGSSVVALELAQAFARLGAKVTILARSTLFFREDPAIGEAVTAAFRMEGIEVREHTQASQVAYINGEGDGEFVLTTAHGELRADKLLVATGRAPNTRKLALDATGVTLTPQGAIVIDPGMRTSVEHIYAAGDCTDQPQFVYVAAAAGTRAAINMTGGDAALNLTAMPAVVFTDPQVATVGYSEAEAHHDGIKTDSRTLTLDNVPRALANFDTRGFIKLVVEEGSGRLIGVQAVAPEAGELIQTAALAIRNRMTVQELADQLFPYLTMVEGLKLAAQTFNKDVKQLSCCAG

SEQ ID NO: 37686 - protein, 183 aa, Triticum aestivum
  misc_feature (3)..(3): Xaa can be any naturally occurring amino acid
  unsure (1)..(183): unsure at all Xaa locations
WIXQAIRKSVLEQTQIIRLPAHMAEASSRLKECRRRLRRQLNRLPTNEEIALDTGMTARRVEAAMCLPRYSVSLTGKVGCTDVTYQEITADKSTETAEETLHRLFMKKDVDKALDSLTPREREVIRYRFGMDDGKARTLHDIGQLMGVSRERIRQIEMAAFRKLRSKKKVTSLQHYLEPAESW

SEQ ID NO: 37687 - protein, 215 aa, Glycine max
MSSSSSSFFPAHITTDQEFSLIVAALTNVVSGSTSSSSVPEFRFPHSSPPLSSASLMPPPPPSIHTCRECNIAGCLGCNFFPEEQRKKYRGVRQRPSGKWAAEIRDRHRSARVWLGTFETAEDAARAYDKASFELRGPRAKLNFPLVDESLTLQPEMAATEEQINNEDNLNQGMGMDSHEFWDRINEADFHPFMMMMDFTGDSSDSAATGYTLSS

SEQ ID NO: 37688 - protein, 618 aa, Prochlorococcus marinus str. MIT 9312
MKEDFTDFIEVSGLLDYDPDTISKIYKKNPKRLLKRLWQTLIPIFAYIFSVGWDKLTGKLNNNETARFRAKELTNLLVELGPAFVKAGQALSTRPDIIPGILLEELSNLQDQLPGFNGDKAMELIEEDLGSKIDEIFLAIDKEPISAASLGQVHKGKLKNEEIVAVKVQRPGLREQITLDLYIVRNIAYWLKNNIGLIRSDLVALIDELGKRVFEEMDYLNEAENAEKFRNMHKHNQMIAVPKIYKEITSRRVLTMEWIEGTKLTNLEDVKKLGIDPDKMIDIGVQCSLEQLLEHGFFHADPHPGNLLALKDGRLCYLDFGMMSEVSRDSRSGLIQAVVHLVNKNFDKLSQDFVKLGFLSEEVNLEPIVPAFQDIFINAVEQGVSKMDFKSVTDDMSGVMYKFPFRLPPYYALIIRSLLTLEGIALSVDPNFKILGAAYPYFARRLMEDPDPQLRESLKEMLFDDKKFKWDRLEDLLSNAAKQTNLDLEKLLDEVINLLFSPKGGFLRNEIIEGLTNQIDLISLKLLKNLNHYLPNSIKLNMTDENNNLSDLIMYVTPLRNFLEILQKVPGYSIDIFLKRVPRLINEPYTKEMGIKIAKKVTEKGVVRLVKIAAGANI

SEQ ID NO: 37689 - protein, 236 aa, Pseudomonas fluorescens Pf-5
MAASAPAPTEVAETADAALQHIVDGFLHFHHEVFPQQEELFKKLATAQRPRAMFIACADSRIVPELITQSSPGDLFVTRNVGNVVPPYGQMNGGVSTAIEYAVLALGVHHIIVCGHSDCGAMRAVLNPQSLEKMPTVKAWLRHAEVARTMVHENCDCADESSSMHVLTEENVIAQLQHLRTHPSVASRMANGQLFIHGWVYDIETSSIKAYDADKGCFLPLDGSHPIPVATPKARF

SEQ ID NO: 37690 - protein, 726 aa, Magnaporthe grisea 70-15
MRLADIVLDLAAIASASRSVASKHVALRARQINRFGKSSSLTTRPTTAAPSTSASASEPAKAQTVTTAPATTDNAARAPIPKAAETAARVQPSSDAGQDAGGAAAVLGRDRPVAPWATRDGLFALAPRTPRRSLFESAPAKLGEVDATTAEGMPEGININIFQTSRGSKILESLKSDADVDNGATKDATRITDTKEGAKASESTRFESLAAEEPKRESELTNKPLQSPEASEMRSTTKAYAADPVTFTPPPVSTPKSSPAAENVVQDSAPAASGYQLRESKVPATRLSRIWNYGGLAAGMLGGALTESISRGFGGGTSGTSAMLSPANMERLVSKLSRMRGAALKMGQMLSFQDAKMLPGPIREVLQRVQDRADYMPAWQRDRVLATNLGSEWRDLFETFEEKPIAAASIGQVHRATLKPQEEGSMPVEVAVKIQFPGVADSINSDLDNLAMLLAATKLLPKGLYLDKTIANARTELAWECDYEREAECAQRYRTLLAGDEDAVFAVPRVFPAASGKQVLTMEFMHGIGVTRGIHSFTQEQRDRIGTHILRLCLREITEFRFMQTDPNWTNFLYNAETGRLELLDFGASREYPERFVSLYVRLLYAASKGDREGVRVLSEELGYLTGHESRVMLDAHTQSVLTLAEPFLESAPELYDFRDQTITERVKSFIPVMIKERLAPPPEETYSLHRKLSGAFLLCARLGSKVRCREMFTKSVKKSGLVPEV

SEQ ID NO: 37691 - protein, 338 aa, Salmonella typhi
MRVLVTGGSGYIGSHTCVQLLQNGHDVVILDNLCNSKRSVLPVIERLGGKHPTFVEGDIRNEALITEILHDHAIDTVIHFAGLKAVGESVAKPLEYYDNNVNGTLRLVSAMRAANVKNLIFSSSATVYGDQPKIPYVESFPTGTPQSPYGKSKLMVEQILTDLQKAQPEWSIALLRYFNPVGAHPSGDMGEDPQGIPNNLMPYIAQVAVGRRESLAVFGNDYPTEDGTGVRDYIHVMDLADGHVVAMEKLADKSGVHIYNLGAGVGSSVLDVVNAFSKACGKPINYHFAPRRDGDLPAYWADASKADRELNWRVTRTLDEMAQDTWHWQSRHPQAYSD

SEQ ID NO: 37692 - protein, 552 aa, Bacteroides fragilis YCH46
MEQSFIAYIENSIKNNWDLDALTDYKGATLQYKDVARKIEKLHIIFEESGIRKGDKIAVCGRNSSHWGVTFLATLTYGAVIVPILHEFKADNVHNIVNHSEAKLLFVGDVVWENLNESAMPLLEGILMMNDFTLLVSRSERLTHAREHLNEMFGKKFPKNFRKEHIEYHKDQPEELAVINYTSGTTSYSKGVMLPYRSLWSNTAFAFEVLPLKAGDKIVSMLPMAHMYGLAFEFLYEFAVGCQIYFLTRMPSPKIIFQAFADVKPNLIVAVPLIIEKIIKKSVLPKLETPTMKLLLKVPIINDKIKATVREEMIKGFGGNFEAVIVGGAAFNQEVEQFLRMIDFPYTVGYGMTECGPIICYEDWKRFKPGSCGKAALNMEVKVLSPDPENVVGEIVCKGPNVMLGYYKNEEATAQVIDKDGWLHTGDLALEDAEGNITIKGRSKNMLLSASGQNIYPEEIEDKLNNLPYVAESIIVQQNDKLVGLVYPDFDEAFAHGLKNEDMERVMEENRVTLNEMLPAYSQISKMKIYPEEFEKTPKKSIKRFLYQEAKG

SEQ ID NO: 37693 - protein, 360 aa, Arabidopsis thaliana
MDKYEVVKDLGAGNFGVARLLRHKETKELVAMKYIERGRKIDENVAREIINHRSLRHPNIIRFKEVILTPTHLAIVMEYASGGELFERICNAGRFSEAEARYFFQQLICGVDYCHSLQICHRDLKLENTLLDGSPAPLLKICDFGYSKSSLLHSRPKSTVGTPAYIAPEVLSRREYDGKHADVWSCGVTLYVMLVGGYPFEDPDDPRNFRKTIQRIMAVQYKIPDYVHISQECRHLLSRIFVTNSAKRITLKEIKKHPWYLKNLPKELTEPAQAAYYKRETPSFSLQSVEDIMKIVGEARNPAPSSNAVKGFDDDEEDVEDEVEEEEEEEEEEEEEEEEEEDEYEKHVKEAHSCQEPPKA

SEQ ID NO: 37694 - protein, 1110 aa, Zea mays
MAPLLTLDALLFHMIGGQMKRFAKARKDLLVAVNEIVRHMFDEIDYILEGKNAERFATLYSHGSSGVNSEASTSIKVPKVYWNYTCKTILTLEWIDGIKLTDAERISKANLNRKRMIDEGLYCSLRQLLEEGFFHADPHPGNLVATEGGSLAYFDFGMMGDIPRHYRVGLIQMLVHYVNRDSLGLANDFHSLGFVPEGTDLLAVADALRFSFGDVRRQSNDFQGVMNHLYDVMYEFSFSLPPDYALVIRALGSLEGTAKALDPEFKVIESAYPFVIGRLLADPSPDMRKILRELLICDDGSIRWNRLERLIAAISEQSSESSSASGADSSENANGSPEWRSFDMHSVIAATENPNPPGRVGSLSLSSPKPYAALLSLPVSPSRAGGGADEIPAMAGPTSRLLILARRADRRRCLPFLVPRALQAAPPTFSPALPLPPCLPASTPVMSYSSAFTSVHGERPSSEYAKIRKESLETQFGRILGSSSRRHFADRGFGPFLALYRAATISFHVVKLTIWHLLLNDMHKRAEKFRETLIRLGPFYIKLGQALSTRPDILPSAYCQELAKLQDQIPPFPTRIALRTIESQLGSRISDLFADISPEPIAAASLGQVYKAHLRSGELVAVKVQRPGMAPLLTLDALLFHMIGGQMKRFAKARKDLLVAVNEIVRHMFDEIDYILEGKNAERFATLYSHGSSGVNSEASTSIKVPKVYWNYTCKTILTLEWIDGIKLTDAERISKANLNRKRMIDEGLYCSLRQLLEEGFFHADPHPGNLVATEGGSLAYFDFGMMGDIPRHYRVGLIQMLVHYVNRDSLGLANDFHSLGFVPEGTDLLAVADALRFSFGDVRRQSNDFQGVMNHLYDVMYEFSFSLPPDYALVIRALGSLEGTAKALDPEFKVIESAYPFVIGRLLADPSPDMRKILRELLICDDGSIRWNRLERLIAAISEQSSESSSASGADSSENANGSPEWRSFDMHSVIAATEDLFDFILSRKGWRVRVFLVQDIVNASDVFLQEATFPYVYAKVGKLGDLNPERSKMIRRLVNTVQSFRQAINLAPDAWSAMLIRTLLKPESQKFVLDVFLALANHSSYKIPETFWLFMSRFLNYLDKQDIL

SEQ ID NO: 37695 - protein, 466 aa, Shigella flexneri
MPHSYDYDAIVIGSGPGGEGAAMGLVKQGARVAVIERYQNVGGGCTHWGTIPSKALRHAVSRIIEFNQNPLYSDHSRLLRSSFADILNHADNVINQQTRMRQGFYERNHCEILQGNARFVDEHTLALDCPDGSVETLTAEKFVIACGSRPYHPTDVDFTHPRIYDSDSILSMHHEPRHVLIYGAGVIGCEYASIFRGMDVKVDLINTRDRLLAFLDQEMSDSLSYHFWNSGVVIRHNEEYEKIESCDDGVIMHLKSGKKLKADCLLYANGRTGNTDSLALQNIGLETDSRGQLKVNSMYQTAQPHVYAVGDVIGYPSLASAAYDQGRIAAQALVKGEATAHLIEDIPTGIYTIPEISSVGKTEQQLTAMKVPYEVGRAQFKHLARAQIVGMNVGTLKILFHRETKEILGIHCFGERAAEIIHIGQAIMEQKGGGNTIEYFVNTTFNYPTMAEAYRVAALNGLNRLF

SEQ ID NO: 37696 - protein, 432 aa, Oryza sativa (japonica cultivar-group)
MLGDQRRKFLLESASSSSEEVVSRSRNLAVESSAVAVTAAGVRKGEEVEEEELLNRRSKKNKVASDSGNSGTGVWDSEMQDADQNGEANTSELIGAIGRELAITCLLHTPRSYYGMIACLNRSFCSLMRSGQLYRLRREARIVEHMIYCSCNVLEWDGFDPCRQRWFNIPSMPPIECFTLADKESLAVGTNILVFGKKVEAHVVLRYSLLSNSWTTGDMMNSPRCLFGSASFGEKAIVAGGIGDNGTLSSAELYDSEAKTWTTLPSMNRARKMCSGFFMDGKFYVIGGKADNHNEILNCGEEFDLEKGTWRLIPDMASGLNGGSGAPPLVAVVNNELYAADYAEKEVRRYDKVNNAWITLGSLPEKYTSVNGWGLAFRGCGDKLIVIGGMSAPGGGVIEICSWIPNNGQPDWKIIGSRRSGSFVYNCAVMGC

SEQ ID NO: 37697 - protein, 177 aa, Glycine max
VSQLLCPIALFTYYNPILTRGTDKFMSTIRDSGVHGLVVPDVPLEETETLRTEAKKHGIELVLLTTPTTPPDRMKAIVDVAEGFVYLVSSVGVTGARASVSGSVQSLLQEIKEATTKPVAVGFGISKPEHVKQVAGWGADGVIVGSAIVKVLGEAKSPQEGLKELEVLTRSLKAALP

SEQ ID NO: 37698 - protein, 229 aa, Leptospira interrogans serovar Copenhageni str. Fiocruz L1-130
MNYQKYLFLDVGDTILHLKKSAGETYLEILLQAGLQKKENAGEIYRRAFTESWQKMQKNSPPEHRDKYQFHSGGTPGWWKELLEDFLKRVPDQVSIEKAFPIIYHKFADPELWTLDPGFWKLKDYCKEENWGLGAISNWDHRLRALLEAKGILEYLNPVIVSAEFGYEKPSPKIFEEAMRLVGLSGDCLVYCGDKYELDIKIPKSLGWRSYLKGEKGDLKTLSELIQFL

SEQ ID NO: 37699 - protein, 176 aa, Dehalococcoides ethenogenes 195
MTETAVFGGGCFWCMEAVFSRLSGVLKVEPGYAGGTLPNPTYQQVCAGDTGHAEVVKLEFDPALVSYTDLLDVFFQMHDPTTPNRQGQDIGTQYRSVIFYTTPAQKVQAEETIKKLDESAGFPERIVTGVLPLEKFYPAEDYHRQYYALHSRQPYCRFVIQPKLDKLKEHFGGMQK

SEQ ID NO: 37700 - protein, 267 aa, Ralstonia metallidurans CH34
MSIPSFGVGTFRLTGQVVVDSVRNALDVGYRAIDTAQIYGNEADVGQAIAESGVERGELFVTTKIWTANYAADKLVPSLRESLDKLRTDYVDLTLIHWPAPGNGVALSEYMAALAEAKALGLTRQIGVSNFNIELTRQAIEAVGKGEIATNQIELSPYLQSRKLTAFLKEQGIAVTSYMTLAYGKVLKDPVLGQIAAKHHATVAQVALAWALQLGYAVIPSSTKRENLASNLLARDLKLDADDMALIASLERNGREVSPEGLAPVWD

SEQ ID NO: 37701 - protein, 522 aa, Neisseria meningitidis Z2491
MKHRTFFSLCAKFGCLLALGACSPKIVDAGAATVPHTLSTLKTADNRPASVYLKKDKPTLIKFWASWCPLCLSELGQTEKWAQDAKFSSANLITVASPGFLHEKKDGDFQKWYAGLNYPKLPVVTDNGGTIAQSLNISVYPSWALIGKDGDVQRIVKGSINEAQALALIRDPNADLGSLKHSFYKPDTQKKDSKIMNTRTIYLAGGCFWGLEAYFQRIDGVVDAVSGYANGNTKNPSYEDVSYRHTGHAETVKVTYDADKLSLDDILQYFFRVVDPTSLNKQGNDTGTQYRSGVYYTDPAEKAVIAAALKREQQKYQLPLVVENEPLKNFYDAEEYHQDYLIKNPNGYCHIDIRKADEPLPGKTKTAPQGKGFDAATYKKPSDAELKRTLTEEQYQVTQNSATEYAFSHEYDHLFKPGIYVDVVSGEPLFSSADKYDSGCGWPSFTRPIDAKSVTEHDDFSYNMRRTEVRSHAADSHLGHVFPDGPRDKGGLRYCINGASLKFIPLEQMDAAGYGALKSKVK

SEQ ID NO: 37702 - protein, 152 aa, Triticum aestivum
MAVWLARRAVRRLASELRSHGPWPWPLSSSTVPVLGVPSGDQSRGFCSVRRFAGDSAAVEEPENGLAAGDLQVSKELALKMYSNMVTLQIMDTIFYEAQRQGRISFYLTSNGEEAINIASAAALSAQDIVLPQYREPGVLLWRGFTLQEFAN

SEQ ID NO: 37703 - protein, 176 aa, Arabidopsis thaliana
  misc_feature (143)..(143): Xaa can be any naturally occurring amino acid
  misc_feature (146)..(146): Xaa can be any naturally occurring amino acid
  misc_feature (151)..(151): Xaa can be any naturally occurring amino acid
  misc_feature (154)..(154): Xaa can be any naturally occurring amino acid
  misc_feature (161)..(161): Xaa can be any naturally occurring amino acid
  misc_feature (167)..(169): Xaa can be any naturally occurring amino acid
  unsure (1)..(176): unsure at all Xaa locations
MASILARRSLNTLRARHLVLSGQALQGSHLSRLQSRGISYGSNKDDEEAEQLSKEISKDWNTVFERSINTLFLTEMVRGLSLTLKYFFDPKVTINYPFEKGPLSPRFRGEHALRRYPTGEERCIACKLCEAVCPAQAITIEAXDRXDGSRXPLXYDIDMTXCIYCGXXXSLPVMNR

SEQ ID NO: 37704 - protein, 205 aa, GIBBERELLA ZEAE PH-1
MSSRKKVLLKVIILGDSGVGKTSLMNQYVNKKFSASYKATIGADFLTREVLVDDRQVTMQLWDTAGQERFQSLGVAFYRGADCCVLVYDVNNAKSFEALDSWRDEFLIQASPRDPPNFPFVVLGNKIDVEESKRVISNKRAMTFCQSKGDIPYFETSAKEAINIDQAFEVIARNALAQEESEEFSGDFDDPINIHIENDRDGCAC

SEQ ID NO: 37705 - protein, 289 aa, Zea mays
MAKQDIEASGPEAGEFSAKDYTDPPPAPLIDADELTKWSLYRAVIAEFIATLLFLYITVATVIGYKHQTDAAASGPDAACGGVGILGIAWAFGGMIFILVYCTAGISGGHINPAVTFGLFLARKVSLVRALLYIIAQCLGAICGVGLVKGFQSAYYVRYGGGANELSDGYSKGTGLAAEIIGTFVLVYTVFSATDPKRSARDSHVPVLAPLPIGFAVFMVHLATIPITGTGINPARSLGAAVIYNKDKAWDDQWIFWVGPLIGAAIAAAYHQYVLRASATKLGSYRSNA

SEQ ID NO: 37706 - protein, 431 aa, Deinococcus radiodurans R1
MGERKCGGWPPKVFLHSLSPGGAGGSTKAVVWHGIGDIRLDDVPEPKIEAPTDAIVRLTASAICGTDLHFIRGTMSDMVPGTILGHEGVGIVEAVGPEVRNFVPGDRVVIPSSASCGYCPPCREGNTSQCDNANPNGPSAGTAFYGGPKSSGPLNGMQAEKVRVVYANSSLVKLPDNVSDDQAIMISDIFPTAYFGAEIAGVKTGSVVVVLGCGPVGQFSIISAKLLGATRVIAVDRLDDRLDMARKNGAEVINFEKEDPVEAVKKLTGGLLADCVIDAVGVDAQHAHAGPAKPDAEKEQKFEQEVQEVAPDAKPEKDGQWTPGDAPSQASEWAIEMTKKAGQIGIIGVYSPQMTTYPIGKAMNKNLTIRMGNCNHRAIIPGLVDLVAAGVVDPARVLTEHEHLGSAIEAFEAFDKRQPGWIKVELEPQAG

SEQ ID NO: 37707 - protein, 137 aa, Hyaloperonospora parasitica
VHAVSGLLVGSLTSGVQLAISQSNTGGAWDNAKKFVEKGCVSIEDKEGKPIVQGKGSAIHKAAVIGDTVGDPLKDTSGPALNILMKLMAIISLVFGDFFKSINDGRGLLNVPTGAVAEAVADVAAVPVAVVAAGPPM

SEQ ID NO: 37708 - protein, 496 aa, Deinococcus radiodurans R1
MHLAVMARAGQCSSSAWGGLDARDFYRREARALRARRPWRSAFLRWTWSSEKKATAEACFCLSSPPPAHYTFPMTQTAAPPPLPDLPPQRRVVLGLQHSIAMFGSTVLVPILVGLSPSVALFGAGVATLIFHLLTRGQVPIFLGSSFAFIAPTALVIKEMGPAAAAGGLIAAGLMYVLFSGLVKLFGTERLLRVFPPVVTGPVIIVIGLGLSSVAVDQAKTNWGLALVTLLAAIIASIYGRGLFRMIPILIGVVTGYLVALATGQVGAKALADIAAAPLLGLPPFHGPALDWRAVAIIAPVAIVTFIEHVGDVVVNGRVVGKNFLANPGLSRTLLADGIANMSSAVMGGPAATTYAENTGVLALTRVYDPRVIQIGAVFAILFGCSPKLAAVLQGLPQGVLGGVSILLFGMIASVGIRTLAEAQVDFAHSRNLIIVSLILVLGLGGASFPLNVAGTKLELHGMALAALVGIVANLLLPRQRPEISGKADGMGPGVG

SEQ ID NO: 37709 - protein, 371 aa, GIBBERELLA ZEAE PH-1
MPQIPITIVTGFLGSGKTTLILNLIPQLRAQNPDYKLALLKNEFGDLAVDSQLAANSSISGVQELLNGCICCNLVGQLGPALKELEDTVVPDRIVIETSGSAFPATLALEVNRLARESGKYILDGVISVIDVENWKGYEDTSYTARIQARYTDLIVFNKWENVSMLRYDECLDRVGDLEVDVAKVKSDKGKVPMDIIFGVDGGLAQELTEGDVEKTNGHSHEHSNGTKNGHSHNHQSEVEVLSVVLKADPSSRINTEKLIAFLSSAPKDEAYRIKALVSLATTPTNSDPDIPKPEPSASGRYILNWAFGRWTFTPVAEALQEHDSSSDVTLRMTMIFARYESNKWKKRLEAGGLIELDGGDSSGLSVTKIL

SEQ ID NO: 37710 - protein, 582 aa, Schizosaccharomyces pombe
MVSFLSSSVSRLPLRIAGRRIPGRFAVPQVRTYAKDLKFGVDARASLLTGVDTLARAVSVTLGPKGRNVLIDQPFGSPKITKDGVTVARSVSLKDKFENLGARLVQDVASKTNEVAGDGTTTATVLTRAIFSETVRNVAAGCNPMDLRRGIQLAVDNVVEFLQANKRDITTSEEISQVATISANGDTHIGELLAKAMERVGKEGVITVKEGRTISDELEVTEGMKFDRGYISPYFITDVKSQKVEFENPLILLSEKKVSAVQDILPSLELAAQQRRPLVIIAEDVDGEALAACILNKLRGQLQVVAIKAPGFGDNRRNMLGDLAVLTDSAVFNDEIDVSIEKAQPHHLGSCGSVTVTKEDTIIMKGAGDHVKVNDRCEQIRGVMADPNLTEYEKEKLQERLAKLSGGIAVIKVGGSSEVEVNEKKDRIVDALNAVKAAVSEGVLPGAGTSFVKASLRLGDIPTNNFDQKLGVEIVRKAITRPAQTILENAGLEGNLIVGKLKELYGKEFNIGYDIAKDRFVDLNEIGVLDPLKVVRTGLVDASGVASLMGTTECAIVDAPEESKAPAGPPGMGGMGGMPGMM

SEQ ID NO: 37711 - protein, 1419 aa, GIBBERELLA ZEAE PH-1
MASPSRIPSDQPPRSSSPSSFRPRSISASVPRADLTARLASPIPSQFGTTPPVGGTPRPDAASRSDNLDDLSQLPGTGTSMQGPGQSPPRHGTPAARVSTPPIRSQSPLLGARNSGTPTNYGSFNSRSQNALGTSAPYEDPEIVKRHLVQPSDENPTSEESSIQGNTKGKQPADIGGAGLNEDEFSSLRLQGGDVTRGIYKWTEQAEARAKYNRSKSFDLGRPEPEAEVLDINSIKVPGGFRRNHLRRSVQSPGPHGHLEDGHNSPAPGQQRLFTSSFLEFLSIYGHFAGEELEEDDENLGPNEYFSSGEDSDEYNSDDEREPMEDSALLTPSRRRRKRKVRGGSGNNSPMNAALLLLKSFVGTGVLFLPRAYLNGGMLFSNLILFGVAALSYYCFVLLVKTQLKIGGSFGDLGGALYGKKMRTLILSSIVISQIGFVAAYTVFTAANLQAFVRAVSDCKSSISIQWLILIQMIIFLPFALLRDIGKLAFTALVADAFILIGLAYLLYYDILTLNQNGIADIIMFNKKDWTLFIGTAIFTFEGIGLIIPVQESMRHPEKFPRVLLIVMIIITVLFIGMGAISYAAYGSHTETVVLLNLPQDNKMVNGVQFLYSVAILLSTPLQIFPAIRIAETELFTRSGKYNPWVKWQKNVFRFFVVMLCASIAWLGADHLDKFVALVGNFACIPLVFIYPPMLHYKAIARTKFWRVADIALCIFGFVAMAYATTLTAMSWATADPKHPGYCDQKVHGVEYGPRGPRDCTQHLEWQTRPPPPPPFNTVPTCPEPTCGCAEPPKMPDDLPLDREGPLKGAIAGYAEHVLPFHNVSVLNSSFPSSTSPRPQLQTTSAYLLPSFKYIPFLPRVSFDSVEALVKGFLLPEKLHRMHDGLSPIHRDRLTRKEGYQGLLPGVQDVRDILVLICGHTGRDARCGIMAPILATEFEEKLEKEGFDVQHGPVQINLNEMQRIQGEAGEEKTSARIGMISHIGGHKFAGNVIIYLPPDLKMGSEPHPLAGHGICQLSASKARTLKTSPNPSITPTQRYASHKPNFPAPLQARIFPSLILVGIVLVSGGCYLLTPPSRPNTLNDITFVPYAITAREAISPTSFVITAVPRTPNPSLPYLNPSDSQWKNPLWSVEFKQPEVQISRHYTPLPPLSSEDPTDGTLRFYIRAVGDGEMSNYLGRRRVGDDVFLRGPHVGFELAERLGEHSRLVFLAGGTGVVPGIQAAKAVLEANEKSSVDLLWAVRKREEVQNSAFPSSSSWKFWQGKRPTALGLEVESPSPVTKRLQDLKKTYGDRLRIQVVVDEEGTRFQDKDINSTITASPGTVASFNAGCRFHDQAMHVHASEFALSEGPGCVCEPPAGTTPGKNLFIVSGPDGFIEHYAGPKIWLGGHQTQGPIAGVAGHLQRQNPALARDWLVLKM

SEQ ID NO: 37712 - protein, 469 aa, Synechocystis sp. PCC 6803
MTSLLTSSAQAPVANAPFPAGGLDQSKFDCRAVWYPLAYEEDLDKRKPTRFTLLGEDLVIWWEANSQQWRVYADQCPHRLAPLSEGRINKAGQLECPYHGWTFAGSGQCQAIPQQHTGGQAHTSKRACVRSLPTQVAQGLLFAFPGETDQAEKVALPLVDVLDGDQSEWVCLNTFRDLPYDAFTLMENVLDSSHIPYTHHKTVGKRSNVSPVDLEIIHGDRQGFTGIWEEGPRKGTLGKQTTTFIAPGLMWHDLTSKQFGRTLTVVYATPIRPGECRLFARFPFKFPSKFPRLVIGFTPRWYSHLGQNRVLEDDQIFLHFQERFVQGKGGSPNYEKDCYLPTKADLFVAEFHRWIEQYQVKPFGDSPLPDRQSVEQLMDRYHSHTEHCHSCRNALANIEKIQTGSLAIAIICLVCLPVASLGLAPNFALGLGLTVLTGLGFALWAGLGKFKQSFYQGNPIPPRNILDKG

SEQ ID NO: 37713 - protein, 535 aa, Cytophaga hutchinsonii
MSNQTIQTPTTNGMPSGIPFIVGNEAAERFSFYGMRAILAVFMTSYLHMTESTATEWAHTFNSAVYFTPILGAFLADIFIGKYRTILYLSVLYCFGHLVLALNESKDGLFWGLTLISIGAGGIKPCVSAHVGDQFGIKNKHLIERVFSIFYFAVNFGSLFSTLLIPYLLEHYGPAYAFGLPGILMFVATFIFWSGRNKFVHVPPFGKAYFKTVFGKEGLSAIGRLIFIYAFIAIFWALYDQHASTWVYQSKSAFLNKDINLFGLVEFTLLPSQIQAANPVLVLVLIPAFAFFIYPALNKIITLKPLIKILLGMFMCVLAFLVAAYIEKRISSGIETSVWWQFLAYLILTMAEVMVSITALEFSYTQAPNQMKSTVMGIFMFSISLGNILVAVISNYNNLHEEVKTVEIGTKTYISIKDYTPVKGEKIEFEDGTGLFILQQNSKTSLMDTIPLGGTYLVGDVDAVSNRFTLEDNGWHAIQTIKKSELPKGYKVVFHRFKHQSYFYMYALLMFVTAVLFIGVALKYKGKTYIQGEAV

SEQ ID NO: 37714 - protein, 276 aa, Hydrogenophilus thermoluteolus
MTEPIQTQMANALRFLAVDATNAANSGHPGAPLGMAEMAVALWRDHLRVAPQAPTWPNRDRFVLSNGHASMLIYALLHLTGFDLPLDELKRFRQLGSKTAGHPEYGHTPGVETTTGPLGQGFANAVGMALAEKLLAAEFNTPEHPLIDHFTYVFLGDGCLMEGISHEAASLAGTLRLSKLICLYDDNGISIDGAVSDWFSDDTAQRFAAYHWNVIGPIDGHDVAAVSAAIAQAKAQAATPDGKPTLIICRTTIGKGSPVKEGTCDIHGAPIGTEAA

SEQ ID NO: 37715 - protein, 439 aa, Brassica napus
MVIYAYTHMFHLFISNALQELPPYSECGAGGETRKGEKMDYMNGPGRHHLFVPGPVNIPEQVIRAMNRNNEDYRSPAIPALTKTLLEDVKKIFKTTSGTPFMFPTTGTGAWESALTNTLSPGDRIVSFLIGQFSLLWIDQQKRLNFNVDVVESDWGQGANLQVLASKLSQDQNHSIKAICIVHNETATGVTNDISAVRTLLDHYKHPALLLVDGVSSICALDFRMDEWGVDVALTGSQKALSLPTGLGIVCASPKALEATKTSKSLKVFFDWNDYLKFYKLGTYWPYTPSIQLLYGLRAALDLIFEEGLENVIARHARLGKATRLAVEAWGLKNCTQKEEWISNTVTAVMVPPNIDSTEIVKRAWKRYNLSLGLGLNKVAGKVFRIGHLGHLNELQLLGCLAGVEMILKDVGYPVVLGSGVAAASTYLQHQIPLIPSRI

SEQ ID NO: 37716 - protein, 139 aa, Triticum aestivum
MGRSPCCEKEHTNKGAWTKEEDQRLIAYIRANGEGCWRSLPKAAGLLRCGKSCRLRWMNYLRPDLKRGNFTDEEDELIIRLHSLLGNKWSLIAGQLPGRTDNEIKNYWNTHIKRKLLSRGMDPHTHRPLTAVDGGAASS

SEQ ID NO: 37717 - protein, 210 aa, Triticum aestivum
LAATFGRGTSPPAIESRADCREPSAMSKRGRGVWDMELGSLDTTRLLMLLAQQHQHQHHHRGVAEAAQAMTGGRVFQCKTCNRQFPTFHALGGHRASHKRPRLHHPPPQHALVGVDDDAALCLGRRAPQAPPQPARPRVHECPICGLEFAVGQALGGHMRRHRVEAEAEAGANAPSSKAAPATEMVVASCDDAGICLDLNLTPSENCAKC

SEQ ID NO: 37718 - protein, 328 aa, Wolinella succinogenes
MKLEEIGFSLWCDFIERDFLEKGFLELIEQGIIKGATSNPAIFQNSFTTSSAYKDSIGALKGQPSKKIYEALAIQDIARAAELLAPLHAQNPEDGWVSIEVDPLLCDDAKGSIEEGERLYQAIGHSNVMIKIPATQAGYEVMEALMAKGISVNATLIFSLEQAKACLDAFTRGYAKSDKAPYAVISIFVSRLDRKADAKLKAAGMSEGELGIKNAQRIYRHIQKAQLKGVRALFASTGVKGGVLPPSHYVDRLLHAHSVNTAPLETIKAFVKEGNPTPQPIPSLEEEERFWAEVQRAGVEMEALCDELLSEGLTLFKESFTSLLASLK

SEQ ID NO: 37719 - protein, 198 aa, Zea mays
MPEQSIPKEAAYQIINDELMLDGNPRLNLASFVTTWMEPECDKLIQASVNKNYVDMDEYPVTTELQACGRCKHSMWLGAGRAIALTLTPRHRATRQLPARAAVQAMKNRRGPSGLRPSGAPAPGAALKSAVGRCRSAREESVPTVGPHAERLFWIAAESSWPGPPCASSLETRARGVRPSFCKGKGAKSWPAGLLQRV

SEQ ID NO: 37720 - protein, 510 aa, Arabidopsis thaliana
MSNIDIEGILKELPNDGRTPKTKIVCTLGPASRSVTMIEKLLKAGMNVARFNFSHGSHEYHQETLDNLRTAMQNTGILAAVMLDTKGPEIRTGFLKDGNPIQLKEGQEITITTDYDIKGDEKTISMSYKKLPVDVKPGNTILCADGSISLAVVSCDPNAGTVICRCENTAMLGERKNVNLPGVVVDLPTLTDKDVEDILKWGVPNNIDMIALSFVRKGSDLVNVRKVLGSHSKSIMLMSKVENQEGVLNFDEILRETDAFMVARGDLGMEIPIEKIFLAQKMMIYKCNLAGKPVVTATQMLESMIKSPRPTRAEATDVANAVLDGTDCVMLSGESAAGAYPEIAVKTMAKICIEAESSLDYNTIFKEMIRATPLPMSTLESLASSAVRTANKAKAKLIIVLTRGGTTAKLVAKYRPAVPILSVVVPVFTSDTFNWSCSDESPARHSLIYRGLIPVLGEGSAKATDSESTEEIIESALKSATEKGLCNHGDAVVALHRIGAASVIKICVVK

SEQ ID NO: 37721 - protein, 86 aa, Arabidopsis thaliana
MYLFPCLHLPQKAIAAAEAEKTAPDNFYCKRLLKATGIVVVPGSGFRQVPGTWHFRCTILPQEDKIPAIVDRLTAFHQSFMDEFRD

SEQ ID NO: 37722 - protein, 447 aa, Mycobacterium bovis AF2122/97
MDDGSVSDIKRGRAARNAKLASIPVGFAGRAALGLGKRLTGKSKDEVTAELMEKAANQLFTVLGELKGGAMKVGQALSVMEAAIPDEFGEPYREALTKLQKDAPPLPASKVHRVLDGQLGTKWRERFSSFNDTPVASASIGQVHKAIWSDGREVAVKIQYPGADEALRADLKTMQRMVGVLKQLSPGADVQGVVDELVERTEMELDYRLEAANQRAFAKAYHDHPRFQVPHVVASAPKVVIQEWIEGVPMAEIIRHGTTEQRDLIGTLLAELTFDAPRRLGLMHGDAHPGNFMLLPDGRMGIIDFGAVAPMPGGFPIELGMTIRLAREKNYDLLLPTMEKAGLIQRGRQVSVREIDEMLRQYVEPIQVEVFHYTRKWLQKMTVSQIDRSVAQIRTARQMDLPAKLAIPMRVIASVGAILCQLDAHVPIKALSEELIPGFAEPDAIVV

SEQ ID NO: 37723 - protein, 585 aa, Hordeum vulgare subsp. vulgare
MCGILAVLGCADDTQGKRVRVLELSRRLKHRGPDWSGMHQVGDCYLSHQRLAIIDPASGDQPLYNEDKSIVVTVNGEIYNHEQLRAQLSSHTFRTGSDCEVIAHLYEEHGENFIDMLDGVFSFVLLDTRDNSFIAARDAIGVTPLYVGWGIDGSVWISSEMKGLNDDCEHFEIFPPGHLYSSKEGGFKRWYNPPWFSEVIPSVPYDPLALRKAFEKAVTKRLMTDVPFGVLLSGGLDSSLVAAVTVRHLAGTKAAKRWGTKLHSFCVGLEGSPDLKAAKEVANYLGTMHHEFTFTVQDGIDAIEDVIYHTETYDVTTIRASTPMFLMSRKIKSLGVKMVISGEGSDEIFGGYLYFHKAPNKEELHRETCQKIKALHQYDCLRANKATSAWGLEARVPFLDKEFINEAMSIDPEWKMIRPDLGRIEKWVLRKAFDDEEQPFLPKHILYRQKEQFSDGVGYSWIDGLKAHTESNVTDKMMSNAKFIYPHNTPTTKEAYCYRMIFERFFPQNSAILTVPGGPSVACSTAKAVEWDARWSGNLDPSGRAALGVHLSAYEQEHLPATIMAGTSKKPRMIKVAAPGVAIES

SEQ ID NO: 37724 - protein, 366 aa, Bacteroides fragilis YCH46
MNIERKILLNPGPATTTDTVKLAQVVPDICPREKEFAGMMKQLRDDLVRVAHGDLSKHTAVLFCGSGTINIDICLNSLLPADKKVLVVNNGAYSTRAVEVCEYYGLPHIDLKFSVYELPDLSVIEKTLSDNPDIALVYTTHHETGTGILNPIREIGKIAHSHDAVFVVDTTSSLGMIPFDIGKDNVDFCMASAQKGLQAMTGLSFIVGDESLIRASRDYPKRSYYCNLYLQYDYFEKTGEMHFTPPVQTVYAARQALDEYFAVGEEAKFARHKRVFEAIHKGLQELGLQYAIKREWQSGLVVSVLYPDDPLWDFDKVHDYCYERGFTIYPGKISTTNTFRLCALGEIDVEDIERFFEVMREAVLKY

SEQ ID NO: 37725 - protein, 712 aa, Pseudomonas fluorescens Pf-5
MSTKKPDTPKSQMAGTDTLDRGNSNSKLKSLETFRSDATGQALRTNQGVKIADNQNTLKAGARGPSLLEDFIMREKITHFDHERIPERIVHARGVGAHGYFQSYDNHSALTKAGFLRDPGKKTPVFVRFSTVQGPRGSGDTVRDVRGFAVKFFTDEGNFDLVGNNMPVFFIQDAIKFPDFVHAVKPEPHNEIPTGGSAHDTFWDFVSLQPESAHMVIWAMSDRAIPKSLRAMQGFGVHTFRLINAQGRSSFVKFHWRPTVGTCSLVWDEAQKLAGKDTDFHRRDLWESIEAGDYPEWEFGVQIIAEEDEHNFDFDILDPTKLIPEELVPITPLGKMVLNRNPDNYFAETEQVAFCPGHIVPGIDFSNDPLLQGRLFSYTDTQISRLGGPNFHELPINRPLAPFHNSQRDAMHRITLDKGRASYEPNSIDGGWPRETPPAAEDGGFESYNERIDAHKIRQRSESFSDHFSQARLFYKSMSKHEQEHIIAAYSFELGKVEREWIRERQVNEILANIDLQLAARVAENLGLAAPKKATVAERKTSLSRSPALSQANLLPGNIKTRKVAILAANGVDGAAIDALKKALKAEGAHAKLLGPTSAPVTTADGKSLPVDASMEGLPSVAFDAVFVPGGAQSIKALSGNGVALHYLLEAYKHLKAIALHGDARELLHSLRLEADEGLIVGADAKALKAFIAAIAQHRVWSREEKAKAIPA

SEQ ID NO: 37726 - protein, 172 aa, Glycine max
  misc_feature (75)..(75): Xaa can be any naturally occurring amino acid
  unsure (1)..(172): unsure at all Xaa locations
MKRGREESKLDMANCLMLLTKVGESETNYPISKGSDIGDFKCKTCNRRFSSFQALGGHRASHKKTKAHGHRSFVXQELPNPTMKQQPRMHPCPICGLEFAIGQALGGHMRKHRTAINDGLLCGKPSSSLSILKESSKDGDQKLNLRLDLNLTPLEEDDLKLNLRTPVLNCFI

SEQ ID NO: 37727 - protein, 238 aa, Actinobacillus pleuropneumoniae serovar 1 str. 4074
MKQIEKLFANNHAWATRMKDEQSDYFKQLAEHQKPTYLWIGCSDSRVPAEKLTGLGPGELFVHRNVANLVIHTDLNCLSVVQYAVDVLEIEHIIICGHTNCGGIQAAIGTVEDYGLISNWLLHIRDLWFKHSYLLGNLPSEQRANMLTRLNVAEQVYNLGRSSIVTAAWKRGKKLSIHGWVYDVNDGFLIDQGVIATSTETLEITYRNAIAKLATEVEEMIANKPVEQSNPIENNHID

SEQ ID NO: 37728 - protein, 361 aa, Dehalococcoides ethenogenes 195
MKAIILVGGQGTRLRPLSINTPKSMVPVLNVPFLSHVLRYLSSCGIKDIILTQGHLAAPIEQYFGNGQSLGVNLVYSVEHEALGTAGAIKNAERYLDDTFITLNGDIFTHLDLSAMLRAHRDKKALVSIALTPVDDPTKYGLVETADGGRVSRFLEKPSPAQITTNMINAGTYIIEPEVLKYIPAGENHSFERQLFPRLLNECQAVYAYPSSAYWIDIGSPEKYSQLNRDLLCGEGGDFGFSRGNEIVIGRGCQLHPTARISGPVLVGENCIIGANACIAGPVVIGAECRIEDEATLTESVIWQNVTIGAECKVVSSIIANHCHLKAGGKYENVVLGDNVTAECGCAPEPGSKISPGILMI

SEQ ID NO: 37729 - protein, 373 aa, Oryza sativa
MASSISVMASAGRNRGVGSAKLQGEDFEYFMQTYSIIILGRDSKREKVDLDISGGDLTISRHHAHIFYDFECKRFSLLVLGKCGCTVEGVLHLPGGSPIKLDSQDLLQIGHKKFYFLLPTRSIFGTSSNQHGPSASAAFQPANNGTAADEHNLTASAAAQPAHIGTAAPPPHIGTAQPGQIGIVTLPPAHIQNNAENENIAGIETQEEFMNQNKMPFGELDTCSSHHITIEPTLAPGGQPVNNLAIRPADNNKDQQEVLLKEEEYVLASIGIVISDLCGLKKMIPIEKLHSELVACYSATWPQRQVQMHLAPEAGSSAAGTECKPWLKLMYLLRKYPERFTVMNSSCDEEGRQHRCVCTLYGDGTVCVFLKRT

SEQ ID NO: 37730 - protein, 488 aa, Synechocystis sp. PCC 6803
MGRQLILFPMSDQSDHPLILLWHRRDLRLNDHLALAKARQKTAKIVGVFCLDNKILQAEDMAPARVAYLLGCLQSLQDHYQRLGSELLVFQADPVQLLPKLANTLGAHGVTWTLDTEPYAQKRDLAVAQALRERGLAIATEWDQLMHHPGEVLTQAGSPYTVYTPFWKNWSQLPKTSPVPTPKDLQGLTPAEKEKLAPLEPLAIPQLADLGFIWDQPLPLTPGEEAAEQRLDWFVAHGLEEYQQNRNFPALDGTSQLSAALKFGVISPRTLWQTTLEAWEQSRSEEARASIETWQQELAWREFYQHCLYSFPALAQGPYRSPFQEFPWEENQDHFQAWCEGRTGYPIIDAAMAQLNQTGWMHNRCRMIVASFLIKDLILNWQWGELYFMQTLYDGDLAANNGGWQWSASSGMDPKPLRIFNPHTQAQKFDPEGEYIRTWLPQLARFDTGDLLTGKLTPGSRRSVNYPEPIVDHNQQQREFKRRYQLVK

SEQ ID NO: 37731 - protein, 407 aa, Vibrio cholerae O1 biovar eltor str. N16961
MQDTLAVILAGGMGSRLSPLTDDRAKPAVPFGGKYRIIDFTLTNCLHSGLRRILVLTQYKSHSLHKHLRNGWSIFNPELGEFITVVPPQMRKGGKWYEGTADALFHNMWLLARSDAKYVVVLSGDHIYRMDYAAMLEEHISKNATLTIACMQVPRHEASAFGVMAIDDDSRITCFVEKPADPPCIPNRPDHSLASMGIYIFNMDVLKKALTEDAEIEQSSHDFGKDVIPKLIATGSVFAYSFCSGKGRVARDCYWRDVGTIDSFYDANMDLLQPVPPMNLYQKNWAIRTYEQQYPPARTVSSATGNEGIFINSIIANGVINSGGSVQHSIISSNVRINDSALIVDSILFDDVEVGEGCKLIHCIIDKHVKIPPYTEIGLNPIEDRKRFHISERGVVVVPESYQFSTE

SEQ ID NO: 37732 - protein, 409 aa, Frankia sp. EAN1pec
MWWLRRDLRLDDNPALLAAAESGRVLALFVLDDALRRPSGPVRLAFLHRCLRDLDAQLGGRLCVRTGSPYAVAPGRLRKADGTSYRVFTPFYRAWKEHGWRGPAIPADPVWLQPADLDGGSEPIPADPELGGTELPPAGEHAAHERLRAFLTESLAGYAAHRDEPAAASESGDAVPGWSGASRAGGAGGAGGAGGADAAGGGGGLAGSAEKFRSELAWREFYADVLAGTPSSARTDLTDTLAALAYEPPGDTFEAWKWGRTGYPIVDAGMRQLLAEGWVHNRVRMIEASFVCKDLNVHRTHGARWYLERLVDGDLASNNHGWQWTAGTGTDAAPYFRVFNPVSQGRKFDPAGEYIRRWVPELRGLPPDAVHEPWKLPAGPPNGYPRPVVDHAVERREALDRHARARHHD

SEQ ID NO: 37733 - protein, 631 aa, Bacillus sp. RC607
MKKYRVNVQGMTCSGCEQHVAVALENMGAKAIEVDFRRGEAVFELPDDVKVEDAKNAIADANYHPGEAEEFQSEQKTNLLKKYRLNVEGMTCTGCEEHIAVALENAGAKGIEVDFRRGEALFELPYDVDIDIAKTAITDAQYQPGEAEEIQVQSEKRTDVSLNDEGNYDYDYIIIGSGGAAFSSAIEAVALNAKVAMIERGTVGGTCVNVGCVPSKTLLRAGEINHLAKNNPFVGLHTSASNVDLAPLVKQKNDLVTEMRNEKYVNLIDDYGFELIKGESKFVNENTVEVNGNQITAKRFLIATGASSTAPNIPGLDEVDYLTSTSLLELKKVPNRLTVIGSGYIGMELGQLFHNLGSEVTLIQRSERLLKEYDPEISEAITKALTEQGINLVTGATYERVEQDGDIKKVHVEINGKKRIIEAEQLLIATGRKPIQTSLNLHAAGVEVGSRGEIVIDDYLKTTNSRIYSAGDVTPGPQFVYVAAYEGGLAARNAIGGLNQKVNLEVVPGVTFTSPSIATVGLTEQQAKEKGYEVKTSVLPLDAVPRALVNRETTGVFKLVADAKTLKVLGAHVVAENAGDVIYAATLAVKFGLTVGDLRETMAPYLTMAEGLKLAVLTFDKDVSKLSCCAG

SEQ ID NO: 37734 - protein, 369 aa, Festuca arundinacea
MVMMVDPPNGMGNHGKHYYTMWQTMFEIDTKYVPIKPIGRGAYGIVCSSINQETNEKVAIKKMNNVFDNRVDALRTLRELKLLRHLRHENVICLKDIMMPVHRRSFKDVYLVSELMDTDLHQIVKSLQPLSNDHCQYFLFQLLRGLKYLHSAGILHRDLKPGNLLVNANCDLKICDFGLARTNNTKGQFMTEYVVTRWYRAPELLLCCDNYGTSIDVWSVGCIFAELLGRKPIFPGTECLNQLKLIVNVLGTMSDSDLEFIDNRKARNYIKSLPYTPGIPLSNMYPQVHPLAIDLLQKMLVFDPSKRISVIEALAHPYMSELYDPAANPPAQVPIDLDIDENIGVETIREMLWQEMLQYHPEAATMVNM

SEQ ID NO: 37735 - protein, 312 aa, Symbiobacterium thermophilum IAM 14863
MDRPVVVVGSLNLDLVVNPERAPAAGETVFAPRLDQFPGGKGANQAVAAARLSAPVAMVGRVGQDAFGDRLLESLRADGVATEGISRSATAGTGTAVITVEATGQNRIVVVSGANAEVTPELVEAHGPLIASASALLLQLEVPVEACVRAAELAAAAGVPVILDPAPAPAEPLPEPLRRNTWLITPNETEAAALTGVPVAGRCGAEEAARVLWAQGFRQVLIKLGSEGAYLFRGGAGQWFEPFRVPVVDTTAAGDAFAGGLAAALHRGMALEEAVRWGMAAGALAVTRPGAQPAMGNLDELMTLLRTGRLDA

SEQ ID NO: 37736 - protein, 288 aa, Campylobacter lari RM2100
MSNSLYETLGVSKNASADEIKKAYRKLARQYHPDINKEAGAEEKFKEINAAYEILSDEKKRAQYDQYGDSMFGGQSFQDFSRSAGGADINDILRNIFGGGFGGGGFSSSNNFRGGFGGFGGFEEDLDLQASIKIPFEKGILGGEHSIMINKEQVKIKIPHGIKDGEKLRIRNKGKTFNNQRGDLILKVELEKSHEYEREDDDLYKKVEISLKTALFGDKISVNTPRKEVKITIPPNSKNNQKIRLKGYGVQNRKTDIYGDMYLILNVKLPDTSTLDPEFLKILEEKLP

SEQ ID NO: 37737 - protein, 162 aa, Glycine max
MDLNLWRVPSLVKFLTPASGLQGYWDPYPIDMEFRPPCMVLSTIGISKPGKLEGQSTSQCATHLHQLHVCLPSSKQKTRLLYRMSLDFAPVLKHIPFMQHLWRYFAEQVLNEDLRLVLGQQERMNNGANVWNFPVSYDKLGIRYRLWRNALERGNKQPPFSK

SEQ ID NO: 37738 - protein, 604 aa, Emericella nidulans
MLRSIPRRVPRRLPIFTTTATAGGPSRLAQRAFTCGYLRMSPSSLPPVQPPVSSTLPSDSYQLLSTADKAGDAEDALYEQQIKDVEAWWNSPRFEGIKRPYSAADVVSKRGSLQQTYPSSLMARKLFNLLNERAAENKPVHTMGAIDPVQMTQQAPNQEVLYVSGWACSSVLTTTNEVSPDFGDYPYNTVPNQVQRLFKAQQLHDRKHWDARRKMTPEQRKSTPYIDYMRPIIADGDTGHGGLTAVLKLAKLFAENGAAAVHFEDQMHGGKKCGHLAGKVLVPIGEHINRLVATRFQWDMMGVENLVIARTDSESGKLLSSAIDVRDHEFILGVTEESEPLAETLQAMEREGAAPSEIDAFELDWVKRHKLVTFDEAVDAHLEAEGAPQAARDAYKKRVKENPDLSITRRRELANDYTKTPVVWSCDIPRTREGFYHYRAGFPAATKRAKEFGPYADLLWVETGDPNVEKAAKLAGEVRAALPGKKLVYNLSPSFNWMGQGFDEASLKSFIWDLAQHGFVLQLISLAGLHSGATITAELSRAFKDEGMLAYVRLIQAREKELGVDVLTHQKWSGAPYMDGIVGAIQSGSSSSKSMGEGNTEKGF

SEQ ID NO: 37739 - protein, 183 aa, Arabidopsis thaliana
LWSCDDLFLGVRKARRAVAEYLNGELPTKLKAEDVYITGGCNQAIEIVIDSLAGNPSANILLPRPGYPHYDARAVYSGLEIRKYDLLPESDWEINLDGLEAAADENTVAMVIINPNNPCGNVYTYDHLNKVAEMARKLGIMIISDEVYDHVVYGDKPFIPMGKFASIAPGITLGSISKGWVNP

SEQ ID NO: 37740 - protein, 174 aa, Glycine max
  misc_feature (154)..(154): Xaa can be any naturally occurring amino acid
  unsure (1)..(174): unsure at all Xaa locations
MYRVHSKILKSNGAITNPPIFARYSSSSSSPSVPYVSNYQKQTAPSPTSSSGNRISPAILVIIVILAVVFFILGFLHLLVRFLIKQRSSSNSSISQSNRYPDMSESDAYQRQLQQLFHLHDSGLDQAFIDALPVFFYKEIIGLNEPFDCAVCLXEFLEQDKLRLLPMCNHAFYI

SEQ ID NO: 37741 - protein, 318 aa, Saccharomyces cerevisiae
  misc_feature (162)..(162): Xaa can be any naturally occurring amino acid
  unsure (1)..(318): unsure at all Xaa locations
PKYSLQDFQILRTLGTGSFGRVHLIRSRHNGRYYAMKVLKKEIVVRLKQVEHTNDERLMLSIVTHPFIIRMWGTFQDAQQIFMIMDYIEGGELFSLLRKSQRFPNPVAKFYAAEVCLALEYLHSKDIIYRDLKPENILLDKNGHIKITDFGFAKYVPDVTYXLCGTPDYIAPEVVSTKPYNKSIDWWSFGILIYEMLAGYTPFYDSNTMKTYEKILNAELRFPPFFNEDVKDLLSRLITRDLSQRLGNLQNGTEDVKNHPWFKEVVWEKLLSRNIETPYEPPIQQGQGDTSQFDKYPEEDINYGVQGEDPYADLFRDF

SEQ ID NO: 37742 - protein, 2679 aa, Mesorhizobium sp. BNC1
MTQSVLPDIAAIDENVGRIAIVGMSGRFPGAPSVDALWDLVSKGKHAFAHFRPEELEDAFEDAVRASKDYVPARPYLDDVDLFDAEFFGMYPRETALIDPQFRVFLEICWEAIEGAGYDPYSLPGQVGVFAGSALSTYLINNVLSDREKAEAFASNYQVGMFSELIGAINDTLATRVAYKLDLRGPAFTIQSACSTSLLAVAQACQNLLTYACDMALAGGVSITFPQKRGYIHQEGGMVSQDGFCRPFDADAGGTVFGSGAGVVLLKRMEDALKDGDHIHAVILGYGVNNDGSSKVGYTAPSVDGQAEAISAAHASAGIDPGTIGYIECHGTATPLGDPIEFAGLRKAFGDASMGQSVCALGSVKGNLGHLDAAAGVTGLIKAVHALKHAKIPPMANFQNPNPRIKLEDSPFYIPRELHDWPAQDHPRRAGISSFGVGGTNAHLVAEEAPPSPDLQEEEKEENSSFIIPLSARNESSLRAARRNLAAMLKSGPHMPIAAVAHTLQHGRHHFSHRAAVIAGNIEEAIAGLEGERPITGKATETSPPVVFMFPGQGAQYVGMGLGLYEREPEYARWIDHGARLLEEQAGIDIRKFLCRNNVQGEELSAALKDTRITQPALYLVEYAAARLWMSRGLKPDAMIGHSVGEFVAATLANVMTFDDALLLVAARGQLMQEQPKGAMISVRADAETVRDFLDDGVEIAAINAPKLCVVSGTFEAADVICKKLEAADIAFSRLHTSHAFHSAMMNEAAAALREQTDKIAYGRATIPYISCLTGEWQTDELGTSPEYWARHCRDAVRFAEGLVTVCRDRKPALLEVGPGRTLSTFAAQTIGRSDLAAVIQSLPEHDRASQAASAFAEAHARLWVAGCTLEWPALPAEARRRVPLPTYPFERRRHWIDPPPPIRRAIPNVEASPTGQAASQDGPPYPTPSFGNTPMNAVTPAPSPSRIEKLENALLARLAEMSGEEMTPDALCATFLELGFDSLFIGQFAQKIEKEYKVKLSFRELLGNIPSVSALARHLDKEMPPEAVQQPLPAQTAQGPGQAVSSPARQQQAITAPPPTAGAVDAIFQSQMLMMQQLFAQQIQALQAMGGAQAAQPPEELPAPTAQAPAALPPSSVPAKMADREIGGERLRLHKPGARASDGELSPEKRKFIADLAESYAARNARSKAFTAAHRSRLADPRTAAGFRPEWKELVFPIVSDRSKGSRIWDIDGNEYIDLVNGMGQTAFGHAPDFVVDAIRAQTEKGFAIGPQTPLAGEVADLISKMTGHERVTFCNTGSEAVMAAMRVARAVTGREKIVVFGNDYHGQFDEVLVKGRTRNGSPVALPIAPGIPPSSLSNMTVLSYGSSESLDWIRANAEDVAAVIIEPVQSRHPELRPVEFVRELRQIANEREFALVFDEVVTGFRVHPGGIQAVWGIRGDMATYGKVLGGGMPIGVLAGDSRFMDALDGGRWNYGDDSAPMVAPTFFAGTFVRHPLVLAAAKAVLRHLEGDGQALYTRIADRTKLLVDELSADLAARGIEGCINHYSSWFVTDFSSRDPLGMLFYPKARMLGLHIQDGYPCFLTTAHAEEDFRRIAEVFRETLDALQRVGILAPAGERASPQPAPVARPAAENVITSAGLTESQKEIWLAAQAGDEASCSFNESFSLNLQGTLDKEIFVQAIEMVVARHDALHIRFSRAGDRFEMIPDFRIPLETIDLTHNNTPEAALEEIVAEEASTPFDLANGPLARARLLSLAQDRHVLIFTAHHIVCDGWSANVILEELASAYTALCDGRTPDLPPALSFAAYADDVAAREAQPATEEFWLKQFETIPELPEMPTDRPRPEQRTFAGGTCTAFVEKDVYKRLKMAGAKSGATLFSTLLGALQVMISRLSGSTDIIIAIPSAGQSLVPDQTLVGHCVNLLPIRQQIDAEARFEEHLRQTQQLVLQAFEHQDYTYGTLVRKLGLKRDPSRLPLTEIQFNLERVARNAVFKGLSAKVTPNPKAFSNFDMFLNMVEGNDGIRIDIDYNGDVFDRATIERWLGHFTILVSVLADGMGAKIADLPILSENEMRWLIEELNETDADYERDRFMFELFAAKAAEQPKAIAAVHEGKSITYGALEARSNQLARHLQTKLSMPGLRVALALDRSIDMLVALLAIMKAGHTYVPLDPGHPPARLAQTMKTARVSGVICASGEIGKLGEPDTSVIRMDTESEEIARQDSRPLDLQLLDTEAPAYVIFTSGSTGTPKGVEISHRALVNFLSSMAMEPGFSSEDTLLAVTTISFDIAGLELYLPLIMGGRVVIANRTEVQDGFALVKLLRASGANVLQATPTLWQMLVEAGLSNQPKLKMLCGGEPLPKDLARKLLTIGGELWNMYGPTETTIWSSVARIVNADDPIHIGRPIANTQLYILDGHDRIAPVGVTGELYIGGEGLANGYFDRLDLTQAAFRSVRIGDGLPRRLYKTGDVGRRLPDGTLQLHGRRDNQIKLRGFRIELGEIEAVIGKKAGIRQCAVVAARNKNGDRQLVCHFVPDGQELSPDELSTHAKEHLPAHMVPSFWVATADLPKTANGKLDRKTLEERGVPQRHSAAPVRIKPRTPMEQKLSVIWQEVLQVGEIGIHDNLYALGADSLSIFRIAARMMDDGLPLEAKHLMRHPTVAGLAGFAEEQGNAAANGAVAPIPSLRDFRHGARRRLERLT

SEQ ID NO: 37743 - protein, 630 aa, Dianthus caryophyllus
MESCDCIDTQWQDKVLVQYQYLSDILIAIAYFSIPLELIYFVKKLAFFPYRRVLMLFGAFIVLCGTTHFINLWTSSVHTKTVAIVMTVAKMSTAAVSCVTALWLVYIIPDLLSVKTREMCLRHKAEELDKEKGLILTQEETERHVRMLMHKIRSTLDRHTILKTALVELGRTFNLEECAIWMPSQTGKTMQLTHALNHSMVVGLTVSTNDSFIDEIFNTSSAVRIPYSCSLVRSMSVAGRYGAPEIVVVRVPLLHHSNFQINDWPDISAKNFAAMVLISPSDAVRKFRDHDLELVKVVADEVAVALSHAATVEESVRAQNQLMEHNVALDLARREAEMAIICARNEFLSVMNHEMRTPIHAIIALSSILLGTELTPEQRVMLEIILKSSNLLSTLINDVLDLSRLEDGSLELDTVVFNLHGVFKEVLHLIKPIASVKKLSLTLVLAPEMPVCAVGDEKRLLQTILNVVGNAVKFTKEGYVSVSASVARPESLTNWRGPEVHPVLSDGYFYLKVQVKDSGCGINPQDMPIIFNKFTQFNQNTAGIGLGLAICKRFVNLMGGQIWIESDGHGKGTTTTFMVKLGTCKSSSDKLSFQVAGQVNQGSSEFISNKRLFRGDDSAGSTFQCYERTF

SEQ ID NO: 37744 - protein, 325 aa, Campylobacter coli RM2228
MIKSIPEWSEQEYLMLSLPHEKSDWKPYLGEIIQAYKDFVKAASEFQKVLLIAPSKSDFAPFENIANVEFFVCDTNDTWIRDFGAIDILEDNRLKALDFTFNAWGNKFQSELDNEVNSKLFKEKFNEKLTKIDFILEGGSIDFNGEGVMLTSSNCLLNENRNSHLDKSQIEAKLKEIFGLKQIIWLENGFIKGDDTDHHIDTLARFIDKNTIAHSICEDEKDEHYIPLQKMKKELEATGFNLVELPLPKPLYYEERRLGATYANFVFVNDALIMPFYKDENDEIIRQRLAKALPKRKIIGVDARVFLRQNGSLHCSCQNRFKGLR

SEQ ID NO: 37745 - protein, 318 aa, Pichia stipitis
MPSIKLNSGYDMPAVGFGCWKVDVDTCSEQIYRAIKTGYRLFDGAEDYANEKLVGAGVKKAIDEGIVKREDLFLTSKLWNNYHHPDNVEKALNRTLSDLQVDYVDLFLIHFPVTFKFVPLEEKYPPGFYCGKGDNFDYEDVPILETWKALEKLVKAGKIRSIGVSNFPGALLLDLLRGATIKPSVLQVEHHPYLQQPRLIEFAQSRGIAVTAYSSFGPQSFVELNQGRALNTSPLFENETIKAIAAKHGKSPAQVLLRWSSQRGIAIIPKSNTVPRLLENKDVNSFDLDEQDFADIAKLDINLRFNDPWDWDKIPIFV

SEQ ID NO: 37746 - protein, 290 aa, Campylobacter coli RM2228
MKIALIQQKFHSTKEKTIEKTCEFIEQAAKQGAELVCLGELHQSEYFCQSENVDFFDLANDYEKDVQFWSSVVKKHGVVLLTSLFEKRSAGLYHNTAVVFEKDGSIAGKYRKMHIPDDPCFYEKFYFTPGDLGFEPINTSLGKLGVLVCWDQWYPEAARLMALKGAQILIYPTAIGWFDKDEKEEKQRQLGAWLGVQKGHAIANGLYTIAVNRVGFEEDKSGVEEGIRFWGNSFVFGPQGEEICILDSENECIKLVDIDLQRSENVRRWWPFLRDRRIEYFGDLSKRFID

SEQ ID NO: 37747 - protein, 363 aa, Pichia stipitis
MTANPSLVLNKIDDISFETYDAPEISEPTDVLVQVKKTGICGSDIHFYAHGRIGNFVLTKPMVLGHESAGTVVQVGKGVTSLKVGDNVAIEPGIPSRFSDEYKSGHYNLCPHMAFAATPNSKEGEPNPPGTLCKYFKSPEDFLVKLPDHVSLELGALVEPLSVGVHASKLGSVAFGDYVAVFGAGPVGLLAAAVAKTFGAKGVIVVDIFDNKLKMAKDIGAATHTFNSKTGGSEELIKAFGGNVPNVVLECTGAEPCIKLGVDAIAPGGRFVQVGNAAGPVSFPITVFAMKELTLFGSFRYGFNDYKTAVGIFDTNYQNGRENAPIDFEQLITHRYKFKDAIEAYDLVRAGKGAVKCLIDGPE

SEQ ID NO: 37748 - protein, 328 aa, Petunia integrifolia subsp. inflata
MAVNGVSSGGLIVSFGEMLIDFVPTVSGVSLAEAPGFLKAPGGAPANVAIAVTRLGGNSAFVGKLGDDEFGHMLAGILKENGVKAEGINFDTGARTALAFVTLRADGEREFMFYRNPSADMLLTPDELNLDVIRSAKIFHYGSISLIVEPCRSAHLKAMEVAKEAGALLSYDPNLRLPLWPSAEEARKQIKSIWDKADVIKVSDNELEFLTGSDKIDDESAMSLWHPNLKLLLVTLGEKGCRYYTKNFHGGVEGFHVKTVDTTGAGDSFVGALLTKIVDDQSILEDEARLKEVLTFACACGAITTTKKGAIPALPTESEALTLLKRGA

SEQ ID NO: 37749 - protein, 689 aa, Pachysolen tannophilus
MSYILVTGGAGYIGSHTVVELVNNGYNVVVVDNLVNSSYDVIVRIEVLTRKQIPFFKIDLNDHDALDQVFKLYPIQAVLHFAALKAVGESTKFPLNYYSNNVGGAISLLKVMEENNVKNIVFSSSATVYGDATRFENMIPIPEHCPTGPTNPYGETKITIENIIRDVYANDKSWKCAILRYFNPIGAHPSGLIGEDPLGIPNNLLPFLAQVAIGRREKLSVFGSDYNSKDGTPIRDYIHVIDLAKGHIAALNYLFNHKDNGLCREWNLGTGNGSTVFEVFNAFCEAVGKKLPFEVVGRRDGDVLNLTANPKRANTELKWKAQLSINDACKDLWNWTTKNPFGFQINNYSWTKFDSESLTNYDRLNTVRTFNGKFEVSISNHGATIVAAKLNGIKLNLGFDNLKGYLREDNPFFGATIGRVANRISKGDLLINGTHYQVGLNELHRTSLHGGTYGYNKRTFLGPIVKTNEKEKETTMEFVLIDLDGTEGYPGDVETKVIYTVRDTGVGGELGIEYEAKLLEESGRDSTAVSLTNHSYWNIGNQPSIEGTHIKLVSNKHLESNPLDSTPTGKIVTSTDLDSQNSAKLGPDGPVFDYCFVTKQQDKLDTRNDELRVVATATHPKTRIAFTTLTTEPAFQFYTGDGVDVAGVFTKRSGFCLEASRYIYNPKWFIPLNKGEVYGSYTIYRFENF

SEQ ID NO: 37750 - protein, 472 aa, Campylobacter lari RM2100
MKKTIVLSLALATSLFSASIDFKQADDNVKRSLPTDNQNTILSYHDSIQKVKNSVVNISTSKTVQSNSFGIDDFFNDPYFKQFFGFDFPQAPKSKKNKKEVVSSLGSGVIISSDGYIITNNHVIEGAEKITVNLPDTSTEYKAKLIGADPKTDLAVIKIEAKNLPAVVFADSDKLLEGDVVFALGNPFGVGSSVTSGIISALNKNNIGLNQYENFIQTDASINPGNSGGALVDSRGALVGINSAILSRSGGNNGIGFAIPSNMAKTIAKKLIENGKIERGYLGVVIGALTQDIKKAYTNQEGALITEVQKDSAAYNAGLKRGDLIIKVDKTLIKSPMDLKNYIGSIDPKQAIEVTYERDNKIKTVKFMLKTDEKSLQYEKGYIDGLKLIELDSKNKQQYRIPENISGILITEVTPKSKAEKIGFEQGDIIIGIDQYEVSNFKELSKALELNKGKEYVKIWINRGGMVRALLF

SEQ ID NO: 37751 - protein, 523 aa, Frankia sp. EAN1pec
MMPPAGRRHRGWHSTRGTEATDHAHVMARTARLGDNRTSEPARALRTGRAPEGGRRRHPAVPWREEPGVTEQVSSLTVTDNRTGRTYEVPVADGTIRASAFRAIKVDDDDFGLMAYDPAFTNTASCRSAITYIDGDAGILRYRGYPIQELAEKSSFLEVAYLLLAGELPTSDELSTWEDEITHHTLVHESIKKFIDGFHHDAHPMGMLVSTVGALSTFYPDAKTIDDPGLRRLQIVRLIAKITTLAAFSYRHSVGFPYVYPDNDLSYAGNFLNMMWKATELKYEPDPNLEHALDVLFILHADHEQNCSANAMRAVGSSQADPFSAAAAAIAALYGPLHGGANEQVLRMLADIGSVENIPAFIAQVKDGKKKLMGFGHRIYKNYDPRARVIRQVADEVFKVTGTNPLLDLAMELERIALEDEYFISRKLYPNVDFYTGIIYQAMGFPVEMFPVLFAIGRMPGWLAQWEEGLLDPEQKIARPRQLYIGYDERPYVPMHVRSAATDAETDPIAAQAAQAAPSRPLR

SEQ ID NO: 37752 - protein, 486 aa, Vibrio cholerae O1 biovar eltor str. N16961
MCKTKIVATLGPASQTRETLTQLIQAGVNVVRLNFSHGSAEEHIARAEMVREIAQQLNVSVGVLVDLQGPKIRIACFAEGAIQLSAGDTFILDGHLDGQAGTQERVGLDYPELIDDLNVGNILLLDDGRIQLEVTAVDMQARLVHTIALNSGKLSNRKGINLLGGGLSAPALTEKDKLDIITAAELQADFLAVSFPRNAEDIEYARQLATQAGCHAHIVAKVERAEVVASEEAMDSVIRASDVIMVARGDLGVEIGDARLPSVQKALIARAKHLGKPVITATQMMESMIENPLPTRAEVLDVANAVIDGTDAIMLSAESAAGRYPVETVQAMVRIAQGVEHETHCAQNCWDALQHLCSDAGKSFALSSMISASKVNKDLGVAIVTEQGETPLLMSRCQSQATIWAVSDKPALLRKLAILRGVTPTYFPHLDKQGDIATQLIHLLRKPAQEKKIASILVTQLESVEGVGHVNVCRLLNLAQQEALFA

SEQ ID NO: 37753 - protein, 334 aa, Triticum aestivum
  misc_feature (36)..(36): Xaa can be any naturally occurring amino acid
  misc_feature (46)..(47): Xaa can be any naturally occurring amino acid
  misc_feature (51)..(51): Xaa can be any naturally occurring amino acid
  misc_feature (66)..(66): Xaa can be any naturally occurring amino acid
  misc_feature (69)..(70): Xaa can be any naturally occurring amino acid
  misc_feature (89)..(89): Xaa can be any naturally occurring amino acid
  misc_feature (99)..(99): Xaa can be any naturally occurring amino acid
  misc_feature (119)..(119): Xaa can be any naturally occurring amino acid
  misc_feature (123)..(124): Xaa can be any naturally occurring amino acid
  misc_feature (151)..(151): Xaa can be any naturally occurring amino acid
  misc_feature (154)..(154): Xaa can be any naturally occurring amino acid
  misc_feature (191)..(191): Xaa can be any naturally occurring amino acid
  misc_feature (202)..(202): Xaa can be any naturally occurring amino acid
  misc_feature (294)..(294): Xaa can be any naturally occurring amino acid
  unsure (1)..(334): unsure at all Xaa locations
REQKLELHRGGGRSRTSGSPGLQEFGTSRAVAAMVXAPAKVGAAMXXLDFXTAVFNKEKVSLAGHXEYXXRGGRNLFPLLPEAFKGVKXIGVIGWGSQXPAQAQNLRDSLVEAKSDIVXKIGXXKGSKSFEEARGAGFTEENGTLGDIWEXVSXSDLVLLLISDSAQADNYEKIFSHMKPNSILGLSHGFXLGHLQSHGLDXPKNINVVAVCPKGMGPSVRRLYVQGKEVNGAGINASFAVHQDVDGRATDVALGWSVALGSPFTFATTLEQEYKSDIFGERGILLGAVHGIVXALFRRYTEQGMDEELAYKSTVDISVTADSDFVRPELRQSS

SEQ ID NO: 37754 - protein, 233 aa, Methanopyrus kandleri
MIKAVLFDVDDTLYPSSKLAEEARRNAIRAMIEAGLETDLSEEELYRELQEVVKEYGSNHPRHFDLLLRRIGADPEPKLVAAAVVAYHDTKFAYLKPYPDVIPTLMQLREMGFKLGAVTSGLAVKQWEKLIRLGIHHFFHEVVISEEIGVEKPNPKIFIEAARRLGVKPEEAVYVGDRLDKDIRGANRAGMVTVRIRRGKYQDMEPRNDDDVPDFEIDRPRELLDVVRELAKD

SEQ ID NO: 37755 - protein, 1020 aa, Vibrio cholerae O1 biovar eltor str. N16961
MQTQIWHEVIRWRTGVNTAQYSPIRHAEEVNKKVFPMRLAKASIGRKLLFSFSAMALLVLLSALIGVLGFSLVAKTERDVVNNAIPSMIEARQVAELSHQIIASVQTLSNAKNEQEHQAAGQKVFSQLETLLTHIQQLGEEAFDSVLLDRLEQDVQNVIDTLAQLGRRVEHRLTLESQLSTSVKEMRKLAQELEQLTRTQVLNTSTIAIANVTHIYDLLQKQQQAQVYQALDNLVEVDLDLAERLHELHLLAFKVLNEIEETQTVTDLERILALDSEFAANLSIMQRRVQAVEDPTRSKQMVSLLRGLEKRRIVFELLKQRYSNEQAAQQLLHDTLTQFAKLNNTVNQLVDASNQVTTAAVSKLSNTLYDAQLILTVLGLLGLVIVVWIVWKVVYRSVIQRLDQHTAALLSVAKGQLDVDVSTQGNDELGQMGQAIAHARDTAKALKVVAESEVLAKRELQQHKEHLEELVEQRTCQLSEMNHKLNQEVLNHAKARQQAEQASRAKSAFLATMSHEIRTPMNGVLGTARLLQDTTLTSTQQHYVQVINRSGRSLLAILNDVLDYSKIEAGHLEIHHTHFDLYRLVSETHELMQSRAREKGITLTYHIDEDVTQYWQGDEIRIGQVLNNLVGNGIKFTDQGEVRIRIRLAPDGQGIRFAVEDSGIGIAEEEQATLFDAFTQADAGRRKLGGTGLGLAISRKLVQAMGGELQLASQLGQGSCFWFTLPLPVGEPVETPALAVDDVPVANVLLVEDNEVNCLVAQGFLTSLGHQVTLAKSVQEAKLCFQQQRFDIALLDIHLPDGNGVDLLRDLRQMEDSIHNAVIPFIAVSAHVFNEEVAGYLAAGFDGYLPKPLVKEQLAAMLRQQLTAKSGDDADMRDKAESHDTSSIFDNGQPQGEPSPEAQAVRKEWVAVMDHAKFEQDVQILGVEKMREIVGYFEQGCAEFFALCEAERDNDAQIKSQAHKLKGSAGALWLTQLYQLCQQIEKADSPAAAYQQTPLVDAVENAKQALRNALDLLSKE

SEQ ID NO: 37756 - protein, 168 aa, Campylobacter lari RM2100
MTNKEIILGAGCFWCTQAVFDKIKGVVYTEVGYSGGKPNPSYESVINGDENIEVAKIIYDEKQISLEKILEIFLKMHDPTSLDKQGADEGMQYRSVIFYQTNDELKIISDFLQKVQKYYAKAIVTQVLKLEKFYKAEDYHQKYFKNNPNQAYCRFVITPKLEKLVNHS

SEQ ID NO: 37757 - protein, 213 aa, Brassica rapa subsp. pekinensis
MVRGKTQMKRIENATSRQVTFSKRRNGLLKKASELSVLCDAEVSLIIFSPKAKLYEFASSNMQDTIDRYLRHTKDRVSTKPVSEENLQHLKHEAANMMKKIEQLEASKRKLLGEGIGSCSIEELQQIEQQLEKSVKCIRARKTQVFKEQIEQLKQKEKALAAENKKLTEKWGSHEIEVWSNKNQESGKGDEESSPSSEVETELFIGLPCSSRK

SEQ ID NO: 37758 - protein, 213 aa, Cardamine flexuosa
MVRGKTQMKRIENATSRQVTFSKRRNGLLKKAFELSVLCDAEVSLIIFSPKGKLYEFASSNMQDTIDRYLRHTKDRVSSKPVSEENMQYLKFEAANMMKKIEQLEASKRKLLGEGIGTCSIEELQQIEQQLEKSVKCIRARKTQVFKEQIEQLKQKEKALAAENGKLSEKWGSHETEVWSNKNQESGRGDEESSPSSEVETQLFIGLPCSSRK

SEQ ID NO: 37759 - protein, 283 aa, Rhodococcus equi
MRLLVTGGAGYVGSVCTTVLLERGHEVVVVDDLSTGNADAVPAGAEFIEGDIAAVAGSVLGSGNSTPRFDGVLHFAAQSLVGESVERPEQYWQGNVVTTLALLEAMRLSGTPRLVFSSTAATYGEPERTPITEDAPTRPTNPYGATKLAIDHAITSYANAHSLAATSLRYFNVAGAYRGAGENRVVETHLIPLVLQVALGQREKISVFGTDWPTKDGTAVRDYIHVLDLADAHLLALESSVPGHHRIYNLGSGAGFHCPRSHFGLRAGDRPAHRRRGRPPTRG

SEQ ID NO: 37760 - protein, 412 aa, Zea mays
  misc_feature (396)..(396): Xaa can be any naturally occurring amino acid
  misc_feature (400)..(400): Xaa can be any naturally occurring amino acid
  unsure (1)..(412): unsure at all Xaa locations
MLSTLRVASRRAARPAQYNLAATRAASNWANVPQGPPDAILGITKAFKADKFDKKINLGVGAYRDDAGKPYVLPSVREAEMKVVESKLNKEYAGITGVPEFPPAAAKLAYGANSPALDRITITQTISGTGALRVGAAFLAKFFPGEKKISGRQPSWANHKAVFNHAGLEVEQYRYYDKKTIGLDFEGLIADVKSAPNGSVFLFHACAHNPTGVDPTQEQWKQISDVVKEKGHFAFFDMAYQGFASGDTDKDAFAVRYFVEQGHNIALCQSFAKNMGLYGERVGAFSMVCADADEKKRVDSQLKILIRPLYSNPPIHGARIAAEILNSPTLYKQWLGEVKEMADRIITMRALLKDNLEKLGSKHDWSHITSQIGMFAYTGLTSEEMTRLAEEFSVYXHQDXRISVAGITSENV

SEQ ID NO: 37761 - protein, 426 aa, Oryza sativa
MERISTNQLYNSGIPVTVPSPLPAIPATLDENIPRIPDGQNVPRERELRSTPMPPHQNQSTVAPLHGHFQSSTGSVGPLRSSQAIRFSSVSSNEQYTNANPYNSQPPSSGSSSTLNYGSQYGGFEPSLTDFPRDAGPTWCPDPVDGLLGYTDDVPAGNNLTENSSIAAGDELAKQSEWWNDFMNYDWKDIDNTACTETQPQVGPAAQSSVAVHQSAAQQSVSSQSGEPSAVAIPSPSGASNTSNSKTRMRWTPELHERFVDAVNLLGGSEKATPKGVLKLMKADNLTIYHVKSHLQKYRTARYRPELSEGSSEKKAASKEDIPSIDLKGGNFDLTEALRLQLELQKRLHEQLEIQRSLQLRIEEQGKCLQMMLEQQCIPGTDKAVDASTSAEGTKPSSDLPESSAVKDVPENSQNGIAKQTESGDR

SEQ ID NO: 37762 - protein, 424 aa, Streptomyces cyanogenus
MGRRVVVTGIGVLAPGGIGAENFWSLLSEGRTATRGITFFDPSSFRSQIAAEADFDAERSGLSPQEIRRMDRAAQFGVVTGREALADSGLDQAGLDPYRTGVTIGSAVGATMGLDEEYRVVSDGGRLDLVDHHQYTPQHLYNHFVPSSFSAEVAWAVGAEGPNTVVSTGCTSGIDSVGQAVELIREGSVDVMIAGATDAPISPITMACFDAIKATTPRNDEPEHASRPFDGTRNGFVLGEGSAVFVLEELTAARARGANIYAEIAGYASRCNAFHMTGLRPDGREMGEAIRVALDEARINPEAIDYINAHGSGTKQNDRHETAAFKLSLGEHAYRTPISSIKSMVGHSLGAIGSIEIAASLLAMENHVVPPTANLHTPDPECDLDYVPLVAREHTTDHGPDGRQRIPVGFQSAMVLARPERSAA

SEQ ID NO: 37763 - protein, 527 aa, Triticum aestivum
MESETAARGGRSQPLAEEAVGSSRTMERVAAAKKIIENDYRERMKNLRERNERRLILEQQLASSQVPREEQIKLIKELQRKETEYMRLKRHRICVDDFELLTIIGRGAYGEVQLCRDKSSGNIYAMKKLKKSEMVVKGQVEHVRSERNLLAEVGSHCIVKLYYSFQDAEYLYLIMEYLPGGDMMTLLMREDTLTENVARFYIAETVLAIESIHKHNYIHRDIKPDNLLLDKNGHMKLSDFGLCKPIDCTKLSTLNEDEPMTDENLRESMDIDYSLPDTANGRRWRSPNEQLQHWQKNRRKLAFSTVGTPDYIAPEVLLKKGYGVECDWWSLGAIMYEMLVGYPPFYSDDPITTCRKIVHWRSYLKFPENPRLSPEAKDLICRFLCDVDHRIGSGGADQIKAHPWFHGVEWDKLYEMEAAFKPQVNDELDTQNFQKFDEVNPAPARTGSGSSRKMIPNSKDLSFVGYTYKNFEAVKGLRQSAGLGRSSSFTSQPSESASNTADMDSSAEPNGSETHMRTVSSADHMMQ

SEQ ID NO: 37764 - protein, 406 aa, Streptomyces cyanogenus
MTARVVITGNRIAAPNGFGVEDYWAATRVGKSAIGRITRFDPTQYPARLAGEIRGFDARDHLPGRLIPQTDRMTQLALVATDSAFEDAGVKPGDIPEYDMGVVTASTAGGFEFGQNELQALWSKGSQHVSAYQSFAWFYAVNSGQISIRNGMRGHSAVVVSDQAGGLDAIAQARRQIRKGSKLICSGGVDASICPWGWVAQLANGRVSTSENTERAYLPFDADASGYVPGEGGALLILEDAEAARQRGAENVYGEIAGYGSTFDPRPGSGREPRLRRAIELALADADAEPSDIGVVFADAAGTPELDRVEAEALIEVFGAAGVPVTAPKTMTGRLYSGAAPVDVVTAVLAMREGLIPPTVNVSLSPEYDIDLVTAQPRTARVRNALVVARGYGGFNSAMVVRGTDR

SEQ ID NO: 37765 - protein, 494 aa, Arabidopsis thaliana
  misc_feature (467)..(467): Xaa can be any naturally occurring amino acid
  unsure (1)..(494): unsure at all Xaa locations
MANRFLRPNLIHRFSTVSPVGPPTTIIPEILSFDQPKPEVDLDLSDQARLFASVPISTLLRSTAILHATSIGPMVDLGSWLMSSKLMDTTVTRDLVLRIVKGTFYDHFCAGEDAAAAARRVSSVYESTGLKGMLVYGVEHAEDGGACDENIQKFIETVEAAKTLPSSHLSSVVVKITAICPMNVLKRVSDLLRWQYKNPNFKLPWKLNSFPVFSGLSPLYHTTSEPEPLTVEEERELEKAHERLKSVCLRCQESNVPLLIDAEDTILQPAIDYMAYWSAIMFNSDKDRPIVYNTIQAYLKDAGERLHLALRESEKMNVPIGFKLVRGAYMSSEAKLADSLGYKSPVHDTIQNTHDCYNDCMSFLMEKASNGSGIAVILATHNTDSGKLGARKASELGINKENGKIEFAQLYGMSDALSFGLKRAGFNVSKYMPYGPVDTAIPYLIRRAYENRGMMSTGALDRQLMRXSLREELWLGEDTGDKCVSFMEYGKYRF

SEQ ID NO: 37766 - protein, 487 aa, Desulfotalea psychrophila LSv54
MKDEKDKLTGNNGAPVVDNQNVMTAGPRGPLLLQDVWFMEKLAHFDREVIPERRMHAKGSGAYGTFTVTDDIRAYTKAKIFAEIGKTTDLFVRFSTVAGERGAADAERDIRGFAMKFYTEEGNWDLVGNNTPVFFLKDPLKFPDLNHAVKRDPRTNMRSAANNWDYWSSLPEALHQVTITMSDRGIPLSYRHMNGYGSHTYSLLNENNERFWVKFHFKTQQGIKTLSDEEAEKLVGRDRESHQRDLLEAIDNHEFPSWKMQIQVVPEKEAANFPFNPFDLTKVWPHDDYPLIDVGIMELNKNPENYFAEVEQAAFNPANIVPGIGFSPDKMLQGRLFSYGDAQRYRLGVNHHLIPVNRARCPFHSFHRDGAMRVDGNYGGTRGYEPNSYGEWREQPEFKEPPLTLEGAADHWNHREDSDDYYSQPGNLFRLMTAEQKKVLFENTARALGDAPRAIKMRHASNCQKADRAYGEGVAMALGLPVSELEE

SEQ ID NO: 37767 - protein, 384 aa, Oryza sativa
MAAAVVVAGEAAAAAAAAGAGGKKRGASRSWILFDAAGEERVLDADKYAIMHRVDINARDLRILDPLLSYPSTILGRERAIVLNLEHIKAIITAEEVLLRDPLDDNVIPVVEELRRRLAPSSATQHDVEGAEEDESPFEFRALEVTLEAICSFLGARTTELESAAYPALDELTSKISSRNLDRVRKLKSGMTRLNARVQKVRDELEQLLDDDDDMADLYLSRKLAGAASPVSGSGGPNWFPASPTIGSKISRASRASAPTIHGNENDVEELEMLLEAYFMQIDGTLNKLTTLREYIDDTEDYINIQLDNHRNQLIQLELFLSSGTVCLSLYSLVAGIFGMNIPYTWNDNHGYVFKWVVLVSGLFCAFMFVSIVAYARHKGLVGS

SEQ ID NO: 37768 - protein, 255 aa, Bacteroides fragilis YCH46
MDQSMQELNKHRSILRAMKPYIFPSSIETARALILHLVKLMLDEPDRTFCIAFSGGSTPALMFDLWANEYTDITPWERLKVFWVDERCVPPENSDSNYGMMRSLLLSIVPIPYENVFRIQGEKNPKKEAARYSKLVMKEVPVENEFPLFDVVLLGAGNDGHTSSIFPGQEELLSTDHIYEANFNPNNGQKRIALTGLPILNARRIIFLITGRVKSPVVEDIFYSGDTGPAAYIAHHADNVELFMDNAAAEKVIRG

SEQ ID NO: 37769 - protein, 510 aa, Arabidopsis thaliana
MSNIDIEGILKELPNDGRIPKTKIVCTLGPASRTVSMIEKLLKAGMNVARFNFSHGSHEYHQETLDNLRSAMHNTGILAAVMLDTKGPEIRTGFLKDGNPIQLKEGQEITITTDYDIQGDESTISMSYKKLPLDVKPGNTILCADGSISLAVLSCDPESGTVRCRCENSAMLGERKNVNLPGVVVDLPTLTDKDIEDILGWGVPNSIDMIALSFVRKGSDLVNVRKVLGSHAKSIMLMSKVENQEGVINFDEILRETDAFMVARGDLGMEIPIEKIFLAQKLMIYKCNLAGKPVVTATQMLESMIKSPRPTRAEATDVANAVLDGTDCVMLSGESAAGAYPEIAVKVMAKICIEAESSLDYNTIFKEMIRATPLPMSPLESLASSAVRTANKARAKLIIVLTRGGSTANLVAKYRPAVPILSVVVPVMTTDSFDWSCSDESPARHSLIYRGLIPMLAEGSAKATDSEATEVIIEAALKSATQRGLCNRGDAIVALHRIGAASVIKICVVK

SEQ ID NO: 37770 - protein, 360 aa, Synechococcus sp. CC9605
MSPQPLGVAVAGLGFGEKVHLPALAAATDLEAVALWHPRQKRLDAATAAHGLRGFSDWDALLADPAVDAVIIATPPAPRFDLARRALEAGKHLLLEKPIALHADQARELQRLALARGLSVAVDYEYRAVPLFMQAARLLQAGAVGTPWLVKLDWLMGSRADPQRGWNWYAQADQGGGVIGALGTHAVDMLAWLIGPLGAVQALNGVSIKQRPHPDGGLATVDAPDVSLLQAVAQWQGRQDLPVPAQVSLSSVSRNGCGFCLDVVGSSGSLLLSSTNQKDYVHGFELQHAPLGEPFRAVETDADLVFPQTWTDGRIAPVVRVLGWWAESIRSGQPMLPGLAEGVASRVACDQAAGGTLVLA

SEQ ID NO: 37771 - protein, 98 aa, Dianthus caryophyllus
MATVGGIKDSGGSSANSLEIDELAKFAVDHYNSKENALLEFQRVVNTKEQVVAGTIYYITLEATDGGVKKLYEAKVWVKPWVNFKEVQDFKYVGDASA

SEQ ID NO: 37772 - protein, 348 aa, ASPERGILLUS NIDULANS FGSC A4
MSKPVILHLGDPIKYNPALYSTFSSHFTIVRPSLSELRRDEFKTALRENRFGSFHALFRPFWNTGGEMGRWDKELIDLLPKSVKIFASAGAGFDWVDTQYLAEKGILYCNGAAASSESVADMALFLILASFRNLAWSHSAAVSQNPRAFLDAHQNSPLTARNPRGHSLGIIGMGQIGFMIAKKVYAAFGMQILYHDIVRKSQDIERSVNATFFESLDDMLAESDCVIVATPFAGKTLLTAELFDKFKRGSRFVNIARGSLVDEGALVGALESGILMGVGMDVHADEPNVHPRLASHPKVMMMSHNAGGTVDTHIGFERLAMENILAFFKEGRAMTPVNAHLIKPKSVL

SEQ ID NO: 37773 - protein, 219 aa, Ashbya gossypii ATCC 10895
MSNNEDYGYDYDYLFKIVLIGDSGVGKSNLLSRFTTDEFNVNSKSTIGVEFATRTIEVEGKKVKAQIWDTAGQERYRAITSAYYRGAVGALIVYDISKSSSYENCNHWLTELRENADENVAVGLIGNKSDLAHLRAVPTDEAKNFAQGNQMLFTETSALNAENVDLAFRELITAIYQMVSKNQVDLSENNGSGTVPRGPTISLAPAPSEKSKKKTNNCC

SEQ ID NO: 37774 - protein, 175 aa, Draba nemorosa var. hebecarpa
MVRGKTQMKRIENATSRQVTFSKRRNGLLKKAFELSVLCDAEVSLIIFSPKGKLYEFASSNMQDTIDRYLRHTKDRISSKPVSEENMQHLKHEAANMMKKIEQLEASKRKLLGEGIGTCSIEELQQIEQQLGKSVKCIRARKTQVFKEQIEQLKQKEKALAAENEKLSEKWGSNE

SEQ ID NO: 37775 - protein, 241 aa, Ammi majus
MASNGESKHSEVGHKSLLQSDALYQYILETSVYPREPEAMKELREVTAKHPWNLMTTSADEGQFLNMLLKLINAKNTMEIGVYTGYSLLATALALPDDGKILAMDINRENYEIGLPIIEKAGVGHKIDFREGPALPVLDQTLEDGKYHGTFDFVFVDADKDNYINYHKRLIDLVKVGGLIGYDNTLWNGSVAQPADAPMRKYVRYYRDFVIELNKALAADPRIEICMLPVGDGVTLCRRIS

SEQ ID NO: 37776 - protein, 295 aa, Cicer arietinum
MSSSFSFWTLCLILASLVSSSFCAAPRKPVDVPFGRNYYPTWAFDHIKYFNGGSEIQLHLDKSTGTGFQSKGSYLFGHFSMNIKMVPGDSAGTVTAFYLSSTNSEHDEIDFEFLGNRTGQPYILQTNVFTGGQGNKEQRIFLWFDPTKEFHRYSILWNMYQIVFFVDDVPIRVFKNSKDLGVKFPFDQPMKIYNSLWNADDWATRGGLEKTDWSKAPFVAGYKSFHIDGCEASVNAKFCATQGKRWWDQPEFRDLDAAQWRRLRWVRQKFTIYNYCTDRKRLPQIPPECTRDRDI

SEQ ID NO: 37777 - protein, 178 aa, Catharanthus roseus
MGVKRFREEQSANCLMLLSKVGLLSEMEKSAVPALKPGAGGRIYECKTCKKQFLTFQALGGHRASHKKLRLMAADLLHQSLAVTKPKTHACSICGLEFPLGQALGGHMRRHRGAALDGEKPVVVSDKPVAKAVPFLMRSNSSKRIFGFEVDGLDLNLTPEDNDPDERDKFPPLLEFFV

SEQ ID NO: 37778 - protein, 190 aa, Catharanthus roseus
MVMINIPMKRTREANDFDSITTMANCLMLLSQNRSGEFIDSTTSNSSNLNSNRVFECKTCNRQFPSFQALGGHRASHKRPRLGGDLTLSQIPVAAAKPKTHECSICGLEFAIGQALGGHMRRHRAAMSDSASGNSASPPRDDRTVVVKKSNIVDDDNDRRVWGLDLNLTPFENHLEFQLGKIAPTVDCFL

SEQ ID NO: 37779 - protein, 843 aa, Arabidopsis thaliana
MYVVESKAGAIGCMILSLCCLGSWPAILTLLERRGRLPQHTFLDFATANLLAAIVIAFSLGEIGKSTFLKPDFTTQLPQDNWPSVLLAVAGGVLLSIGNLATQYAFAFVGLSVTEVITASITVVIGILPLVCDESKTYVSMVSCVSRLNFIGTTLNYFLDNKINKAEILFPGVGCFLIAVFLGAAVHASNAADVKEKLKSLPSEDLYSSIENGEDKPEIEKTDVESQEKLAEKAKAGTAGFYVELENKRAIKVFGKSIMIGLFITLFAGISLSLFSPAFNLATNDQWSTLPKGVPKLVVYTAFFYFSIAGFLISLILNLIFLYRPMVGLARSSLKKYIYDSKGRGWAVFAGFLCGFGNGLQFMGGQAAGYAAADSVQALPLVSTFWGIVLFGEYRKSSKRTYALLVSMLAMFVAAVAILMASSEVILSSVLAEPSKGLIHLEPENMYLVESKGGAIACMLLALLSLGTWPAVLTLLERRGRLPQHTYLDYSITNLLAAIIIAFTFGQIGSTKPDSPNFITQLAQDNWPSVMFAMAGGIVLSLGNLSTQYAWALVGLSVTEVITSSITVVIGSTLNYFLDDKINKAEILFPGVACFLIAVCLGSAVHRSNADDNKAKLRDFETAKQEASGPSTEIGTNSSKDLETNVTTKPKEGTARFLIELENTRAIKVFGKRKIIGLAITFFAGLCFSLFSPAFNLATNDQWNRLKQGVPKLVVYTAFFYFSVSCFIIALILNVVFLYYPVLGLPKSSFKAYLNDWNGRYWAFLAGFLCGFGNGLQFMGGQAAGYAAADSVQALPLVSTFWGVVLFGEYRRSSRKTYLLLFCMLFMFISAVAVLMASSGHRK

SEQ ID NO: 37780 - protein, 408 aa, Buchnera aphidicola str. APS (Acyrthosiphon pisum)
MISKKTLITRDNFDKLILPIYNPIPFIPIKGKGSRIWDQKGKEYIDFSGGIAVTSLGHCHPILNKTLKNQSKMLWHLSNIFTNEPALRLAKKLLSSSFASRIFFANSGAEANEAAFKLARYYSSKIYNFKKNKIISFYNSFHGRTFFTVSVGGQSKYSNNFGPKPAGIVHASFNDINSVKNLIDHDTCAVVVELIQGEGGVIPANLTFVQALKELCKQYNVLLIFDEIQTGIGRTGKLFYYEYYAITPDILTIAKSLGGGFPISAMLTTNEVASVIAPGIHGTTYGGNPLACAVAESVIDIINTKKVLSGVEKKSKKIISELNIINKRFKLFTEIRGRGLLIGIVLKPNVSRNIHKILNFSLSEGVIFLTAGNNVIRLAPSLIIKELDIIEGMKRFYRALEKYLSRKE

SEQ ID NO: 37781 - protein, 284 aa, Triticum aestivum
  misc_feature (197)..(197): Xaa can be any naturally occurring amino acid
  misc_feature (201)..(201): Xaa can be any naturally occurring amino acid
  misc_feature (226)..(226): Xaa can be any naturally occurring amino acid
  misc_feature (231)..(231): Xaa can be any naturally occurring amino acid
  misc_feature (245)..(245): Xaa can be any naturally occurring amino acid
  misc_feature (248)..(248): Xaa can be any naturally occurring amino acid
  misc_feature (258)..(258): Xaa can be any naturally occurring amino acid
  misc_feature (274)..(274): Xaa can be any naturally occurring amino acid
  misc_feature (279)..(281): Xaa can be any naturally occurring amino acid
  unsure (1)..(284): unsure at all Xaa locations
MQIFVKTLTGKTITLEVESSDTIDNVKAKIQDKEGIPPDQQRLIFAGKQLEDGRTLADYNIQKESTLHLVLRLRGGMQIFVKTLTGKTITLEVESSDTIDNVKAKQLEDGRTLADYNIQKESTLHLVLRLRGGMQIFVKTLTGKTITLEVESSDTIDNVKAKIQDKEGIPPDQQRLIFAGKQLEDGRTLADYNIQKXESTXHLVLRLRGGMQIFVKTLTGKTITLXEVESXDTIDNVKGQIQDKXGIXPPDQQRLIFXAGKQLEDGRTLADYTXKKESXXXLVL

SEQ ID NO: 37782 - protein, 513 aa, Streptomyces clavuligerus
MGAPVLPAAFGFLASARTGGGRAPGPVFATRGSHTDIDTPQGERSLAATLVHAPSVAPDRAVARSLTGAPTTAVLAGEIYNRDELLSVLPAGPAPEGDAELVLRLLERYDLHAFRLVNGRFATVVRTGDRVLLATDHAGSVPLYTCVAPGEVRASTEAKALAAHRDPKGFPLADARRVAGLTGVYQVPAGAVMDIDLGSGTAVTHRTWTPGLSRRILPEGEAVAAVRAALEKAVAQRVTPGDTPLVVLSGGIDSSGVAACAHRAAGELDTVSMGTDTSNEFREARAVVDHLRTRHREITIPTTELLAQLPYAVWASESVDPDIIEYLLPLTALYRALDGPERRILTGYGADIPLGGMHREDRLPALDTVLAHDMATFDGLNEMSPVLSTLAGHWTTHPYWDREVLDLLVSLEAGLKRRHGRDKWVLRAAMADALPAETVNRPKLGVHEGSGTTSSFSRLLLDHGVAEDRVHEAKRQVVRELFDLTVGGGRHPSEVDTDDVVRSVADRTARGAA

SEQ ID NO: 37783 - protein, 604 aa, Eucommia ulmoides
MDAVTIRVPYRNLKQEVELVGIEEQPPRRVQIDQSSSGNSNGNVSNHSPNSSPSDLAPKQNTLFSLILCCTVAAGVQFGWALQLSLLTPYIQTLGIGHAFSSFIWLCGPITGLVVQPCVGIWSDKCTSKYGRRRPFILVGSLMISIAVIVIGFSADIGYLIGDTEEHCRTFKGTRTRAAFVFIVGFWMLDLANNTVQGPARALLADLAGPDQRNSANAVFCSWMAVGNILGFSAGASGQWHRWFPFLMSRACCEACGNLKAAFLVAVVFLTFCTLVTLHFAKEVPLTTPKQPQRLSDSAPLLGNPRQLSFDFSKQKTEMPLVNSETENKSESDSKTESNGKTEDQKVEKDQFESFNDKPGAVLVNLLTSLRHLPPAMHSVLLVMALTWVSWFPFFLFDTDWMGREVYHGDPKGDAAEVRAYDQGVREGAFGLLLNSVVLGVSSFLIEPMCQRLGSRLVWAMSNFIVFACMAGTAVISLVSDIEFGNEHVVGGKETIKTASLVVFAILGLPLAITYSVPFSVTAELTADAGGGQGLAIGVLNLAIVVPQMIVSLGAGPWDALFGGGNIPAFVLASLSALAAGVIATLKLPDLANSSYSSTGFHFG

SEQ ID NO: 37784 - protein, 480 aa, Geobacter sulfurreducens PCA
MDTLSRKTKIIATLGPVSSSPDMIRQLMDAGVDVFRLNFSHGSNDQRREVIAAIRRLSAERGKEIGILADLQGPKIRTGRMENGAIPLVRGDSLDITTDEVLGRPGLISTIYQSLPHDVKPGSRILLDDGLIELRVQSVSGATVRCTVVQGGMLKDLKGINLPGVKVSAPSLSEKDLRDLDFCLEVGVDYIALSFVRTAADVEGLKRILFERDVQVPVVAKIEKPEALRNFKSILKVADAVMVARGDLGVEISPEKVPLFQKKIIRACNEAGKPVITATQMLESMISHPRPTRAETSDVANAILDGTDAVMLSGETASGQFPLEAVRTMDKVALDVERFAQVEDGSGPRRHSVSIAEAVAEAACHAAVILKAKAVACMTQSGSTAARISRYRPPLPILAFTGSVDTMRRLSLYWGVKAYPIGTMAGTDEQIVAVESTLLSGGYRKGDVVVITMGVPVEARGSTNLMKVHKLGTGQFFEIF

SEQ ID NO: 37785 - protein, 357 aa, Synechococcus sp. CC9605
MTLWVVKIGTSLLRGETATTIDGYARCFAGAMDRGDQVVLVTSGAVGLGCQKLALTNRPDTVVALQAAAAIGQGALMGLYERAMARHGRSVAQVLLTRSDLADRRRYQNASGTLRQLLSWGVLPVINENDALSPAELRFGDNDTLSALVAAAVEAQQLILLTDVDRLYSSDPRVDANAEPISDIRHPRELDSLEQGAGDGGRWGTGGMTTKLAAARIATASGITVQLADGRDPARLEALLQGQRGGTVFHPHPEPLGNRRSWLAHVLRPEGELQLDAGACAALQHRGASLLLVGVTAVRGDFAANQPIQLLDPDGEDLGRGLCSMDSDQLRAAMNDPSPGESSPVVVHRDGLVLRSR

SEQ ID NO: 37786 - protein, 510 aa, Triticum aestivum
MTFAGSGYGERGSKRAHFVLVPMMAQGHTIPMTDMARLLAEHGAQVSFITTAVNAARLEGFAADVKAAGLAVQLVELHFPAAEFGLPDGCENLDMIQSKNLFLNFMKACAALQEPLMAYLREQQRSPPSCIISDLVHWWTGDIARELGIPRLTFSGFCGFSSLIRYITYHNNVFQNVKDENELITITGFPTPLELTKAKCPGNFCIPGMEQIRKKFLEEELKSDGEVINSFQELETLYIESFEQTTKKKVWAVGPMCLCHRDNNTMAARGNKASMDEAQCLQWLDSMKPGSVVFVSFGSLACTTPQQLVELGLGLETSRKPFIWVIKAGAKLPEVEEWLADEFEERVKNRGMVIRGWAPQLMILQHQAVGGFVTHCGWNSTIEGICAGVPMITWPHFGEQFLNEKLLVDVLKIGMEVGVKGVTQWGSENQEVMVTRDEVQKAVNTLMDEGAAAEEMRVRAKDCAIKARRAFDEGGSSYDNIRLLIQEMEIKTNACGSVVDRDGNKLSFLV

SEQ ID NO: 37787 - protein, 472 aa, Arabidopsis thaliana
FASSGSDDNDVVIIGGGPGGYVAAIKAAQLGLKTTCIEKRGALGGTCLNVGCIPSKALLHSSHMYHEAKHVFANHGVKVSSVEVDLPAMLAQKDTAVKNLTRGVEGLFKKNKVNYVKGYGKFLSPSEVSVDTIDGENVVVKGKHIIVATGSDVKSLPGITIDEKKIVSSTGALSLTEIPKKLIVIGAGYIGLEMGSVWGRLGSEVTVVEFAADIVPAMDGEIRKQFQRSLEKQKMKFMLKTKVVGVDSSGDGVKLIVEPAEGGEQTTLEADVVLVSAGRTPFTSGLDLEKIGVETDKGGRILVNERFSTNVSGVYAIGDVIPGPMLAHKAEEDGVACVEFIAGKHGHVDYDKVPGVVYTYPEVASVGKTEEQLKKEGVSYNVGKFPFMANSRAKAIDTAEGMVKILADKETDKILGVHIMSPNAGELIHEAVLAINYDASSEDIARVCHAHPTMSEAIKEAAMATYDKPIHM

SEQ ID NO: 37788 - protein, 326 aa, Streptomyces avermitilis MA-4680
MTWLITGGAGYIGAHVAWAMTEAGERVLVLDDLSAGVPDRLPTSIPLVQGSSLDGALLKRVFAEHSVTGVVHLAARKQVGESVAQPTRYYQENVGGLTTLLDAVAGAGIQRFLFSSSAAVYGNPDVDLITEDTPCAPVNPYGETKLAGEWLVRAAGRAHGISTVCLRYFNVAGAASPELADTGVFNVVPMVFDRLTRGEAPRIFGDDYPTSDGTCVRDYIHVADLADAHLAAARRLTAGATGDLTVNIGRGEGVSVRELITLIGEVSGDTTPALVEPRRPGDAPRAVASAALAAEELGWHARRGVREMVESAWRGWRHHHPEAARG

SEQ ID NO: 37789 - protein, 155 aa, Brassica napus
MKSDFSSVLLVLGVVLNSLALFCNGGITSKFVRKVEKSIDMPLHSDVFRVPPGHNAPQQVHITQGDVEGKAVIVSWVTQEAPGSNTVLYWKEHSSKKHKAHGKTNTYKFYNYTSGYIHHCTIRNLEYASGHIHHCTIRNLEYDTKYYYVVGVGQT

SEQ ID NO: 37790 - protein, 637 aa, Emericella nidulans
MDPNNNRPHLNFGYNERAFNPAAANNRAYPTTPSAFPQPIYQSQSPQDYMDAQNGVYGQGYFMPNNYPAQAAYAQPHYGQPNLQSPQPAYQSRMGYNVSPNDGTNGLIQQFSNQDLNSNRTGFFNRSASPAQRPRTAGNTAPGQQQQPGHLAPPVPRSPRLPPENEELQRYPERFSENVHKRGKAAKELVNVFFHENIERARDRNMRSAELDKMMRDPNISQDAKVKEAEMVGKKESTFLRFLRTPETPANFQTIKIIGKGAFGEVKLVQRKSDNKIYALKSLIKSEMFKKDQLAHVRAERDILADSKDNPWLVKLHASFQDPAYLYLLMEFLPGGDLMTMLIKYEIFSEDITRFYMAEIVMAIEAVHKLGFLHRDIKPDNILLDRGGHVKLTDFGLSTGGKKTHDNSYYQNLLKNSTSKDKNRNSGYFNDAINLTVSNRGQINTWRKSRRAMAYSTVGTPDYIAPEIFNGQGYTYLCDWWSVGAIMFECLVGWPPFCAEDTTDTYRKIVNWRECLYFPEELTLSRESEGLIRSFLCDAEHRIGNEGGQYGGATQIKNHPFFRGVVWDQLRKIRAPFEPRLTSNIDVSYFPIDEIPQEDTSAIHRAQARAMPDEQNAEMSLPFIGYTYKAFNAFQAS

SEQ ID NO: 37791 - protein, 360 aa, Physcomitrella patens
MSPSVDCLASLYCAEDVSGTAWNESEMCGAADRVFESQPAVFMDFPVEDDEAIATLLMKEAQFMPEADYLERYQSRKLSLEARLAAIEWILKVHSFYNYSPLTVALAVNYMDRFLSRYYFPEGKEWMLQLLSVACISLAAKMEESDVPILLDFQVEQEEHIFEAHTIQRMELLVLSTLEWRMSGVTPFSYVDYFFHKLGVSDLLLRALLSRVSEIILKSIRVTTSLQYLPSVVAAASIICALEEVTTIRTGDLLRTFNELLVNVESVKDCYIDMRQSEIGPYCVRMGLKRKILHASEPQSPVGVLEAADVSSPSGTVLGFSSRESSPDVTDSPPSTNSQRKRRKLCLHNESCLHVESASL

SEQ ID NO: 37792 - protein, 417 aa, Ajellomyces capsulatus
MREVVSLNVGQAGGQIANSCWLYCLEHGIQPDGYLTEERKAADPDQGFNTFFSETGQGKYVPRTIYCDLEPNVVDEVRTGPYRALFHPEQMITGKEDASNNYARGHYTVGKEMIDQCLDKVRRVADNCSGLQGFLVFHSFGGGQGSGFGALLMERLSVDYGKKTKLEFCVYPAPQNATSVVEPYNSILTTHTTLEHSDVQFMVDNEAIYDICRRNLGIERPSYENSNRLMAQGQSPITAIMLLFDCALNVDLNEFQTNLVPYPRIHFPLASYSPVVSAGKASHESNSVMEVTIVCFEPNNQMVKCDPRNGKYMATCLLYRGDVVPKDVHAVAATLKTKRTVQFVDLQPTGFKIGICYQPPTMVPNGDLAKVNRACMLSNTTAISEAWTALSHKFDLIYSKRAFVHWYVGEGMEEGEF

SEQ ID NO: 37793 - protein, 137 aa, Brassica napus
  misc_feature (98)..(98): Xaa can be any naturally occurring amino acid
  misc_feature (107)..(107): Xaa can be any naturally occurring amino acid
  misc_feature (111)..(111): Xaa can be any naturally occurring amino acid
  misc_feature (121)..(121): Xaa can be any naturally occurring amino acid
  misc_feature (128)..(129): Xaa can be any naturally occurring amino acid
  unsure (1)..(137): unsure at all Xaa locations
MTKMVLKPDPNLTQSNAKEIPYRGVRKRPWGRYAAEIRDPRKKTRVWLGTFDTAQQAARAYDAAAREFRGAKAKTNFPTSLELNVNDGGYSRSPSQSXPVDSASPTXGRLXTPPQLELSLXNGSGAGXXIPCACLRW

SEQ ID NO: 37794 - protein, 310 aa, Malus x domestica
MSTGTLSSGYEMPVIGLGLWRLEKDELKEVILNAIKIGYRHFDCAAHYKSEADVGEALAEAFKTGLVKREELFITTKIWNSDHGHVVEACKNSLEKLQIDYLDLYLVHYPMPTKHNAIGKTASLLGEDKVLDIDVTISLQQTWEGMEKTVSLGLVRSIGLSNYELFLTRDCLAYSKIKPAVSQFETHPYFQRDSLVKFCMKHGVLPTAHTPLGGAAANKDMFGSVSPLDDPVLNDVAKKYGKSVAQICLRWGIQRKTAVIPKSSKIQRLKENLEVLEFQLSDEDMQLIYSIDRKYRTSLPSKTWGLDVYA

SEQ ID NO: 37795 - protein, 163 aa, Cicer arietinum
LVSAYRYEGSKVKDDTAKSEAKTLSNAIKNVHKKPIVEDDEVIRILATRSKAHLQQVHKHYKEISGKNLEEDLNDLRFKETVECLCTPQVYFSKVLDASLKIDVDKNIKKSLTRVIVTRADIDMKEIKGEYNNLYGVSLQQKIEETAKGNYKDFLLTLIARGG

SEQ ID NO: 37796 - protein, 220 aa, Brassica napus
MGRRPARCYRQIKGKPYPKSRYCRGVPDPKIRIYDVGMKKKGVDEFPFCVHLVSWEKENVSSEALEAARIACNKYMVKSAGKDAFHLRIRVHPFHVLRINKMLSCAGADRLQTGMRGAFGKALGTCARVAIGQVLLSVRCKDNHGAHAQEALRRAKFKFPGRQKIIVSRKWGFTKFNRADYTRMRQSKRIVPDGVNAKFLSNHGPLAKRQPGSAFISATE

SEQ ID NO: 37797 - protein, 144 aa, Arabidopsis thaliana
  misc_feature (16)..(16): Xaa can be any naturally occurring amino acid
  unsure (1)..(144): unsure at all Xaa locations
LVDTPAIGRSPLAQEXDNDVPAPGNQFAEFAAGCFWGVELAYQRIPGVTETEVGYTQGISHNPSYKDVCTNTTNHAEVVRVQYDPNECTYETLLDLFWSRHDPTTLNRQGKLVGAQYRSGIYFFTPEQEKLARESLENQQKNWR

SEQ ID NO: 37798 - protein, 611 aa, Enterococcus faecalis
SGMKKKVHFFQSVNFKIALSFILLLLIAIQIIGGYFIRELEATTISDFKKNMDSQVVQLSNTLSTQMSNKDLERSDVDANLKKALSDFSNADISEARIVDDKGIIRATNDLNQQNIIGKKNDYRDLNDFTSKKYQALDNDKRVYVNVQPIQSPTGETVIGVLYVKSNLENKYQEITNTASIFFTASIIAAAISIIVTLLIARSITKPIGEMREQAIRIARGDYAGKVEVHGKDELGQLAETFNQLSERIEEAQETMEAERNRLDSVLTHMTDGVIATDRRGKVITINEMALSLLNVKNENVIGTSLLELLDIEEDYTLRKLLEEPDELLIDRSTSDREEDQMIIRVDFTMIRRESGFITGLVCVLHDVTEQEKNERERREFVSNVSHELRTPLTSMRSYIEALSEGAWENPEIAPNFLKVTLEETDRMIRMINDLLNLSRMDSGNTHLQLEYVNFNELINFVLDRFDMMIENEQKNYKICREFTKRDLWVELDTDKVIQVLDNILNNAIKYSPDGGVITCRLVETHNNVVFSISDQGLGIPKKDLGKVFERFYRVDKARARAQGGTGLGLAISKEVIRAHNGSIWVESTEGEGSTFYISLPYEPYEEDWWE

SEQ ID NO: 37799 - protein, 181 aa, Vigna radiata
MASSMISSPAVTTVNRAGAAGMVAPFTGLKSLGGFPTRKTNNDITSVANNGGRVQCMQVWPTIGKKKFETLSYLPDLTEEQLGKEVDYLLRSGWIPCLEFELSHKDAFPHRENNRSPGYYDGRYWTMWKLPMYGCTDSSQVLKELREARTLYPDGFVRIVGFDSVRQVQCISFIAYKPPGY

SEQ ID NO: 37800 - protein, 163 aa, Triticum aestivum
  misc_feature (105)..(105): Xaa can be any naturally occurring amino acid
  unsure (1)..(163): unsure at all Xaa locations
MSAAEGAVVFSEEKEALVLKSWAIMKKDSANLGLRFFLKIFEIAPSARQMFPFLRDSDVPLETNPKLKTHAVSVFVMTCEAAAQLRKAGKITVRETTLKRLGGTXHLKYGVADGHFEVTRFALLETIKEALPADMWGPEMRNAWGEAYDQLVAAIKQEMKPSE

SEQ ID NO: 37801 - protein, 388 aa, Crocosphaera watsonii WH 8501
MKAMILAAGKGTRVRPITHTIPKPLIPILQKPVMEFLLELLRKHGFDEIMVNVSHLAEEIEGYFRDGQRFGVQIGYSFEGKIVDGDLVGEALGSAGGLRRIQDFNPFFDDTFIVLCGDALIDLDLTAAVKYHRDKGAIATIITKSVPKESVSSYGVVVSDEEGRIKTFQEKPSVEEALSTNINTGIYIFEPEIMNYIPPNQKYDIGGELFPMLVEKGAPFYAVNMDFEWVDIGKVPDYWHAVRGVLSREIKNVQIPGIEVKPGIYTGLNVSVNWDKVNIQGPVYIGAMTHIEDGATIIGPSMIGPNCWVCSGATVDNSVIFEYSRLGPGVRLLDKLVFGRYCVDKTGAAIDVQAAALDWLITDSRQTFPDDTQIPQQAIAELLNQDNG

SEQ ID NO: 37802 - protein, 95 aa, Geobacter sulfurreducens PCA
MNLRPLQDRILVKRIEEETKTAGGIFIPDTAKEKPQRGEIVAVGNGKKTEDGKVIPVDLKVGDKVLFGKYAGTDIKIEGQEFLIMREDDILGVIE

SEQ ID NO: 37803 - protein, 544 aa, Geobacter sulfurreducens PCA
MAARIIKFDQEGRNAILKGVNTLADAVKVTLGPKGRNVVIEKAFGSPLITKDGVTVAKEIELEDKFENMGAQLVKEVASKTSDVAGDGTTTATVLAQAIYRQGSKLVAAGHNPMEIKRGIDKAVETIVAELKSISKPIKDHKEIAQVGTISANNDKTIGDIIAQAMEKVGKEGVITVEEAKAMETSLETVEGMQFDRGYLSPYFVTDPERMEASLENAMILIHDKKISNMKDLLPVLEQTAKSGRPLLIIAEDIEGEALATLVVNKLRGVLNICAVKAPGFGDRRKAMLEDIAILTGGQVISEEIGNKLENTTMDMLGRAKRITVDKDNTTIIDGDGKEADIQGRVKQIRAQIEETTSDYDREKLQERLAKLVGGVAVIKVGAATETEMKEKKARVEDALHATRAAVDEGIVPGGGVAYLRALASLDALSLPTEQQFGVNVIKRSLEEPIRQIAQNAGVDGSIVVDKVKNSKDAFGYNAAEDEYVDMLAAGIIDPTKVSRSALQNAASVAGLMLTTEAMIADKPKEEAPMPAMPGGMGGMGGMM

SEQ ID NO: 37804 - protein, 220 aa, Thermotoga maritima MSB8
MEKTVIYLLEDGYVDFVVEKIRTKMEKLLEEKDKIFVVLAGGRTPLPVYEKLAEQKFPWNRIHFFLSDERYVPLDSDQSNFRNINEVLFSRAKIPSGNVHYVDTSLPIEKACEKYEREIRSATDQFDLAILGMGPDGHVASIFDLETGNKDNLVTFTDPSGDPKVPRVTLTFRALNTSLYVLFLIRGKEKINRLTEILKDTPLPAYFVRGKEKTVWFVGK

SEQ ID NO: 37805 - protein, 259 aa, Oryza sativa
  misc_feature (56)..(56): Xaa can be any naturally occurring amino acid
  misc_feature (220)..(220): Xaa can be any naturally occurring amino acid
  unsure (1)..(259): unsure at all Xaa locations
MSLLSKLRLVTVDVTGTLIAYKGQLGDYYCMAAKSAGMPCPDYKRMHEGFKAAYTXMTVRHPCFGHASNMPNIDWWKMCVKDSFIRAGYEYDDATFEKIFRRIYSTFGSSAPYSVFPDAQQFLRWVRNNGCTVGIVSNAEYRYKDVVLPALGLNEGSEWDFGVFSGIVGVEKPDRRMYEAALEMAGGVAAAEALHIGDSMRKDYAPARRAGMHALLLDRXRRAEAEGWCASRAAVLPDLRPLPGIASPPPQPHTKMAAR

SEQ ID NO: 37806 - protein, 686 aa, Bacillus circulans
APDTSVSNKQNFSTDVIYQIFTDRFSDGNPANNPTGAAFDGTCTNLRLYCGGDWQGIINKINDGYLTGMGVTAIWISQPVENIYSIINDSGVNNTAYHGYWARDFKKTNPAYGTIADFQNLIAAAHAKNIKVIIDFAPNHTSPASPDQPSFAENGRLYDNGTLLGGYTNDTQNLFHHNGGTDFSTTENGIYKNLYDLADLNHNNSTVDVYLKDAIKMWLDLGIDGIRMDAVKHMPFGWQKSFMAAVNNYKPVFTFGEWFLGVNEVSPENHKFANESGMSLLDFRFAQKVRQVFRDNTDNMYGLKAMLEGSAADYAQVDDQVTFIDNHDMERFHASNANRRKLEQALAFTLTSRGVPAIYYGTEQYMSGGTDPDNRARIPSFSTSTTAYQVIQKLAPLRKCNPAIAYGSTQERWINNDVLIYERKFGSNVAVVAVNRNLNAPASISGLVTSLPQGSYNDVLGGLLNGNTLSVGSGGAASNFTLAAGGTAVWQYTAATATPTIGHVGPMMAKPGVTITIDGRGFGSSKGTVYFGTTAVSGADITSWEDTQIKVKIPAVAGGNYNIKVANAAGTASNVYDNFEVLSGDQVSVRFVVNNATTALGQNVYLTGSVSELGNWDPAKAIGPMYNQVVYQYPNWYYDVSVPAGKTIEFKFLKKQGSTVTWEGGSNHTFTAPSSGTATINVNWQP

SEQ ID NO: 37807 - protein, 214 aa, Zea mays
MAQDLRSQDIKNPIDVAEYLFRRLQQVGVESVHGVPGDYNLVALDYIPKVGLKWVGNCNELNAGYAADGYARVKGISALVTTFGVGELSAVNAIAGAYSEYVPIVHIVGYPSTASQKNGALLHHTLGNGDFTVFSRMSKEISCAVSMLNSQHEAAMLIDNAIRECYLKSRPVYISLPSDMVTKKVDGDRLNTPLDLEYPQNDQEAEDYVCRCGL

SEQ ID NO: 37808 - protein, 167 aa, Nicotiana sylvestris
MLPMITEFINYGQQTIRAARYIGQGFMITLSHANRLPVTIQYPYEKLITSERFRGRIHFEFDKCIACEVCVRVCPIDLPVVDWKLETDIRKKRLLNYSIDFGICIFCGNCVEYCPTNCLSMTEEYELSTYDRHELNYNQIALGRLPMSVIDDYTIRTISNLPQIKNE

SEQ ID NO: 37809 - protein, 190 aa, Momordica charantia
MDSFWFVQQWPPAVCSFQKSGSCPGSGLRTFTIHGLWPQQSGTSLTNCPGSPFDITKISHLQSQLNTLWPTVLRANNQQFWSHEWTKHGTCSESTFNQAAYFKLAVDMRNNYDIIGALRPHAAGPNGRTKSRQAIKGFLKAKFGKFPGLRCRTDPQTKVSYLVQVVACFAQDGSTLIDCTRDTCGANFIF

SEQ ID NO: 37810 - protein, 456 aa, Rhodococcus opacus
MVVDVTELRARARRHLGPHFTRKDTWESDFPVFVRGEGSYLIDTEGDRFLDGLAGLFCVNIGHGRDDIAKAASEQIGTLAYASNWGSAHIPAIEASALIADLAPGDLGTTFFVNSGSEAVETAVKFARQYHRSQGNPQRTKIISREMAYHGTTLGALSVTQLPKIKDPFGPLLPGVRSVPNTLGYLGDCGPANELDCIAAIEAVIEEEGAETIAAVFAEPVQNGRGALVPPDGYWAALRALCDKHGILLVSDEVICSFGRLGHWFGHGLTGVVPDMITFAKGSTSGYAPLGGLIVREQLVRELYDSPKGGVFTHGATWGGHPVSTAVAVANITAMRDENVLGNVSARGPKLRSALDSLMSSHRCVKDVRGTGFFYAIELMADSDSGREFTEQESLTVLRKVLPEAFARTKVILRGDDRGATMLMISPPLVADDEVLSELLHGIDSMLTDIEKAIQP

SEQ ID NO: 37811 - protein, 857 aa, Vibrio cholerae O1 biovar eltor str. N16961
MNIRPSQIKHKQRIASFITHAVVVVMGVLIVSVLFQSYQISSRLMAQEGQRTSVQTSSLIQSLFDFRLAALRIHQDSTAKNASLINALVSRDSSRLDEFFSSVDELELSNAPDLRFISSHDNILWDDGNASFYGIAQQELNKLIRRVAISGNWHLVQTPSEGKSVHILMRRSSLIEAGTGQVVGYLYVGIVLNDNFALLENIRSGSNSENLVLAVDTTPLVSTLKGNEPYSLDYVVHSAKDAMRDSFIVGQTFLEVESVPTYLCVYSIQTNQNVLTLRDNFYFWMAFALISMIGVSIASRWWLQKRIQREIETLMNYTHKLMDLDTKSEFIGSKIYEFDYFGRTLEQSFRRLANKEKQFEDLFNFALSPTMLWNTSGRLIRMNPSAQIQFLREDAQNHFLFEILERQLLPTITNAAQGNNPSDVTTEVDGRVYRWNLSPIMVEGQIISIITQGQDITTIAEAEKQSQAARREAEESARVRAEFLAKMSHELRTPLNGVLGVSQLLKRTPLNDEQREHVAVLCSSGEHLLAVLNDILDFSRLEQGKFRIQKNEFRLKELVCAIDRIYRPLCNEKGLELVVNSNITTAAIVRSDQIRINQILFNLLNNAIKFTHQGSIRVELQLIEGDPLAQLVIQVVDTGIGIREQDLTVIFEPFMQAESTTTREYGGSGLGLTIVHSLVEMLSGQLHVSSEYGIGTRFEIQLPIELVEKPDAPQQLLPAPDPQPLFDKTLRVLLVEDNHTNAFIAQAFCRKYGLDVSWVTDGLQAIEELKIHDYDLVLMDNQLPYLDGVETTRTIKKVLHLPVVVYACTADGLEETRQAFFHAGAEYVLVKPLKEQTLHKALEHFKHHHGQKNAGLN

SEQ ID NO: 37812 - protein, 163 aa, Gossypium hirsutum
MATYEGKVFTEEQEALVVKSWTVMKKNAAELGLKFFLKIFEIAPSAKKLFSFLRDSNVPLEQNTKLKPHAMSVFVMTCESAVQLRKAGKVTVRESNLKKLGATHFKYGVVDEHFEVTKFALLETIKEAVPDMWSDEMKNAWGEAYDRLVAAIKIEMKACSLAA

SEQ ID NO: 37813 - protein, 176 aa, Triticum aestivum
  misc_feature (149)..(149): Xaa can be any naturally occurring amino acid
  unsure (1)..(176): unsure at all Xaa locations
MAPTVMASSATSVAPFQGLKSTAGLPVSRRSNGASLGSVSNGGRIRCMQVWPIEGIKKFETLSYLPPLSTEALLKQVDYLIRSKWVPCLEFSKVGFIFREHNASPGYYDGRYWTMWKLPMFGCTDATQVINEVEEVKKEYPDAYVRIIXGFDNMRQVQCVSFIAFKPPGCEESGKA

SEQ ID NO: 37814 - protein, 170 aa, Ashbya gossypii ATCC 10895
MSFNSPFFDFFDAINNEVANYNRLLGRGPSSSAVNKHGKKDTTDWLTNARIIPPVDVLEQEKDYEVHVSVPGIVDQDKISIEFHSDRGELVISGEVPTKETEENKDGWRVRERATGSFRRVVGLPDKPGVDAEHITANYEQGVLTLRVPKLESRENQAVRKIQVGRGSAK

SEQ ID NO: 37815 - protein, 396 aa, Shewanella sp. MR-7
MFNSLVAMPADPILGLLTQYREDSHPQKVDLGVGVYKDPAGNTPILNCVKKAEKFRLDTETTKVYIGPTGSPQFNTLITELAFGSDHSAIIANRIRTVSTPGGTGALRVAGDFIKRCNPNAVLWVSDPTWANHIGLFEAAGLAVKTYPYYDYDTKSLKFDEMLSALTQIGPNDVVLFHACCHNPSGMDLTTEQWDKVVALTKEQGFTPLIDMAYQGFGDGVDIDAYGVRKMAAAVDNMILCSSCSKNFGLYRERIGSCSVVAKDANTANIAQSVLLYVVRCLYSMPPAHGAAIVETILGSAELKQEWLDELKVMRDRINGNRAILVEKLKINGVDRDFSFIARQKGMFSFLGVNPEQVARLQKEFSIYMVGSSRISIAGISEDNVDYLAKSIAEVL

SEQ ID NO: 37816 - protein, 487 aa, Streptomyces avermitilis MA-4680
MSKDAVDTARVASRTDVTQSPADAGDAGYSKDLKARHVNMIAIGGAIGTGLFLGAGGRLHNAGPALAIAYLVCGVFAFFVVRALGELVLYRPSSGSFVSYAREFLGEKGAYVAGWMYFLNWSTTGIADITAIALYTHYWSLFTDIPQWVLALIALAVVLAVNLISVKIFGEMEFWFAIIKVATLVGFMLIGIFLLATHHEVGGHTPGLSAVTDHGGIFPHGMMPVVLVMQGVIFAYAALELVGVAAGETAEPEKVVPRAVNSIMWRVGLFYVGSVVLLALLLPGSVYSADQSPFVTVLSKIGIPAAGDVMNLVVLTAAMSSLNSGLYSTGRILRSMAMAGSAPKFTARMNRSQVPYGGILLTCAVCVLGVGLNYLMPTQAFEIVLNVASLGIISTWVIIMICHLVFVRRARAGLVTRPSFRLFGSPVTEIVTIAFLLAVLGLMWNDPEVGRKTLLLIPLVAVLLVGGWFAVRRRVSQAEDRELAQLK

SEQ ID NO: 37817 - protein, 659 aa, Neisseria meningitidis MC58
MSQLANAIRFLSADAVQKANSGHPGAPMGMAEMAETLWTKFLNHNPANPKFYNRDRFVLSNGHASMLLYSLLHLTGYNLSIEDLKNFRQLHSKTPGHPEYGYTDGVETTTGPLGQGIANAVGMALAEKILAAEFNKDGLNIVDHYTYVFMGDGCLMEGVSHEACSLAGTLGLGKLIVLYDDNNISIDGKVDGWFTENIPQRFESYGWHVVPNVNGHDTAAIQAAIEAARAETGKPSIICCKTLIGKGSANKEGSHKTHGAPLGADEIEATRKHLGWTYPAFEIPQEIYDAWNAKEQGAKLEADWNELFAQYQAKYPAEAAEFVRRMDKKLPDNFDEYVQAALKEVCAKAETIATRKASQNSIEILAKELPELVGGSADLTPSNLTDWSNSVSVTRDKGGNYIHYGVREFGMGAIMNGLVLHGGVKPFGATFLMFSEYERNALRMAALMKINPVFVFTHDSIGLGEDGPTHQPIEQTATLRLIPNMDVWRPCDTAESLVAWAEAVKAADHPSCLIFSRQNLKFQARSEQQLNDIKRGGYVISEAQGNAQAVIIATGSEVELALEAQKALAAQNIAVRVVSMPSTNVFDRQDAAYQAAVLPEGLPRIAVEAGHADGWYKYVGLNGAVVGINRFGESAPADLLFKAFGFTVDNVVDTVKSVL

SEQ ID NO: 37818 - protein, 401 aa, Arabidopsis thaliana
MSPDGELVPVDSSAVVTAKRKTSQLSRSWISIDATGQKTVLDVDKHVIMHRVQIHARDLRILDPNLFYPSAILGRERAIVLNLEHIKAIITAEEVRIISYWLVAKYSSDENVIPVLEEFQRRLPVGNEAHGVHGDGDLGEEDESPFEFRALEVALEAICSFLAARTTELEKFAYPALDELTLKISSRNLERVRKLKSAMTRLTARVQKVRDELEQLLDDDGDMADLYLTRKLVGASSSVSVSDEPIWYPTSPTIGSMISRASRVSLVTVRGDDETDVEELEMLLEAYFMQIDSTLNKLTELREYIDDTEDYINIQAIITVYLQLDNHRNQLIQLELMLSAGTVCVSVYSMIAGIFGMNIPNTWNHDHGYIFKWVVSLTGTFCIVLFVIILSYARFRGLIGS

SEQ ID NO: 37819 - protein, 576 aa, Cucumis sativus
MAASFSVPSMIMEEEGRFEAEVAEVQAWWNSERFKLTRRPYTAKDVVSLRGSLRQSYASNDLAKKLWRTLKTHQANGTASRTFGALDPVQVTMMAKHLDTIYVSGWQCSSTHTSTNEPGPDLADYPYDTVPNKVEHLFFAQQYHDRKQREARMSMSREERAKTPYIDYLKPIIADGDTGFGGTTATVKLCKLFVERGAAGVHIEDQSSVTKKCGHMAGKVLVAVSEHINRLVAARLQFDVMGVETILVARTDAVAATLIQTNVDKRDHQFILGATNPNLRGKSLAGALAEAMAAGKTGAELQALEDQWISMAQLKTFSECVTDAIMNTNATENEKRRKLDEWMNHSSYEKCISNEQGREIAEKLGLKNLFWDWDLPRTREGFYRFKGSVMAAIVRGWAFAPHADLIWMETSSPDLVECTTFAKGMKSIHPETMLAYNLSPSFNWDASGMSDKQMEEFIPRIARLGFCWQFITLAGFHADALVVDTFARDYARRGMLAYVERIQREERNNGVDTLAHQKWSGANYYDRYLKTVQGGISSTAAMGKGVTEEQFKESWTREGAVNLGEEGNVVVAKSRM

SEQ ID NO: 37820 - protein, 459 aa, ASPERGILLUS NIDULANS FGSC A4; identical to SEQ ID NO: 806

SEQ ID NO: 37821 - protein, 115 aa, Casuarina equisetifolia
ACLNCINSGIRRMGVITQYQSHTLVQHIQRGWSFFNEEMNEFVDLLPAQQRMKGENWYRGTADAVTQNLDIIRRYKAEYVVILAGDHIYKQDYSRMLIDHVEKGARCTVACMPVP

SEQ ID NO: 37822 - protein, 212 aa, Clostridium thermocellum ATCC 27405
MICYEYINDYIRKTIKKNEGFLAELEEFAKENHVPIVHPEVASLLRVIGLTLRPSRVLEVGTAIGYSAILFSTFLEPGGRIDTIDRYELMLEKARANVKKAGLQDVINIIEGDALEVLKCLEHKYDMIFLDAAKGQYPEFLPECLRLLRSGGLLISDNILYKGMVAKDELVVRRKKTIVKRLRNYLETICNTDELETSILPVGDGLAISFKK

SEQ ID NO: 37823 - protein, 216 aa, Zea mays
MTASDHIPVTVLTGFLGSGKTTVLNHLLRQKELNGVVAIINEFGEVALDHLLVESSEDRLALLDNGCICCSVREDLIETLADLAARRAAGTIPPFHRVLVETTGLADPVPVLHTLMTAPDILSRYRIDGVVATVDAVNGVHTLAAHGEAIRQVAVADRLLVTKIDLAADDALARLDAQLAAINPVAARHQIRNGMVDPAKVLDAGLFDPSARSGDV

SEQ ID NO: 37824 - protein, 483 aa, Rhodobacter sphaeroides 2.4.1
MPMPTPRSSLKAVLIASTLITAGVAGTALPPTAARAEVPMQGYADLVARVSPAVVFIEVTAKSKESTPMAGSPFEEFLRRFGEIDPQFRMPQAPEGGQVMHGLGSGFLISQDGIIVTNNHVVENATDMKVKLEDGREFKAEVVGTDPMTDIAVIRLKDAKDLPFVELGDSEKLRVGDAVVAVGNPFGLGGTVTSGIVSAMGRNINSGPYDDYIQTDAAINRGNSGGPLFDTEGKVVGMNTAIFSPSGGSVGIGFSIPANTVKDVVAQLQDKGSVSRGWLGVTVQGMTPEIAQAMGLEGRDGALVAEVQQGSPADEGGLESGDVITAVNGQELTERASLPRLIAAIPNGEKAQLTVQRDGRQQEMTVTIGELTPDRAQVASAESPEGLGGPLGIEVQPLEPALARQLGLPDGASGVVVTAVDPSGPNADRLAPGDVIQEAAGHPIETPRDLASAMREARGKGVMLMKVLRQGNPVYVGAEVASS

SEQ ID NO: 37825 - protein, 789 aa, Arabidopsis thaliana
  misc_feature (513)..(513): Xaa can be any naturally occurring amino acid
  unsure (1)..(789): unsure at all Xaa locations
MESSLPQVAALDRSTLLKAFDETKTGVKGLIDAGITEIPSIFRAPPATLTSPKPPSSSDFSIPTIDLKGGGTDSITRRSLVEKIGDAAEKWGFFQVINHGIPMDVLEKMIDGIREFHEQDTEVKKGFYSRDPASKMVYSSNFDLFSSPAANWRDTLGCYTAPDPPRPEDLPATCGEMMIEYSKEVMKLGKLLFELLSEALGLNTNHLKDMDCTNSLLLLGHYYPPCPQPDLTLGLTKHSDNSFLTILLQDHIGGLQVLHDQYWVDVPPVPGALVLITNDKFISVEHRVLANVAGPRISVACFFSSYLMANPRVYGPIKEILSEENPPNYRDTTITEYAKFYRSKGFDAMHETVTSWFPTSERHKKAYVKMYLSHMLKCKVLLFISMDAKKLDTGPRDAINWLPDEILGKILSLLATKQAVSTSVLSKKWRTLFKLVDTLEFYDSVSGMGEQEASYVFPESFKDLVDRTVALQCDYPIRKLSLKCHVGRDDEQRKACVGRWISNVVGRGVSEVXVLRINDRGLHFLSPQLLTCKTLVKLTLGTRLFLGKLPSYVSLPSLKFLFIHSVFFDDFGELSNVLLAGCPVVEALYLNQDGESMPYTISSPTLKRLSVHYEYHFESVISFDLPNLEYLDYSDYALYGYPQVNLESLVEAYLNLDKAEHVESPDVTKLIMGIRNVEILSLSPDSVGVIYSCCKYGLLLPVFNNLVSLSFGTKKTRAWKLLADILKQSPKLETLIIEDLNGYPLDVSMPLNQVKELQILEYGESDDEVKRLKSFLGEESMIEVVFPEV

SEQ ID NO: 37826 - protein, 400 aa, Crocosphaera watsonii WH 8501
MLEVEKTVKQTNVGLKELLIQLQELTTTKFSGSLQITIGNCPNWVLWLRLGRLSWSDGGVNSQERWQRHLASFVPELQGSQLHEITSIDNQYDRCHILVQLLDQGLLQRQQLTESMLSVTQEIFFDLIQSNHINRNCLSYEIIPDDSSNKHTSLLPMIEVMPNLKQSLKTWQKWQNQNLAGYSPNLFLLIKQPELISQENLSESQLSIISLIDGSQNVRILALKTGLDIVSVMLCLLPLTKLKAISFSKIPFSKIPIHQNSDISHLGVADNQKTLIACVDDSLGVCRALEKIISEQGFGFVGIQEPLKAIPSFLKTKPDLIFLDLVMPITNGYELCTQLRKTPSLKNVPVVILTGKDGLVDRMRAKMVGSNDFLSKPIKMPELLKVLNKHLTQSTQKEST

SEQ ID NO: 37827 - protein, 411 aa, Nicotiana tabacum
MNALAATNRNFKLAARLLGLDSKLEKSLLIPFREIKVECTIPKDDGSLASFVGFRVQHDNARGPMKGGIRYHPEVDPDEVNALAQLMTWKTAVANIPYGGAKGGIGCSPSDLSNSELERLTRVFTQKIHDLIGIHTDVPAPDMGTNPQTMAWILDEYSKFHGYSPAVVTGKPIDLGGSLGRDAATGRGVLFVTEALVKEHGKSIAGQRFVIQGFGNVGSWAAKLINEQGGKIVAVSDITGAIKNENGLNIASLLKHVKENRGVKGFNDARPIDPHSILVEDCDVLIPAALGGVINRDNANDIKAKYIIEAANHPTDPEADEILAKKGVVILPDIYANSGGVTVSYFEWVQNIQGFMWDEDKVNAELKTYMTRGFKDVKDMCKTHNCDLRMGAFTLGVNRVARATVLRGWEA

SEQ ID NO: 37828 - protein, 331 aa, Lactobacillus gasseri
MTKYNWGIIGTGWIAHEMADALQTVKGEVYAAANPNEISLKKFAAEKNIKHLFTNPDEMIQDPNIDIIYIATPHTFHYDYIKKALKAGKHVFCEKAITVNADQFDEVEKLAKDKHLILSEGFTLYHMPIYQKVKKLIRDGKLGQIKLVQVNFGSLKDYDPNNRFFNKDLAGGALLDIGGYATAFARMFLSKQPESILTTVKFFETGVDEQSGIILKNTKDEMAVMALSMRAKQPKRGVISGTKGYIEISNYPRATEAQITYTASAHEERHETINAGSTSEALEYEIKDMERYISQGHDDGELAISRDVAHILTSVRTSWGMKYPFDENNRI

SEQ ID NO: 37829 - protein, 88 aa, Physcomitrella patens
MSSDQDLDARAAAGETVVPGGTGGKSLEAQKNLAEGRSKGGQTRAEQLGHEGYTEMGKKGGSATNEMSGGEAAEAAGREIDESKFTNQ

SEQ ID NO: 37830 - protein, 216 aa, Bordetella parapertussis 12822
MFPKRLTDGYHAFLQGRFHSERSRYEALAEKGQKPEILLIGCCDSRVSPEVIFDAGPGEIFVVRNVANLVPPCEPDAESSFHGTSAAIEFAVNGLNVKHIVVLGHASCGGIRSFYDDGEPLSKMDFIGKWMSQISPVADRLGPSTGDRATDIKRLELAVVEESLRNLMTFPSISSRVERGELELHGTYFGVATGLLYVLDRATGQFAPWLEEDAAA

SEQ ID NO: 37831 - protein, 424 aa, Lactobacillus reuteri
MNRIKQAFKDRLWLGVIIVGLFAGLIGGGIALGINNLVQHHEEVTSTRVPAGSNRSGGTKVNKNKADLSGEASQAYKSVQGAVVSVINKQKVQQSSGTLGIFGYGSSNRSNSDYSSDNKLETASEGSGVIYKKSGNSAYVVTNNHVVKGSNALQVILSNGKKVNADLVGTDSATDLAVLKINATNVKTVASFGNSNSIVPGQDVLAIGSPMGSEYANTVTKGIISAKDRTLKAGTDGTLTSVIQTDAAINSGNSGGPLINMAGQVIGINSMKLASDTQGSSVEGIGFAIPSNEVVTIINQLIKNGKITRPSLGISMVDLSNVTSDQQQSVLKLPTSVSKGVVIMDVNSGSVADTAGLKKYDVITKLGDTQVTDAGSLKAALYKYKVGQNAKVTYYRDGQQHTATLHLTKSADTTSTDDSQQDNN

SEQ ID NO: 37832 - protein, 167 aa, Amorphophallus albus
GTADAVRQFIWVFEDPRNKNIEHVLILSGDQLYRMDYMDLVQRHMDTRADITVSCVPVDDSRASDFGLMKIDKVGRIVHFSEKPKGSVLDAMKVDTTIPGLSPYEAKNFPYIASMGVYAFRTEILLNLLRWRYPTSNDFGSEIIPSAVNEYNVQAYLFKDYWEDIGT

SEQ ID NO: 37833 - protein, 360 aa, Triticum aestivum
  misc_feature (302)..(303): Xaa can be any naturally occurring amino acid
  misc_feature (310)..(310): Xaa can be any naturally occurring amino acid
  misc_feature (313)..(313): Xaa can be any naturally occurring amino acid
  unsure (1)..(360): unsure at all Xaa locations
AYLGDTIEQVCTKKQAGTGPEFPGYRRPTRPLLSGGLDSSLVASVVSRYLAETKVARQWGNKLHTFCIGLKGSPDLKAAKEVADYLGTVHHELHFTVQQGIDALEEVIYHIETYDVTTIRASTPMFLMSRKIKSLGVKMVLSGEGSDEIFGGYLYFHKAPNKKELHEETCRKIKALHLYDCLRANKATSAWGLEARVPFLDKNFINVAMDLDPECKMIRRDLGRIEKWVLRNAFDDEKKPYLPKHILYRQKETVQRMGLGTSWDGWVWKDHANAHVPESMMTNAYFVYLKTHHNKRTYYYRXXLRILPKXLLXNGPGGHVACTRKTVEWDPPGQASPSAVALVYTRLRERPDRYPLEASS

SEQ ID NO: 37834 - protein, 274 aa, Arabidopsis thaliana
MGRSPCCEKDHTNKGAWTKEEDDKLISYIKAHGEGCWRSLPRSAGLQRCGKSCRLRWINYLRPDLKRGNFTLEEDDLIIKLHSLLGNKWSLIATRLPGRTDNEIKNYWNTHVKRKLLRKGIDPATHRPINETKTSQDSSDSSKTEDPLVKILSFGPQLEKIANFGDERIQKRVEYSVVEERCLDLNLELRISPPWQDKFHDERNLRFGRVKHRCSACRFGFGNGKECSCNNVKCQTEDSSSSSYSSTDISSSIGYDFLGLNNTRVLDFSTLEMK

SEQ ID NO: 37835 - protein, 165 aa, Amorphophallus albus
GTADAVRQYLWLFEEHNVMEFLVLAGDHLYRMDYERFIQAHRETDADITVAALPMDEKRATAFGLMKIDEEGRIIEFAEKPKGEQLKAMKVDTTILGLDDERAREMPYIASMGIYVVSKDIMLELLREKFPGANDFGSEVMPGATSIGMRVQAYLYDGYWEDIGT

SEQ ID NO: 37836 - protein, 585 aa, Triticum aestivum
MCGILAVLGCADDTQGKRVRVLELSRRLKHRGPDWSGMHQVGDCYLSHQRLAIIDPASGDQPLYNEDKSIVVTVNGEIYNHEQLRAQLSSHTFRTGSDCEVIAHLYEEHGENFIDMLDGVFSFVLLDTRDNSFIAARDAIGVTPLYIGWGIDGSVWISSEVKGLNDDCEHFEIFPPGHLYSSKQGGFKRWYNPPWFSEVIPSVPYDPLALRKAFEKAVIKRLMTDVPFGVLLSGGLDSSLVAAVTVRHLAGTKAAKRWGTKLHSFCVGLEGSPDLKAAKEVANYLGTMHHEFTFTVQDGIDAIEDVIYHTETYDVTTIRASTPMFLMSRKIKSLGVKMVISGEGSDEIFGGYLYFHKAPNKEELHRETCQKIKALHQYDCLRANKATSAWGLEARVPFLDKEFINEAMSIDPEWKMIRPDLGRIEKWMLRKAFDDEEQPFLPKHILYRQKEQFSDGVGYSWIDGLKAHAESNVTDKMMSNAKFIYPHNTPTTKEAYCYRMIFERFFPQNSAILTVPGGPSVACSTAKAVEWDAQWSGNLDPSGRAALGVHLSAYEQEHLPATILTGTSKKPRMIEVAAPGVAIES

SEQ ID NO: 37837 - protein, 496 aa, Cytophaga hutchinsonii
MKYDVCIIGAGPAGYAAAMRALDLNKSVILIEKDKIGGAGLYNGAISSKTFWELAKDIQTARKRLAQYSPDQHFSVTYQQVLRQVREGIANRRFHLEGQIESLAKQQTSRFRYIKGSAKLVSHNTVEVSTGTEEEIIEAENVVIATGSKPRKLPNIPIDEKIIVTSDGVENFENFPKSLVILGAGVIGCEWATIFSNFGYTSVNIIDKAERILPFEDDDVTDVVEANMKKQGITVHKKSNLLSMRIVDGEVEYILEYTDGRKEMHRVEKVLVSVGRIPNTQNLGLERVGVNILANGQIENTDGQTNIPNIYVAGDISSDVALVNVAELEGRHVIEKMFGLSDSVITYNNVSTIMFVQPEVAGVGMNEKKALQNKMSYKVVKIRYDMIPRAIAMRNNDGFFKILVTNDADMKIIGMRAVGVHASSAIQAVALLISMDKGVEELADMIHPHPSIIEGIQECIRMLLGKSVLKPEFFKGMLSCKSCDENGCVNDIIYLR

SEQ ID NO: 37838 - protein, 574 aa, Ustilago maydis 521
MANAPHGGVLKDLLVRDAPIAAQLRQEADTLPEIVLTERQLCDLELIINGGFSPLQGFMNQTDYNGCLDNMRLADGNLFPMPITLDVDEQQIEALKIQQGARIALRDPRDDNAIAIITVTDVYAVDKVREATAVFGSDDLAHPAITYLHKSVKNFYVGGDVQAVSKPAYYDYVALRYTPAELRQHFAKISWRKVVAFQTRNPMHRAHRELTVRAARQRQANVLIHPVVGMTKPGDVDHYTRVRVYQSLMPRYPNGMATLALLPLAMRMGGPREALWHAIIRKNFGVTHFIVGRDHAGPGKDSSGKDFYGPYDAQTLVTKYTEELGIEMVPFQQMTYIPSTDEYQPVDEVTPGTQTMDISGTELRRRLRTGAAIPDWFSYESVVKTLRESYPPKAKQGFTLFLTGLHNSGKDQIARALQVKLNEQGGRSVSLLLGETVRSELSSELGFSPDDRQKNIQRISFVAAELTRAGAAVIAAPIAPYEKSRATARDIITKTGGAGNFFLIHVATPLEYCEATDRKGNYAKARAGQIKGFTGVDDVYEEPTDADLVVDISRQSVAEITHSIILLLEAQSLI

SEQ ID NO: 37839 - protein, 404 aa, Neisseria meningitidis MC58
MDKFPKSAKLDHVCYDIRGPVHKKALQLEEEGNKILKLNIGNPAPFGFEAPDEILVDVIRNLPTSQGYCDSKGLYSARKAIVHYYQTKGLRDITVDDVYIGNGVSELITMSMQALLNDGDEILIPAPDYPLWTAAATLAGGTVRHYLCDEENGWFPNLADMEAKITPKTKAIVVINPNNPTGAVYSREILLEIAELARKHGLIIFADEIYDKILYDGAVHHHIAALAPDLLTVTFNGLSKAYRVAGFRQGWMVLNGPKHHAKGYIEGLDMLSSMRLCANTPMQHAIQTALGGYQSINEFILPGGRLLEQRNRAWELVNQIPGVSCVKPMGAMYMFPKIDTEMYRIRDDMKFVYDLLVREKVLLVQGTGFNWIKPDHFRIVTLPYVHQIEEAMGRLARFLQTYRQ

SEQ ID NO: 37840 - protein, 190 aa, Rhodococcus erythropolis
MVDTRLPVTVLSGFLGAGKTTLLNEILRNREGRRVAVIVNDMSEINIDSAEVEREISLSRSEEKLVEMTNGCICCTLREDLLSEISALAAAGRFDYLLIESSGISEPLPVAETFTFIDTDGHALADVARLDTMVTVVDGNSFLRDYTAGGRVEADAPEDERDIADLLVDQIEFADVILVSKADLISHQHL

SEQ ID NO: 37841 - protein, 122 aa, Triticum aestivum
  misc_feature (24)..(24): Xaa can be any naturally occurring amino acid
  misc_feature (54)..(54): Xaa can be any naturally occurring amino acid
  misc_feature (84)..(84): Xaa can be any naturally occurring amino acid
  unsure (1)..(122): unsure at all Xaa locations
ISLSESVCVSIVDVMEDSLWRDRXSIMAVASLVMFSQLGVGLFDDKFGALCYAXWLEDKVFCIRDGEPPILKHRSEEFDAEWSXYTIVIRVLAGINRPHHVYLNHNPHIISFVEPVRGAGVS

SEQ ID NO: 37842 - protein, 468 aa, Solibacter usitatus Ellin6076
MTDTYDLIAIGSGPAGESATELAAFFGHRCAVVERARPGGTVTTTGGAPTKTLREAALYFSGLVDGDVYGIKISTPPEVATEVIRKRTWHVCDLLQKVTGENIAKNNVDYIQGAARLEGDGKVMVTGDDGSRRRLRANVLLLATGSRPRRPPNIPFDLAGVCDTDTILQRGRVPKDILIVGGGPVGVEFATIAHALGAKVTLADRGNRLMSMMDGEITECMEELFRTWGIRVLFGSTCNSVVAKDDALEITMSTGERLSPDTVLFAAGRVPNTGDLGLDAAGVAMDARGRIVVDQQFRTSAEGVYAAGDVLGPTLASIAMEQGRVAICHAFGIPFEGIVDPAPVSAVYGMPEVSGAGRTEEECREMGVDYEVGRADLARTPRGAIAGRGGRLKLIFQKEDRRLIGVHCIGDIASEIVGIGQMTIRCGGTIHTIANMSFNTPTYSYAYKYAAFDGLRKLAAQGQTGEYK

SEQ ID NO: 37843 - protein, 326 aa, Linum album
MGSLGKVNNEIPTKSSGGSKVLVIGGTGYLGKRLVKASLDSGHDTYVMHRPEIGVDIEKVQLLLSFKMQGAHLVSASFDDQRSLVDAVKLVDVVICAISGVHIRSHQILLQLKLVEAIKEAGNVKRFVPSEFGTDPARMENAMEPGRITFDDKMVVRRAIEEAGIPFTYVSANCFAGYFLGGLCQPGYILPSRDHVTLLGDGDKKGVYVDEDDTAAYTLRAIDDPRTLNKTIYVKPPKNVLSQREVVGIWEKYIGKELQKTILSEQDFLATMREQNYAEQVGLTHYYHVCYEGCLSNFEVDDEQEASKLYPDVHYTTVEEYLKRYV

SEQ ID NO: 37844 - protein, 460 aa, Rhodobacter sphaeroides 2.4.1
MNSLSNSLAAADIAHSLHPYTNARAHERNGPLIITRGQGVHVYDSEGREYIEGLAGLWSVAVGFSEPRLAEAAARQMAELPYYHTFAGKAHEPQIRLAEKLVEMTPEALTRVFFTNSGSEANDTVVKLVWFMNNALGRPQKKKFLSRIKGYHGITIASGSLTGLPVNHKGFDLPAIPVVHLGCPHHWRFGAEGESEAEFCARLLREAEETILAEGPETVAAFIGEPVMGAGGVIVPPDGYWSGIEALCRKYDILLVSDEVINGFGRTGARWGCEKFGFTPDILVTSKQLTSSYMPLAAVLMTDKVYQTIADHTETLGTLGHGFTGSGHPVATAVGLENLTVIEERDLMGNAARLERPFQDGLRAFRDNPLVGEVRGTGLIAAIEMVADRATKRSFEPLGKVGARAAAFAAEEGLLCRALGDTLALCPPLIVTEADVGRILERMGRALDRTADWARAEGLI

SEQ ID NO: 37845 - protein, 188 aa, Rhodococcus erythropolis
MVDTRLPVTVLSGFLGAGKTTLLNEILRNREGRRVAVIVNDMSEINIDSAGVEREISLSRSEEKLVEMTNGCICCTLREDLLSEISALAADGRFDYLLIESSGISEPLPVAETFTFIDTDGHALADVARLDTMVTVVDGHSFLRDYTAGGRVEADAPEDERDIADLLVDQIEFADVILVSKADLVSHQ

SEQ ID NO: 37846 - protein, 312 aa, Linum usitatissimum
MGRCRVLVVGGTGYIGKRIVKASIEHGHDTYVLKRPETGLDIEKFQLLLSFKKQGAHLVEASFSDHESLVRAVKLVDVVICTVSGAHSRSLLLQLKLVEAIKEAGNVKRFIPSEFGMDPARMGDALEPGRETFDLKMVVRKAIEDANIPHTYISANCFGGYFVGNLSQLGPLTPPSDKVTIYGDGNVKVVYMDEDDVATYTIMTIEDDRTLNKTMYLRPPENVITHRQLVETWEKLSGNQLQKTELSSQDFLALMEGKDVAEQVVIGHLYHIYYEGCLTNFDIDAAQDQVEASSLYPEVEYIRMKDYLMIYL

SEQ ID NO: 37847 - protein, 221 aa, Dunaliella tertiolecta
MFRNSAVSALRLGAIAFRRVDPTKVPNAMCRAYTQQNTGNSSSSAGKWAWTAGILGAGLLSSNHAFAAGPSTKERSFIAIKPDGVHRGMISNIISRFEQKGYKLVGIKVIVPGMDLAKAHYAEHEGKPFFNKLTSFLTSGPVVAMVWEGKEVIKYGRTMIGATNPLASAPGTIRGDFCVDMGRNMIHGSDGPESAQREIALWFQPSEIAEYESATQSWVYE

SEQ ID NO: 37848 - protein, 558 aa, Pediococcus pentosaceus ATCC 25745
MAATIKWWQQAVVYQVYPRSFQDTNHDGIGDLKGITAHLDYLKQLGIDVIWLNPIYRSPNDDNGYDISDYQQIAADFGTMADFDELLQAAHDRGLKIIMDLVVNHTSDEHPWFKRSRQDRTNQYRDFYFWRSGNGKKAPNNWDAAFGGSAWQYDEQTQQYYLHTFSTKQPDLNWENPTLRESVYTMMTWWLNKGVDGFRMDVINQISKLPGLPDGPLKPHSQFGDARVTNGPRVHEFLQEMNQEVLSQFDIMTVGETHGVTPADALKYAGADQHELDMVFEFQHLRLDNSQHGLGKWSTRKTPLVALKKVISDWQVGLEGRAWNSLFWNNHDTPRAVSRFGDDRPAYRVRSAKMLATCLHLLQGTPYIYQGEELGMTDAHFTELASYRDIESLSAYRDLVTERQLLSPADMMARLAARSRDNSRTPMQWDTEVNAGFSDAAPWLTVNPNYRQINAAAALADPDSVWYYYQHLIQLRHQYPSVTLGSFELLWADDPQVFLYARQWEGRTWLVCCNFTAETLSRPLDQYLTPTAKCLISNYGEQQPNKLRPYEAWVYQLA

SEQ ID NO: 37849 - protein, 290 aa, Oryza sativa
MAGKEIYHKMKDKVKDAFSSSGPETGKGKTKLSGKRVKHGYHLVKGKSNHPMEDYLVAEYRQEGEHDLGLFAIFDGHLGHTVPDFLRSHLFDNILKQPEFLSNPQAAIRNAYQLTDAKILESAAELGRGGSTAVTAILISSENSVNLVVANVGDSRAVISKSGVAKQLSVDHEPNKERHSIEKKGGFVSNLPGDVPRVDGQLAVARAFGDRSLKKHLSSEPDVVEEPIDENTDFLILASDGLWKVMSNQEAVDEIKDFKDAQAAAKHLTEQAVNRKSKDDISCIVVKFLC

SEQ ID NO: 37850 - protein, 225 aa, Thermotoga maritima MSB8
MKKGVLFDLDGTILDFEKSEDQALKRTFLKYGIPLTEDQVFLYREINRKWWKLLAEGKVSKDVVVVARFEEFLKTLNIPLDPRKVAKDYLEFLSEEAHFLPGAEEFLERLKKKDLRMAVVTNGVRFVQEKRSRKLKLDRFFEFVLTSEEAGVEKPDPRIFWLALERMKLKKEEVLYVGDDFSSDLEGARNAGIDFVLFSSDGDSSGDFPVARNFKELEKIVEEFL

SEQ ID NO: 37851 - protein, 481 aa, Arabidopsis thaliana
  misc_feature (39)..(39): Xaa can be any naturally occurring amino acid
  misc_feature (185)..(185): Xaa can be any naturally occurring amino acid
  misc_feature (216)..(216): Xaa can be any naturally occurring amino acid
  misc_feature (281)..(281): Xaa can be any naturally occurring amino acid
  misc_feature (294)..(294): Xaa can be any naturally occurring amino acid
  misc_feature (330)..(330): Xaa can be any naturally occurring amino acid
  misc_feature (338)..(338): Xaa can be any naturally occurring amino acid
  misc_feature (352)..(352): Xaa can be any naturally occurring amino acid
  misc_feature (364)..(364): Xaa can be any naturally occurring amino acid
  misc_feature (410)..(410): Xaa can be any naturally occurring amino acid
  misc_feature (428)..(428): Xaa can be any naturally occurring amino acid
  unsure (1)..(481): unsure at all Xaa locations
MQIFVKTLTGKTITLEVESSDTIDNVKAKIQDKEGIPPXDARAKGKGGAPIFAGKHLEDGRTLADYNIQKESTLHLVLRLRGGMQIFVKTLTGKTITLEVESSDTIDNVKAKIQDKEGIPPDQQRLIFAGKQLEDGRTLADYNIQKESTLHLVLRLRGGMQIFVKTLTGKTITLEVESSDTIDNXVKAKIQDKEGIPPDQQRLIFAGKQLEDGRTXLADYNIQKESTLHLVLRLRGGMQIFVKTLTGKTITLEVESSDTIDNVKAKIQDKEGIPPDQQRLXIFAGKQLEDGRTXLADYNIQKESTLHLVLRLRGGMQIFVKTLTGKTITXLEVESSEXTFDNVKAKIQDKGXGSLPDQQRLIFXAGKQLEDGRTLADYNIQKESTLHLVLRLRGGMQIFVKTLTGKTITXLKVESSDTIDNVKAKIPXDRKVFLRTSSVSSSLESSLRMDVLWPTTTSRRSLLFTWSCVFVVVSKSRLCYA

SEQ ID NO: 37852 - protein, 223 aa, Bacillus anthracis str. A2012
MKILVVDDESSIRNLIRMQLEMEGYEVLTAADGREVLERWNEGPDVLILDVMLPDTDGYELLRLFREKDRDIPVLMLTAKSQMNDKLLGLQLGADDYVTKPFNYAELILRVKNMTRRVKKKEVTVSHEVIEAGEITICPKERKVHVSEQEIQLTYREFNLCQLFVSNPQRVFMRDELLEKVWGFEYIGNTRAVDIMVQRLRKKLGNSGEYIKTIYGVGYKLDC

SEQ ID NO: 37853 - protein, 330 aa, Bacillus anthracis str. A2012
MNSILICGGAGYIGSHAVKKLVDEGLSVVVVDNLQTGHEDAITEGAKFYNGDLRDKAFLRDVFTQENIEAVMHFAADSLVGVSMEKPLQYYNNNVYGALCLLEVMDEFKVDKFIFSSTAATYGEVDVDLITEETMTNPTNTYGETKLAIEKMLHWYSQASNLRYKIFRYFNVAGATPNGIIGEDHRPETHLIPLVLQVALGQREKIMMFGDDYNTPDGTCIRDYIHVEDLVAAHFLGLKDLQNGGESDFYNLGNGNGFSVKEIVDAVREVTNHEIPAEVAPRRAGDPARLVASSQKAKEKLGWDPRYVNVKTIIEHAWNWHQKQPNGYEK

SEQ ID NO: 37854 - protein, 498 aa, Pirellula sp. 1
MSSISAFTTQELSGGPTGFRFAWLTMVLLVGMMGIGGSLASVASAQDEPAAATDTAEVADAGDADSEEPAADAGVGYAFDNGFLFLCAVLVLFMQAGFAMVEVGLNSSKNTVNILSKNLMDLSVGALLFFFVGFGLMYPGSYGDVTNGYFAFGGTGIYDSSPDQTFSPQVDWFFQAVFAATAATIVSGAVAGRMKFNAYLIYSAILTGLIYPISGFWKWGGGWLMQFGEQAADGSFAMGFQDFAGSAVVHAVGGFAGLAGAIFLGPRLGRYTAEGKSVPLPGHNVAFAALGVFILWVGWYGFNPGSQLAFQSSADIDATVFIAVNTTLAAAAGVIVATAVSWGLFGKPDLTMGLNGALGGLVGITACCDAMSNSMSIVVGAVAGALVVLSIVVLDKVKIDDPVGAFPVHGVCGVWGCMALGILPNAHLESESTNFMIQLIGTASICAWAFISMSVVFGVLKAVGMLRVSPQEEQAGLDISEHGMHAYPSDAVAGGSVI

SEQ ID NO: 37855 - protein, 497 aa, Nicotiana benthamiana
MKKATVGAAVVGAATVCAVAALIVNHRMRKSSKWARAMAILREFEEKCGTPDAKLKQVADAMTVEMHAGLASEGGSKLKMLITYVDNLPTGDEAGVFYALDLGGTNFRVLRVQLGGKDGGIIHQEFAEASIPPNLMVGTSEELFDYIAAELAKFVAEEEEKFQQPPGKQRELGFTFSFPVMQTSINSGTIMRWTKGFSIDDAVGQDVVGELTKAMKRKGVDMRVSALVNDTVGTLAGGKYTHNDVAVAVILGTGTNAAYVERVQAIPKWHGPMPKSGEMVINMEWGNFRSSHLPLTQYDHALDTNSLNPGDQIFEKMTSGMYLGEILRRVLLRMAEEAGIFGDEVPPKLKSPFVLRTPDMSAMHHDTSSDLRVVGDKLKDILEISNTSLKTRRLVVELCNIVATRGARLAAAGVLGILKKMGRDTPRQGGPQKMVVAMDGGLYEHYAEYRTCLENTLKELLGDELATSIVFEHSNDGSGIGAALLAASNSMYLEDKS

SEQ ID NO: 37856 - protein, 982 aa, Bordetella parapertussis 12822
MAAYNAPVSNCQFRLTHILPIPQRQGAPTDPFQMNAIRQQSDSAEPLRHDIRLLGRCLGEVIQACEGKRVYDTIETLRRTAVRFRRAGDPADDKLLQARVKQLRGNDPNSVARAFSYFLHLSNIAEDRDQNRRQRDRALAGAGPERGSLRQAIESLKAQGVNNARIRRLLSEACVMPVLTAHPTEVQRKSTLDVHREISSLLVQRERELTADELSELDLALIGQVATLWQTRMLRYTRLTVADEIENALSYYRSTFLNVIPRVYGDLARLLNREPVKPFTPPPPPLEPFLRMGSWIGGDRDGNPNVDAATLERALLRQATVLFEHYLQEVHALGAELSASTLLIEADPALLALADAGGDDSPHRRDEPYRRALIGIYARLAATARHLTGQELARRATVPAAPYDTPDALAADLAVIAASLSAHHGAPIARLRLSGLQQAVTVFGFHLATVDLRQSSDVHERVLAELFARAGDGIDGQAVDYLALDEAARVAVLRRELAHARPLASPWIAYSEETASELAVLRAAAAGRARYGRQAVLQSIVSHTETLSDLLEVLVLQKEAGLIAPPGETIAPGDGLMVVPLFETIPDLQRGPEIMAAWLDLPEVRQRVRLAQGDTQEVMLGYSDSNKDGGFLTSNWSLYQAERALVDVFSARSVRLRMFHGRGGSVGRGGGSSYDAILAQPPGTVAGQLRLTEQGEVIQSKYKDAEVGRWHLELLVAATLESSLAPQAAATSAEDAHMQQHAPAMSFMSELAQRTYRGLVYDTPGFADYFFAATPISEIAGLNIGSRPASRKKGQHIEDLRAIPWGFSWAQCRLMLTGWYGMGSAIEAYLETGAQGAPRSRRARLAQLREMASDWPAFRTLLSNMEMVLAKSDLAIAAGYAQLVPRRGLRERVFGAITAEHGRTLAMLRLLTRRELLADNPGLMASLRERFAYIDPLNYLQIELIKRHRAAQRRAGDDADIRVPRAIHLTINGIAAGLRNSD

SEQ ID NO: 37857 - protein, 428 aa, Mesorhizobium loti MAFF303099 [sequence omitted]

SEQ ID NO: 37858 - protein, 501 aa, Lactococcus lactis subsp. lactis
  misc_feature (128)..(128): Xaa can be any naturally occurring amino acid
  misc_feature (447)..(447): Xaa can be any naturally occurring amino acid
  unsure (1)..(501): unsure at all Xaa locations
MTYVLGIDLGTSSLKGILMDEVGNLITTKSAEYQIDTPKQGYSEQRPEYWIVALESVLTGLSVEISDFGQQLAGISFSGQMHSLVVLDDNNKPVYPAILWNDVRTSKQCQEITDRLGQRLLEITKNIXLEGFTLPKILWLQENEPEVWSRVKKIMLPKDYLSLWLTGNIYTEFSDAAGTLLLDIEKKQWSEEITDAFNIERKILPELIESTDRTGFVKAEIAERYKLTNKVKVFAGGADNAAAALGVGLINEEVGLISMGTSGVVSAYEPKIADYKGKLHFFNHTVPGAYYSMGVTLAAGNSLNWYKETFGKGLSFNELLSEVYTVSPGSEGLLFTPYIVGERTPHFDSKIRGSFIGISAHHEQKHFSRAVLEGITFSLRDSKDIMEKTKNKKFKRLISVGGGAQNPDIMQMQADIFNSEMIRLTVEQGPGLGACMIAAFGCGLFDXFEAVTKAFVHYKEASFIPNPKNVARYEQIYQIWKQVYKNTSEISHQLVEFNDEG

SEQ ID NO: 37859 - protein, 613 aa, Oryza sativa
MKTGGRSPPLLPPAAPLPINRNNLEASARLRLLLPPPPPLLPFSPLARRRLAATRIGAAPRPQQRSPPPRAERPRRPHHYWCGMAEVAAGTGQLIGVAVATLLAAIFLAAALLGSRRRRRRAPLAGKPAAVGGCGVADGEGCGGDGRTDVIVVGAGVAGSALAYTLGKDGRRVHVIERDLTEPDRIVGELLQPGGYLKLIELGLEDCVQEIDAQRVLGYALFKDGKDTKLSYPLEKFHSDVAGRSFHNGRFIQRMRQKAASLPNVQLEQGTVTSLVEEDGTVKGVKYKTKSGEELKAYAPLTIVCDGCFSNLRRALCSPKVDVPSCFVGLVLENCQLPHANHGHVVLANPSPILFYPISSTEVRCLVDVPGQKVPSIANGEMAKYLKTVVAPQIPPEIYDSFIAAIDKGSIRTMPNRSMPAAPHPTPGALLMGDAFNMRHPLTGGGMTVALSDIVVLRNLLKPLRNLHDASALCKYLESFYTLRKPVASTINTLAGALYKVFSASPDQARNEMRQACFDYLSLGGVFSNGPIALLSGLNPRPLSLVAHFFAVAIYGVGRLMLPLPSPKRMWIGVRLISSACGIIFPIIKAEGVRHMFFPATVPAYYRAPRPME

SEQ ID NO: 37860 - protein, 421 aa, Neisseria meningitidis MC58
MSEALAKETLNPFEIARKQVKTACDRLKTDPAVYEILKSPTRVLEVNFPVKLDDDTVKTFTGYRSQHNNAVGPYKGGVRFHPSVNLDEVKALSIWMTIKCCVAGIPYGGGKGGITLDPRDYSEAELERIARAYAEAIAPLIGEKIDIPAPDVNTNGKIMSWMVDAYENVVKHSAPGVFTGKPVEFGGSLARTEATGYGVNLAAVQALEKLGKDVKGATYAIQGFGNVGYHTGYYAHQSGAKVVAVSTVDVAIYNENGLDMEALFKEFQEKGFITNEAGYGKEITNAELLALDVDVLAPCALENQLTSENAGKVRAKIVVEGANGPTTPEADVILRQNGVLVVPDILANCGGVVVSYFEWVQNLQGYYWEFDEVQEKETVVLRRAFRDIWNLAQEYDVDLRTASYMMSIRRVEKAMKLRGWY

SEQ ID NO: 37861 - protein, 331 aa, Arabidopsis thaliana
  misc_feature (251)..(251): Xaa can be any naturally occurring amino acid
  unsure (1)..(331): unsure at all Xaa locations
MADTSSRTDVSTDGDTDHRDLGSDRGHMHAAASDSSDRSKDKLDQKTLRRLAQNREAARKSRLRKKAYVQQLENSRLKLTQLEQELQRARQQGVFISSSGDQAHSTGGNGALAFDAEHSRWLEEKNRQMNELRSALNAHAGDTELRIIVDGVMAHYEELFRIKSNAAKNDVFHLLSGMWKTPAERCFLWLGGFRSSELLKLLANQLEPMTERQVMGINSLQQTSQQAEDALSQGMESLQQSLADTLSSGTXFGSSSSDNVASYMGQMAMAMGQLGTLEGFIRQADNLRLQTLQQMLRVLTTRQSARALLAIHDYSSRLRALSSLWLARPRE

SEQ ID NO: 37862 - protein, 480 aa, Agrobacterium tumefaciens str. C58
MNVLSVSSEIYPLIKTGGLADVVGALPIALEAHGVRTRTLIPGYPAVKAAVTDPVKCFEFTDLLGEKADLLEVQHERLDLLILDAPAYYERSGGPYLGQTGKDYPDNWKRFAALSLAAARIGAGVLPGWRPDMVHAHDWQAAMTPVYMRYAETPEIPSLLTIHNIAFQGQFGANIFSKLALPAHAFGMEGIEYYNDVSFLKGGLQTATALSTVSPSYAEEILTAEFGMGLEGVIGSRAHVLHGIVNGIDADVWNPATDHLIHDNYSAANLKNRALNKKAVAEHFRIDDDGSPLFCVISRLTWQKGIDLMAEAVDEIVSLGGRLVVLGAGDVALEGALLAAASRHHGRVGVAIGYNEPLSHLMQAGCDAIIIPSRFEPCGLTQLYALRYGCIPVVARTGGLADTVIDANHAALASKAATGVQFSPVTLDGLKQAIRRTVRYYHDPKLWTQMQKLGMKSDVSWEKSAGLYAALYSQLISKGH

SEQ ID NO: 37863 - protein, 360 aa, Arabidopsis thaliana
MAKFGEGDKRWIVEDRPDGTNVHNWHWSETNCLEWSRNFFTKQFSGVDILSGEGNLFIKVSKIEKVEGEAYVNVRKGKIIPGYELNVSLSWEGEAKDSDGKTLLKADGLVDMPYISDENADEDPEIRFSVKDEGPIGRTLKEAMVKKGKEIILEKVRVYVEAMARGGPCRDELESKKVAPKSVAAGSATVAVEKSGAAPVVSAAAVESKVVKEKKKAKTKEGFKTITMTEKFNCRARDLYEILMDENRWKGFTQSNAKISKDVNGPISVFDGSVTGMNLELEEGKLIVQKWRFGSWPDGLDSTVKIVFEEPQPGVTIVNLTHTDVPEEDRYGNATVVENTERGWRDLIFHRIRAVFGFGI

SEQ ID NO: 37864 - protein, 420 aa, Agrobacterium tumefaciens str. C58
MSEKRVQPLARDAMAYVLAGGRGSRLKELTDRRAKPAVYFGGKARIIDFALSNALNSGIRRIGVATQYKAHSLIRHLQRGWDFFRPERNESFDILPASQRVSETQWYEGTADAVYQNIDIIEPYAPEYMVILAGDHIYKMDYEYMLQQHVDSGADVTIGCLEVPRMEATGFGVMHVNEKDEIIDFIEKPADPPGIPGNEGFALASMGIYVFHTKFLMEALRRDAADPTSSRDFGKDIIPYIVEHGKAVAHRFADSCVRSDFEHEPYWRDVGTIDAYWQANIDLTDVVPDLDIYDKSWPIWTYAEITPPAKFVHDDEDRRGSAVSSVVSGDCIISGAALNRSLLFTGVRANSYSRLENAVVLPSVKIGRHAQLSNVVIDHGVVIPEGLIVGEDPELDAKRFRRTESGICLITQSMIDKLDL

SEQ ID NO: 37865 - protein, 678 aa, Emericella nidulans
MSTEDNHDSQILTARHRSDASEQSFKSLFGGPSSEDGKETEPDTHDHNHSFSNAKAPAKFANQNVAPFLARHIPEQYAPLGAQSILPADLSSANSKYCYRHRPDQKCRRQADEPSMDKLQRELESLPQGDQQSISHVWSLFSAAPAKHRKLILQGIMAQCCFPQLSYISATVRDLIRIDFITALPPEIAFKILCYLDTTSLCKASQVSRGWRALADDDVVWHRMCEQHIHRKCKKCGWGLPLLDRKRLRESKREIELRATTWDKGVVGPRSPDASAESPPSGKRKLEDDEVAVVKRHCSSLGSDAGVDKDSDFFKTRYRPWKEVYKDRFKVGTNWKYGRCSIKTFKGHTNGVMCLQFEDNILATGSYDTTIKIWDTETGEELRTLRGHESGIRCLQFDDTKLISGSMDRTIKVWNWRTGECISTYTGHRGGVIGLHFDASILASGSVDKTVKIWNFEDKSTFSLRGHTDWVNAVRVDTSSRTVFSASDDCTVRLWDLDTKTCIRTFHGHVGQVQQVVPLPREFEFEEHDAECENDDLSTTSGDANPPSIQASMGLEPNAAYSQSSAFGTSFDNGRAAPPRYMVTSALDSTIRLWETTTGRCLRTFFGHLEGVWALGADTLRIVSGAEDRMIKIWDPRTGKCERTFTGHSGPVTCIGLGDSRFATGSEDCEVRMYSFQS

SEQ ID NO: 37866 - protein, 1322 aa, ASPERGILLUS NIDULANS FGSC A4
MVSRSNEGPEAPHPASRTPGAPAKGRLTRLGSSPSKRDDKAKDDRMGKTSAKDVAELKDYIKLADLPKSELRVIMLEIDLLKNLDHPNIVKYQGFVKSAETLNIILEYCENGSLHSIAKNFGRFPETLVGVYMSQVLHGLLYLHDQGVIHRDIKGANILTTKEGLVKLADFGVASRTTGLSESSVVGTPYWMAPEVIELSGATTASDIWSLGCTVIELLEGKPPYYNLQPMPALFRIVNDDHPPLPQGASPAVKDFLMQCFQKDPNLRVSARKLLKHPWIVNARRSDSVVPKKSTEYEEAVKSVQEWNEALRSPESNALRRGTRNENQNPPSLRLDTRHTPTKVTLPSPVSRIVADKFSSPSSGEEDNWDDDFATAISPSALQLPHLRPHDNFGGMLSSEKLKAFASLDGTVLKSDESFEESDDPFKGSLLAGEHDPLKTIRPPPSQQANSGTSQSQNGPYGAHMRRGPPLNTAITPVYGGQMLQNSSSPIRQQRPPLFYKENSVEDYSDLISANEDVLDRKISAFQESDEHKDLADTGRSREVIRYQSSYEQEDTPRIGRQISVKRYRGTVEIQQFAENEHDEDFSDILGVDGVTLDKAESDDGSNKSTLMLNTKLSNNSWLGDLDDEDDPFALLEEGLDETDLEANIARDKHARLRSQVEGLVGSLKTSQDEEVLGDISEQLLAVFCDFPETKNIIISAHGMLPILEILDLCRRRDITLCLLKIVNAIIYDDYEIQENLCFVGGIPIINEFAAKKYPREIRLEAAAFVQQMYQTSTLTLQMFVSAGGLNVLVEFLEDDYEDERDLVLVGVNGIWSVFELQGSTPKNDFCRILSRSSVLDPLSLVLSRVLDEEGELAEVVEGRIANIFFIFSQAENHVKEMVSERTVLHSTDDGLGVLKELKRMTPAHQITMLKFIKNLSMLSTTLDSLQNSNAIDVLTDLLRSTIKRPHFREVSNQILNTIYNMCRLNKSRQEDAALNGIVPLLQKIVKTERPLKEFALPILCDMAHSGKVGRRELWRNKGLAFYISLLSDPYWQVTALDAIFIWLQEETAKVEEHLLENRYDQPSFTDAIVRCLTLSKANAFENILEPLQKLLRLSPPIASTLARPDLFSRLGQKLHHSKAAVRLNLLRIISSICDSSEQQGGLLASYGLLDSIRELEHDPAILVRDMAGKLIQSSERNDSYGLCKLKPNVRRGSTSATSPGLLANQSAPVTPQLSRQNQSKGYYDSRETQRRPRSAISGSALALRPGSRDGPTPGIVGGANGSAGASRNRIARGVSNRLSHIELLPNDDDRIPSSITRRSSVLPRRRRLTQFEAERGS

SEQ ID NO: 37867 - protein, 356 aa, Zea mays
MDLNECERRGPAGPDPLSRQGSIYSLTFDEFQNTLGGMGGGLGKDFGSMNMDELLRSIWTAEESQAMASASASASASVSALGAAVDGGAALQRQGSLALPRTLSVKTVDEVWRDFVREAPPGTAGGEEPQPNRQPTLGEMTLEEFLVRAGVVRDNPAAAAAAVPAQPVAPRPIQAVSNGASIFFGNFGGANDAGAGAMVFAPVGIGDQAMGNGLMPGVAGMAGGAVTVSPVDTSVAQLDSMGKSDEDLSSPMAPVPYPFEGVIRGRRSGAGVEKVVERRQRRMIKNRESAARSRARKQAYTMELEAEVQKLKEQNAELQKKQEQIMEMQQNQVPELVSNPYAQKKRCLRRTLTGPW

SEQ ID NO: 37868 - protein, 637 aa, ASPERGILLUS NIDULANS FGSC A4
MSGMRVALRTPLRALGDPASVLQYTASPYAPRELATWNSYKPPRYWLFSSLRFNKATFPQHNFRTPFSTKTLYRFETQQRAGGQGRQSQNSQSRNKWIGYGIIGGTIVVGGVVVSDDIRHIYHAAARTGRVVGTLAVCINDYRVTLKQETCTPEERNEAIRACHKRCADRTLHVLERNGSIFIKLGQHLSSMGYLLPLEWTTTFIPLQDKCPVSSVESIEQMFVKDTGKRIDELFTTFEPTPIGAASLAQVHIGTLKETGEKVAVKVQHPALAEWAPLDLALTRFTFSMLKRFFPEYDLEWLSKEMDLSLPQELDFRMEAQNAKRASEYFKKNSNAPLVIPKVLWAQKRILVMEFISGSRPDDLEYLDKNHIDRDEVSAALAHIFNEMIFGDNAPLHCDPHGGNIAIRKNPNRSRHNFDIILYDHGLYRDIPRETRRNYAKLWLSVIEADEARMREYSRKVAGVTDEQFPLFASAITGRDYTVLTKKNITSLRTEAEKESITGALGEGLLQQLVELLGQVPRIMLLILKTNDLTRSLDENLHTRQGPVRTFLILARYATRTVFEEQMDTINESEFQFLEQPDRDNMYLSGLYLMRNTFDLVPLWLAHLKSTPPANPSRQLQQNHLSITTFFIDQHHD

SEQ ID NO: 37869 - protein, 186 aa, Rhodococcus erythropolis
MVDTRLPVTVLSGFLGAGKTTLLNEILRNREGRRVAVIVNDMSEINIDSAEVEREISLSRSEEKLVEMTNGCICCTLREDLLSEISALAADGRFDYLLIESSGISEPLPVAETFTFIDTDGHALADVARLDTMVTVVDGHSFLRDYTAGGRVEADAPEDERDIADLLVDQIEFADVILVSKADLVS

SEQ ID NO: 37870 - protein, 259 aa, Zea mays
  misc_feature (247)..(247): Xaa can be any naturally occurring amino acid
  unsure (1)..(259): unsure at all Xaa locations
MALSISAPTSSPFLPAPRQVGRWSSSPSSAKPAVFSLRRPVVVARAAAGNAPSSPAGAVVTEFDVVSSFSEIVPDTVVFDDFEKFAPTAATVSSSLLLGIAGLPDTKFKSAIDTALVDGECNTMEKPGDRMSCYLTKALGNVGAELAHQVPGRVSTEIDARLAYNTQGIVQRVHELLQIYNEHDIPSERLLFKIPATWQGIEASRLLESEGTQTHLTFVYSFAQAAAAAQAGASVVQIFGEVVFGDXAKNHSGEPEIDE

SEQ ID NO: 37871 - protein, 657 aa, Rhodobacter sphaeroides 2.4.1
MKDIGAAQETRMANAIRALAMDAVEKAKSGHPGMPMGMADVATVLFNRFLTVDPSAPKWPDRDRFVLSAGHGSMLLYAIHHLLGYADMDMDQIRSFRQLGARTAGHPEYGHAEGIEVTTGPLGQGIATAVGMALAERMKNARYGDDLVDHFTYVIAGDGCLMEGISHEAIDMAGHLGLGRLIVLWDDNRITIDGDTGISTSTDQKARFAASGWHVLACDGHAPEEIAAAIEAARRDPRPSMIACRTVIGYGAPNKQGGHDVHGAPLGAAEIAAARERLGWDHPPFEIPADLYEAWGRIAARGADARAAWETRLQASPLRAAFETAEAADTSALPPAIAAYKARLSAEAPKVATRKASEMALGVVNEALPFAVGGSADLTGSNLTRSKGMVSVAPGAFAGSYIHYGIREHGMAAAMNGIALHGGLRPYGGTFMAFADYCRPSIRLSALMGVPVTYVMTHDSIGLGEDGPTHQPVEHLASLRAIPNLAVIRPADAVETAEAWEIAMTATSTPTLLVLSRQNLPTVRTEHRDENLTARGAYLLRDPGERQVTLIATGSELELALAAADLLAAEGIAAAVVSAPCFELFAAQPADYRATVLGRAPRVGCEAALRQGWDLFLGPQDGFVGMTGFGASAPAPALYQHFNITAEAIVKSAKERI

SEQ ID NO: 37872 - protein, 452 aa, Pediococcus pentosaceus ATCC 25745
MIKAKNVYIGFGKAAKTLAFRQAQRGESVVVIEESDQMYGGTCINIACIPSKLLYELSDKPQVGGLKDNYKMAITKKRSVIGKLRYSNFHKLADQKTVKVLNGSASFIDQHTLNVKYLNGATEEVVGERIFINTGATSTIPDIPGLKESSRTVTSTDLLDQDHFPQSLAIIGGGYIGMEFATTYSQFGSKVTMINRNAEFMRGMDQDVSQAVKQNFDKAGIEVLQSAEVIRVQDQGSHAVLTVASDGSESQIMVDMILVATGRKPNIQGLNLEQAGIRYTEAGVAVDDHLRTNVQNIWAMGDVRGGAQFTFLSLDDYRIVYNQLYASGTKTTEEQVIVPKTIFLMPPLSQIGMSEREALDKKIEYRTGKVAVAGMPKAHILGHPNGFYKVLIDKEDHILGATIYAPEAHEIINIISLAMHANLPYQMLRDQIYSHPTMAEGLNDLFETIGMN

SEQ ID NO: 37873 - protein, 187 aa, Rhodococcus erythropolis
MVDTRLPVTVLSGFLGAGKTTLLNEILRNREGRRVAVIVNDMSEINIDSAEVEREISLSRSEEKLVEMTNGCICCTLREDLLSEISALAADGRFDYLLIESSGISEPLPVAETFTFIDTDGHALADVARLDTMVTVVDGHSFLRDYTAGGRVEADAPEDERDIADLLVDQIEFADVILVSKADLVSH

SEQ ID NO: 37874 - protein, 358 aa, Streptomyces cinnamonensis
MTEADNGVLHTLFHSDQGGHEQVVLCQDRASGLKAVIAIHSTALGPALGGTRFYPYATEEEAVADVLNLSRGMSYKNAMAGLDHGGGKAVIIGDPEQIKSEDLLLAFGRFVASLGGRYVTACDVGTYVADMDVVARECRWTTGRSPENGGAGDSSVLTAFGVFQGMRASAEHLWGDPSLRGRKVGVAGVGKVGHHLVEHLLEDGADVVITDVREESVNRSTHKHPSVTAVADTEALIRTEGLDIYAPCALGGALDDDSVPVLTAKVVCGAANNQLAHPGVEKDLADRSILYAPDYVVNAGGVIQVADELRGFDFDRCKAKASKIFDTTLAIFARAKEDGIPPAAAADRIAEQRMSDAR

SEQ ID NO: 37875 - protein, 524 aa, Arabidopsis thaliana
MDIGVHVLGSVTSNENESLGLKELIGTKQDRSGFIGEDCLQRSLKLARTTTRAEEEENLSSSVAAAYCKTMSFHQGIPLMRSASPLSSDSRRQEQMLSFSDKPDALDFSKYVGLDNSSNNKNSLSPFLHQIPPPSYFRSSGGYGSGGMMMNMSMQGNFTGVKGPFTLTQWAELEQQALIYKYITANVPVPSSLLISIKKSFYPYGSLPPSSCGNMDPEPGRCRRTDGKKWRCSRDAVPDQKYCERHINRGRHRSRKPVEVQSGQNQTAAAASKAVTTPQQPVVAGNTNRSNARASSNRSLAIGSQYINPSTESLPNNRGVSIYPSTVNLQPKESPVIHQKHRNNNNPFEFGHISSDSLLNPNTAKTYGSSFLDFSSNQEKHSGNHNHNSWPEELTSDWTQLSMSIPIASSSPSSTHNNNNAQEKTTLSPLRLSRELDLSIQTDETTIEPTVKKVNTWIPISWGNSLGGPLGEVLNSTTNSPTFGSSPTGVLQKSTFCSLSNNSSVSSPIAENNRHNGDYFHYTT

SEQ ID NO: 37876 - protein, 387 aa, Nicotiana tabacum
MCGGAIISDYIAPSRTSRRLTAELLWGRSDLSNKQKNPNNYHSKPLRSQVVDLDDDFEADFQDFKDFSDDEDVQVDVKPFAFSASKNSNVEGSKSVKTDDSDKDADRSSKRKRKNQYRGIRQRPWGKWAAEIRDPRKGVRVWLGTFNTAEEAARAYDVEARRIRGNKAKVNFPDEAPVPASRRTVKVNPQKVLPKEILDSVQPDSTIINNMEDCCYDSLGFLEEKPMTKQFGCEDGSSASGDTGFGSFAPSAGTDIYFNSDVGSNSFDCSDFGWGEPCARTPEISSVLSAVIESNESQLVEDDTSPMKKLKSSPINPVADDGNTANKLSEELSAFETQMKFLQIPYLEGNWDASVDTFLNSSATQDGDNAMDLWSFDDVPSLLGGVF

SEQ ID NO: 37877 - protein, 378 aa, Mesorhizobium loti MAFF303099
MQSLKKYRRITVKIGSALLVDRASGLKRDWLDSLADDIAVLAQGGAEILVVSSGAIALGRTILGLGKRALKLEESQAAAAVGQIALAGAWSDALGRGALKSGQILLTLGDTEERRRYLNARATISTLLKMKAVPVINENDTVATSEIRYGDNDRLAARVATMMGADLLVLLSDIDGLYTAPPARDPKAKFIPVVDRITPDIEAMAGAAASELSRGGMRTKLDAGKIATAAGTAMIITSGTRLSPLMAIERGERATFFRPSANPVKGYKTWIAGQLEPAGRLTVDAGAVGALASGKSLLPAGVKLVSGNFSRGDTVAILSPDGREIARGLVAYDAADAVRIAGLKTAEIETVLGYEARSAMIHRDDLVVSHAGGDISGG

SEQ ID NO: 37878 - protein, 260 aa, Triticum aestivum
  misc_feature (243)..(243): Xaa can be any naturally occurring amino acid
  unsure (1)..(260): unsure at all Xaa locations
LSRTSLYKKAGSYRSGIPGISSTHASVHPRDEELVLDYLLHKLTGRRAYGGVDIVDVDLNKCEPWDLPEAACVGGREWYFFSLRDRKYATGQRTNRATRSGYWKATGKDRAILAHGAGDALVGMRKTLVFYQGRAPKGTRTEWVMHEFRLEEERHRHHQQQKVGAATAEARCQLKEDWVLCRVFYKSRTTSPRPPSDEACTFFSELDLPTMPPLAPLINAYIAFDSGTAMNTIEQVSCFSGLXALPLRGSMSFGDLLGWD

SEQ ID NO: 37879 - protein, 1353 aa, Pseudomonas syringae pv. syringae B728a
MKKSSLTWLVGWMAVVLLAGLSVSFIASHEQRRSIDARIGQALKEAGEGIGDNLQARLRVYEYRLRGLRGAVHMLDLQHINSSQMGRYSKGRNIEKEYPGARGFGFIRRVAASDEAEFVRRVREDGRPDFSLSRLSGPGTRQGDRFIIQFIDPLDRNVQALGLDITSEEHRRDAALQAMRSGAATLSAPITLLQDNDDHMRAFLFLLPVYSTPEIPTDIAQRETSLIGWTYAPLAMREVMSNLDPLNHRLHLKLYDVNEGRQLIYQTPENDHDQEVLQTYAFEREIYGRVWRMEVGAHPAFIAALDPVPAGRVFIIGTLVSLMLTVLVGTLLLSRQRKQQVVAGQARLATIVENSSDAIIGEALDGRIITWNRAAEQMFGYDEHEVLGRPLAPLLVPPELVHEDEQLLERVARGERGPTLETRRLHKNGQLIDVTITCSFIRETDGTLLGAAKMMHDITDRKRVERYLMEFNAQLEQQVSERTAELSRVAGLLQGVLDASSEVSIIATDTQGQIFVFNRGAELLLGYSNSEMLSGNGPGVFHLPEEVAARSAELSREYGTLIEGIDVFCYKASREGSETRQWTYVRKDGTTVPVLMIITPIRTADGELIGHLGIAQDITERLHHSAELHAAKSSAEAANAAKSLFLANMSHEIRTPMNAVIGISHLLHNTALNDQQRQLLTKLQIAGRTLLGIINDILDIAKIEAGEMRLEHNPFSPRQLLDELGELFTPQAQEKGLRFSVNVVASLPGQLIGDALRVNQILMNLVGNALKFTSVGGVDVTVSREDDHADTCCLRFSVQDTGCGIPGDVLGQLFSPFTQADASTTRRFGGTGLGLSVVRGLAEQMGGRIGVESELGTGSEFWVELPFQISQSDLEPSGPGSSLEVMLLSDDAQSSMALQRLCRGLGWRVASLTGEHDLRTALQERNHVNAALPDVLLVDWQQPQVEEVQQLIEATPLPVILVTSSEIRAELHPLVDKVLLKPLDSSALFNAVNACIARYQGSTERVIQATRMDTSMTLWLSGLHLLLVDDSEINLEVASLLLQQQGAVVQTCSNGLLALERLRQTPDFFDAVLMDVQMPEMDGYEATRRLRSELGLTRLPVLALTAGALAEERRQAELAGMDDFLTKPLDPAALIRAVRRAVERVRGAPLAVGTLLQEASTGSAWPVIEGIDTQEVAARLGNDVPLFLSSLRRFFSEFAAFGESESVLARARQNPDQTMADLHKLRGSALLLGATQVGLHAGQAETLLRNAADPEQAVRALSAAFRSLQERTPVLEERPLAPRIDADPDVSRQALSTLRELLENHDIAALDQFPLAAVALQELAGQALVEQLWQTIEGLEFEQALHLLERAEL

SEQ ID NO: 37880 - protein, 146 aa, Bacillus halodurans C-125
MSFSNLDTLYRQVIMDHYKNPRNRGTIEDDTLSVNMNNPTCGDRIQLQMKLQDGKVVEAKFIGEGCSISLASASMMTQAVKGLKVDEALALSDIFSDMMLGNDYDDKRFDLGDIEALQGVTKFPARIKCATLAWKALEKGLNEGQE

SEQ ID NO: 37881 - protein, 584 aa, Symbiobacterium thermophilum IAM 14863
MLRKTKIVATIGPASEQVEVLTRLIEAGVDVCRLNFSHGTLDEQRRRIENIREAGRRVGKDVAIMIDLKGPEIRIGTFENGKVTLRDGDLFTLTTEPCVGNQERVWVQYPGIVHDVAEGGYLLLDDGNLTFQAVEVTPTEIRCRVIVGGVLSDRKKVNLPGTKVSLPALSEKDIEDIRFGVEMGVDFVAGSFIRKAQDVLEIRRVIEEAGGHQQIISKVESQEGFDNLEAILQVSDGLMVARGDLGVEVPTEEVPLMQKRMIERANAMGKPVITATQMLESMVNRPRPTRAEASDVANAIMDGTDAIMLSAESAAGKYPVEAVRTMATIARRTEEALDHSQLMARRGRFGRMDSVTEAISHATVTTAHDLGATAIVSATTSGFTARMVSKYRPGCPIIAVTPDPRVARQLRLVWGVFPVVEPVASGTEDLTQRAVEGALVSGLVKNGDLVVITAGLPVGVKGTTNLLKVHTVADVLAQGTGIGRQPVTGRAVIVRSEEDLARVQPGDILVSRLTDADCVPAMERAAGIITEEGGLTSHAAVAGISLGKPVIVGAEGATRRIPDGAIITMDVAHGLVLRGEATVK

SEQ ID NO: 37882 - protein, 370 aa, Shewanella sp. ANA-3
MTNANVDATQLTTKPSEDGFYMPAEWAAQQAVWMIWPYRPDNWRSAGAYAQATFAKVADAIGGATPVYMGVPQAFLAEAQTVMPSHVTLVEIDSNDCWARDTGPTVVVNAEGECRGVDWGFNAWGGHNGGLYFPWDKDEQVAAQMLKQHGFARYSAPLILEGGSIHVDGEGTCMTTAECLLNANRNPDLTKEQIEALLRDYLNVKQFIWLEEGVYMDETDGHIDNMCCFARPGEVILHWTDDETDPQYPRSKAALDVLQNTVDAQGRKLKIHLLPQPGPLYCTEEESKGVTEGTGVPRTAGERLAGSYVNFLITNDRIVFPLLDPATDDIAAQKLQEIFPEHKIVGVPAREILLGGGNIHCITQQIPSGK

SEQ ID NO: 37883 - protein, 477 aa, Neisseria meningitidis MC58
MNEYSQLIKHPDISLPPVSDGIKVDNPATGETLAFVRKTDSDKLKNLIQKAAAAQKLWAAKTALERADVLWRWYFQIKENKEALARLMTMEQGKSLTEARGEIDYAASFVRWFAEEARRIDGDVLTSVKASQKLVVLKQPVGVTAAITPWNFPSAMIARKAAPALAVGCAMIVKPASLTPLSAYALASLAYEAGIPQDLLPVVSGSASEIGHEFATNPIIRKISFTGSTEVGAKIFADSAADIKKLSLELGGNAPFIVFDDADLDKAVEGALASKFRNSGQTCVCTNRVYAQSAIYDEFCRKLSEKAAALKLGNGLEDGVNQGPLIEEKAVEKVEQHIADALAKGASCLTGGKRSALGGTFFEPTVLSGVTAQMAVAREETFGPLCPVFRFETEAEVIEAANNTEYGLAAYLFTADTARQWRVGEALEYGMVGINTGLISNEAAPFGGVKRSGLGREGSKYGADEYLELKYLCMDVG

SEQ ID NO: 37884 - protein, 298 aa, Agrobacterium tumefaciens str. C58
MTRLASSPPARYVPKTGAPALTSALKRMNVIGNIYLQECNVERLEETVGLNLFDLSGRRALITGSSQGIGFALAQGLSEAGAEVVLNGRDEAKLKAAAAGIKGARTLAFDATDHGAVREAIDRFEAEVGAIDILVNNAGMQHRTPLEDFPADAFERLLQTNIASVFHVGQATARHMISRGRGKIINIASVQTALARPGIAPYTATKGAVGNLTKGMATDWAKYGLQCNAIAPGYFDTPLNAALVADETFSAWLEKRTPAGRWGKVEELVGACIFLSSDASSFVNGHILYVDGGITASL

SEQ ID NO: 37885 - protein, 620 aa, Arabidopsis thaliana
MGKGRAPCCDKNKVKRGPWSPQEDLTLITFIQKHGHQNWRSLPKLAGLLRCGKSCRLRWINYLRPDVKRGNFSKKEEDAIIHYHQTLGNKWSKIASFLPGRTDNEIKNVWNTHLKKRLTPSSSSSSLSSTHDQSTKADHDKNCDGAQEEIHSGLNESQNSATSSHHQGECMHTKPELHEVNGLNEIQFLLDHDDFDDITSEFLQDNDILFPLDSLLHNHQTHISTQEMTREVTKSQSFDHPQPDIPCGFEDTNEESDLRRQLVESTTPNNEYDEWFNFIDNQTYFDDFNFVGESSMILVRFSARFTQTTLLFSFSITLMAALRVSVFRGQNRSQVDGWQWQHRLLPVCRDQAPHQASSPEIELGVCGRYAPPETLDKKLTRPKPIYLRVSRDLTLTDFGSKSLNFGLTVNLQFYINRDSLAMEQSEEGQQQQQQGVMDYVPPHAYQSGPVNAASHMAFQQAHHFHHHHQQQQQQQLQMFWANQMQEIEHTTDFKNHTLPLARIKKIMKADEDVRMISAEAPVIFAKACEMFILELTLRAWIHTEENKRRTLQKNDIAAAISRTDVFDFLVDIIPRDELKEEGLGVTKGTIPSVVGSPPYYYLQQQGMMQHWPQEQHPDES

SEQ ID NO: 37886 - protein, 188 aa, Rhodococcus erythropolis
MVDTRLPVTVLSGFLGAGKTTLLNEILRNREGRRVAVIVNDMSEINIDSAEVEREISLSRSEEKLVEMTNGCICCTLREDLLSEISALAADGRFDYLLIESSGISEPLPVAETFTFIDTDGHALADVARLDTMVTVVDGHSFLRDYTAGGRVEADAPEDERDIADLLVDQIEFADVILVSKADLVSHQ

SEQ ID NO: 37887 - protein, 210 aa, Zymomonas mobilis subsp. mobilis ZM4
MTEPSSRDNKPVDNDNIVWHHHPVTQASREALHHHKGLVLWFTGLSGSGKSTVAGALEQVLHSRNVSSYLLDGDNIRHGLCRDLGFSDADRKENIRRVGEVAKLMADAGLVVLTAFISPHKAERQMVRDMMGKDRFIEIFVDTPLTICEARDPKGLYKKARAGELKNFTGIDSVYEAPEHPEIHLNGQDSLTALTAQLLEALEPYLKITL

SEQ ID NO: 37888 - protein, 368 aa, Marsilea quadrifolia
QTAASRPLSVKATATEIPSKVHKSSSKNVVRIGINGFGRIGRLCLRVALARDDIEVVAVNDPFIDTKYMAYMFKYDSTHGIYKDEIKAVDESTLQIGGQRVKVFGKRDPSEIPWGSAGADFVVESSGVFTTIEKASSHLKGGAKKVIISAPSADAPMFVMGVNEETYKPDMQIVSNASCTTNCLAPLAKVVDQEFGIVEGLMTTVHATTATQKTVDGPSGKDWRGGRGAAQNIIPSSTGAAKAVGKVLPQLNGKLTGMAFRVPTPNVSVVDLTCRLEKGASYDDVKAAVKAASEGSMKGILGYTEDDVVSTDFVGDSRSSIFDAKAGIALNKNFIKMVTWYDNEWGYSNRVVDLISHIAAVVAANKGN

SEQ ID NO: 37889 - protein, 190 aa, Rhodococcus erythropolis
MVDTRLPVTVLSGFLGAGKTTLLNEILRNREGRRVAVIVNDMSEINIDSAEVEREISLSRSEEKLVEMTNGCICCTLREDLLSEISALAADGRFDYLLIESSGISEPLPVAETFTFIDTDGHALADVARLDTMVTVVDGHSFLRDYTAGGRVEADAPEDERDIADLLVDQIEFADVILVSKADLVSHQHL

SEQ ID NO: 37890 - protein, 589 aa, Lactobacillus delbrueckii
MKKTKIVSTLGPASDDIETITKLAEAGANVFRFNFSHGNHEEHLARMNMVREVEKKTGKLLGIALDTKGAEIRTTDQEGGKFTINTGDEIRVSMDATKAGNKDMIHVTYPGLFDDTHVGGTVLIDDGAVGLTIKAKDEEKRELVCEAQNTGVIGSKKGVNAPGVEIRLPGITEKDTDDIRFGLKHGINFIFASFVRKAQDVLDIRALCEEANASYVKIFPKIESQEGIDNIDEILQVSDGLMVARGDMGVEIPFINVPFVQKTLIKKCNALGKPVITATQMLDSMQENPRPTRAEVTDVANAVLDGTDATMLSGESANGLYPVQSVQAMHDIDVRTEKELDTRNTLALQRFEEYKGSNVTEAIGESVVRTAQELGVKTIIAATSSGYTARMISKYRPDATIVALTFDEKIQHSLGIVWGVEPVLAKKPSNTDEMFEEAARVAKEHGFVKDGDLVIIVAGVPFGQSGTTNLMKLQIIGNQLAQGLGVGTGSVIGKAVVANSAEEANAKVHEGDILVAKTTDKDYMPAIKKASGMIVEASGLTSHAAVVGVSLGIPVVVGVADATSKIADGSTLTVDARRGAIYQGEVSNL

SEQ ID NO: 37891 - protein, 428 aa, Pseudomonas aeruginosa PAO1
MADKKAQLIIEGSAPVELPVLSGTMGPDVVDVRGLTATGHFTFDPGFMSTASCESKITYIDGDKGVLLHRGYPIEQLAEKSDYLETCYLLLNGELPTAAQKEQFVGTIKNHTMVHEQLKTFFNGFRRDAHPMAVMCGVIGALSAFYHDSLDINNPKHREVSAHRLIAKMPTIAAMVYKYSKGEPMMYPRNDLNYAENFLHMMFNTPCETKPISPVLAKAMDRIFILHADHEQNASTSTVRLAGSSGANPFACIASGIAALWGPAHGGANEAVLRMLDEIGDVSNIDKFVEKAKDKNDPFKLMGFGHRVYKNFDPRAKVMKQTCDEVLQELGINDPQLELAMKLEEIARHDPYFVERNLYPNVDFYSGIILKAIGIPTSMFTVIFALARTVGWISHWQEMLSGPYKIGRPRQLYTGHTQRDFTALKDRG

SEQ ID NO: 37892 - protein, 307 aa, Deinococcus proteolyticus
MAYKDYYEVLGVSRSASDSDIKSAYRKLAKQYHPDKNAGDESAAEKFKEIGEAYAVLSDPQKRQAYDQFGHTGQVPPALPRRRLSGRRLRRVRPQPVQRLFPGDVRGPGRWHGSRGGFTSPDGRPIDLEDLFGGLGGMGGALRAEAGRFVQNVEGELQVSLSEAFEGSDEIINVDGRRLSLRVPAGTRDGARLRLAGQGPGGGDVLLTIRVLEDARFELDGDDLTTSVDVPAPVALGGAVTVQTITGSGQLNVPAGSSGGPMRLKGQGWPKKSGGRGDLYVRLNVTVPKELSEEERQLYEHVRDLQR

SEQ ID NO: 37893 - protein, 151 aa, Candida albicans
MQIFVKTLTGKTITLEVESSDTIDNVKSKIQDKEGIPPDQQRLIFAGKQLEDGRTLSDYNIQKESTLHLVLRLRGGGKKRKKKVYTTPKKIKHKHRKHKLAVLTYYKVDNEGNVERLRRECPAPTCGAGIFMANMKDRQYCGKCHLTLKAN

SEQ ID NO: 37894 - protein, 138 aa, Oryza sativa
MAEETPVETPAAPVLGEPMDLMTALQLVMKKSSAHDGLVKGLREAAKAIEKHAAQLCVLAEDCDQPDYVKLVKALCAEHNVHLVTVPSAKTLGEWAGLCKIDSEGKARKVVGCSCVVVKDYGEESEGLNIVQDYVKSH

SEQ ID NO: 37895 - protein, 242 aa, Nicotiana tabacum
MATNGENGRHQEVGHKSLLQSDALYQYILETSVYPREPEPMKELREITAKHPWNIMTTSADEGQFLSMLLKLINAKNTMEIGVFTGYSLLATAMALPDDGKILAMDINRDNYEIGLPVIEKAGLAHKIEFKEGPALPVLDQMIEDGKYHGSYDFIFVDADKDNYLNYHKRLIDLVKVGGLIGYDNTLWNGSVVAPPDAPLRKYVRYYRDFVLELNKALAADSRIEICQLPVGDGITLCRRIS

SEQ ID NO: 37896 - protein, 158 aa, Glycine max
MAFPNQSMSSESPQRKMGRGKIEIKRIENTTSRQVTFCKRRNGLLKKAYELSVLCDAEVALIVFSNRGRLYEYANNSVKASIERYKKASSDSSSGGRSASEANAQFYQQEAAKLRVQISNLQNHNRQMMGEGLSTMNGKDLKNLETKLEKGISRIRSK

SEQ ID NO: 37897 - protein, 505 aa, Helianthus tuberosus
MEIPYLLTTTLLLLFTTLYLLLRRRSSTLPPTIFPSLPIIGHLYLLKPPLYRTLAKLSAKHGQILRLQLGFRRVLIVSSPSAAEECFTKNDIVFANRPKMLFGKIIGVNYTSLAWSPYGDNWRNLRRIASIEILSIHRLNEFHDIRVEETRLLIQKLLSACNSGSSQVTMKFSFYELTLNVMMRMISGKRYFGGDNPELEEEGKRFRDMLDETFVLAGASNVGDYLPVLSWLGVKGLEKKLIKLQEKRDVFFQGLIDQLRKSKGTEDVNKKKTMIELLLSLQETEPEYYTDAMIRSFVLVLLAAGSDTSAGTMEWVMSLLLNHPQVLKKAQNEIDSVIGKNCLVDESDIPNLPYLRCIINETLRLYPAGPLLVPHEASSDCVVGGYNVPRGTILIVNQWAIHHDPKVWDEPETFKPERFEGLEGTRDGFKLLPFGSGRRSCPGEGLAVRMLGMTLGSIIQCFDWERTSEELVDMTEGPGLTMPKAIPLVAKCKPRVEMTNLLSEL

SEQ ID NO: 37898 - protein, 590 aa, Pseudomonas aeruginosa PAO1
MASIRTLSFDAIIVGGGGAGMRAALQLAQGGHKTAVVTKVFPTRSHTVSAQGGITCAIASADPNDDWRWHMYDTVKGSDYIGDQDAIEYMCSVGPEAVFELEHMGLPFSRTETGRIYQRPFGGQSKDFGKGGQAARTCAAADRTGHALLHTLYQANLKNGTSFLNEWYAVDLVKNQDGAVVGIIAICIETGETVYIRSKAVVLATGGAGRIYASTTNALINTGDGVGMALRAGVPVQDIEMWQFHPTGIAGAGVLVTEGCRGEGGYLINAHGERFMERYAPNAKDLAGRDVVARSMVKEVLAGNGVGPNKDHVLLKLDHLGEEVLHSRLPGICELSKTFAHVDPVVAPIPVIPTCHYMMGGVATNIHGQAITQDANGNDQIVEGLFAVGEVACVSVHGANRLGGNSLLDLVVFGRAAGLHLEKALKEGIDARGASESDLEASFKRLNGVNERTSGEEVAPLKRELQSCMQNYFGVFRTGEYMQKGIAQLADLRERIANVKINDKSQAFNTARIEALELQNLLEVAEATAIAAEHRKESRGAHAREDFEERDDENWLCHTLYFPGEKRVSKRSVNFAPKTVPAFEPKVRTY

SEQ ID NO: 37899 - protein, 536 aa, Vitis vinifera
MAENDETSLSSSASASASRASAPLRPTITLPPRSSMETLFPGGPGFSPGPMTLVSNFFSDNDPDSYCRSFSQLLAGAMASPAAVPGPRPSFSTDPQVSASSKEDRTSVDAAGDFEFRFKQNRPSGLVIAQSPLFTVPPGLSPTCLLDSPGFFSQGPFVMSHQQALAQVTAQAAQAHSHMQLQAEFPSSLSVSPAASLTQFPSFASNTKAHEQMPPLVSDARTAVKESSGLSQSDQRSQPSSFTVDKPADDGYNWRKYGQKQVKGSEYPRSYYKCTHPSCPVKKKVERSLDGQVTEIIYKGQHNHQAPLPNKRAKDTGNPNGNSNFQENPELASQNQTGNLNKPKEGLPAYSLSKKDQQSSQAIPEHLPGSSDSEEMDDAETRGDEKGEDEPDPKRRNTEVRVSDQVSSHRTVTEPRIIVQTTSEVDLLDDGYRWRKYGQKVVKGNPYPRSYYKCTNPGCNVRKHVERAATDPKAVITTYEGKHNHDVPAAKSSSHNTANSIASQKPQNVVDKKRAFIDNNDQCPIGRLQLKEEQIT

SEQ ID NO: 37900 - protein, 676 aa, Schizosaccharomyces pombe
MKVQSKAISKPKEHESAIYRNANFPDHLVETYSDDVHTLFDVFRHSVKQFGNKKAMGYRNLVKEHVETKMVTKVVDGEKKEVPKSWSYFELSDYNYLSFNDIYDKALRYAGALRKLGLNKGDKFELYAPTSAFWLLTAEACLSQSMTIVTAYDTLGEEGLLHSLRESGVRGMYTEGHLLKTLVNPLKEIESLEVIIYRNDAKEEDIKTIQEIRPNLKLIKFADFEKMSPPVEPDPPSPEEICCIMYTSGSTGLPKGVILSHKNMVAIVTAIVKHVPEVTSKDYLLAYLPLAHILEFAFENICLAWGGTIGYANVRTLVDTNCRNCKGDINTFRPTIMVGVPAVWEMVRKGIMSKLNAASAVKRSVFWTAYYTKAKLMRHNLPGSCVLDTAVFNKIRSMGTGGRLRYTLSGGSALSPDTKRFLSIVLCPMLIGYGLTEISAAAMVQNPACFNLDDSAGSLLPCTEMKLVDCEEGNYNSHGHPPRGEIWLRGPSLTRGYLNRDKENKESFTPDGWFRTGDVGELTPEGLLRIIDRKKNLVKTQNGEYIALEKLESRYRTSSLVSNICVYADQTKVKPLAIIVPNEPVVRKLATEQAGLSPDASWEEVCHNKKVRQLVYDDLIRIGRSHHFANIELIQNVVLVPIEFTPENGLVTAAQKLQRRKILDRFKKEIDAAYAE

SEQ ID NO: 37901 - protein, 756 aa, Shewanella sp. ANA-3
MQLNSLGFPRIGRRRELKFALEKYWRGESTQAELHEVAKELRRTHWQWQVAAGIEQVPVGDFAFYDQVLTLSATLNAIPDRHRGEGAIDLDTLFRVARGRAPTGTDAPASEMTKYFNTNYHYLVPELKQDQVFSIAYEQFFDEVAEAQALGYQAKPVLLGPVSYLYLAKTVGQDFDKLSLLPNLLKAYADILARFAAQGVTWVQLEEPILALELTHDWQAAISEAYQALKTAQVKILLTSYYGSISHHQALVSALPVAGLHLDLVTAPEQLALFANALRSDQILSAGVVNGRNVWAAEVDLIVERIGSVARDLGARLWIGTSCSLLHSPVDLEVETTLTPALRQQLAFAKQKLLELANVRQLLQAPESIAAKEIVNTCLARREAKAQAADAKVIARVAALTQADYERVSEFTERQAVQQRKYRLPLLPTTTIGSFPQTPAIRGLRSRWRKGELSDAQYTEQLQQVTRDTIDRQLKLGIDVLVHGEAERNDMVEYFGEQLEGVGFTKNGWVQSYGSRCVKPPLIYGDVSRPKAMTVDWAEFAQSLTDKPVKGMLTGPVTILHWSFAREDISRDTIATQLALAIRDEVVDLQNAGIGIIQIDEPAFREGLPLKQSEWQAYLDWAVNAFKLSAAGVVDETQIHTHMCYSEFNDTIAAIAAMDADVITIETSRSRMELLNAFEDFEYPNEIGPGVYDIHSPNTPSVEAMVHLIEKAAQKVPVRQLWVNPDCGLKTRTWDEVEPALKNMVDATRELRRRLG

SEQ ID NO: 37902 - protein, 596 aa, Zea mays
MAEKQGDECGSFSAEEVIAKFERLTRDAAAVQRETLRRILADNAGAEYLRGLGLGGRTDPDSFRACVPLATHADMEPYIARIADEGDTSHVLTATPVTSISLSSGTTQGKRKYLLFNDDLFKCAMQTGQTSFAFRNRAFPVEDGKSLQFIYASRQFKTKGGLTATTATTNVYRHRDFKAHMRHTQSECCSPSEVLFCPDFAESLYCHLLCGLVLADDVRTVSATFAHSLVLAFRTFERVWEELCADIRHGAPSPTRVTNPAVRRAVSALLVAPNPALADEVARRCRGVVNWRGVIPALWPRARYVSSIVTGSMEHYVKKLRHYAGALPLVALDYGATEGMIAANVEPREPPESATFTVLPNIAYFEFIPLRLRGCDVAGAADARYTEADPVGLTDVAVGEHYEVVMTTFAGLYRYRLGDVVKVAGFYNSTPKLKVVCRRNLVLSINIDKNSEHDLQLAVDSAAKVLAAGAGRLEVVDYTSHADVSRDPGHYVVFWELSAEPDGDGHVLQSCCDELDRAFTDPGYVGSRKARAIGPLELRVLRRGTFQKVLRHYLSLGSPVNQFKLPRCVAPSSSAAGVLEILAANAVEAFFSTAYD

SEQ ID NO: 37903 - protein, 486 aa, Shewanella sp. MR-7
MYCNHLTGGLNYTSKHFLLAYSLKAVFMNHSGFQAKRLIQLALPVLIAQVTQTMMGFIDTVMAGRVSAVDMAAVAVGTSLWLPAILFVQGLLMAFTPLFAHHNGANNQKAIQPLAFQGAYLALIGGLGVMAFLASAPLVLSHMNLEPQLYNLTIGYIDGILWGAPAFVLYQVLRGCSEGISYTLPTMIIGFVGLAVNIPANYIFIYGHFGVPAMGGAGCGVATALVFWAMLIAMTIYMQFHKKFAALAPFSQFHRPDFATMKKMTKLGMPIAMALFFEVSLFAIIALLLAPLGATVVASHQIALNFSAIVFMLPLSIGIAVSIRIGYYLGRDRADISAVVAKVGLWLALSLALSTAILTVLFRFQIAELYNSDPEVVVLAGSLMLMAALYQLSDSVQVVAAGALRGYKDTRSAFYITLFSYWGIGMTLGYTLAYTDFIVPAMGAHGFWTGLIAGLTSAALLFFIRLRYIQKHGVHLSLIEGDSVHH

SEQ ID NO: 37904 - protein, 550 aa, Wolbachia pipientis
MTNVVVSGEQLQQAFREVAAVIDSTVAITAGPRGKTVGINKPYGAPEITKDGYKVMKGIKPEKPLNAAITSIFAQSCSQCNDKVGDGTTTCSILTSSMIMEASKSIAAGNDRVGIKNGMQKAKDVVLKEVASMSRTISLEKIDEVAQVAIISANGDRSIGSNIADAVKKVGKEGVITVEESKGSKELEVELTTGMQFDRGYLSPYFITNNEKMIVELDDPYLLITEKKLNIIQPLLSILEAVVKSGKPLLIIAEDIEGEALSTLVINKLRGGLKVAAVKAPGFGDRRKEMLEDIAALTGAKYVIKDELGIKMEDLTLEDLGIAKNVKITKDNTTIVSENKVTNRVKARIEQIKSQIESSTSDYDKEKLRERLAKLSGGVAVLKVGGATELEVKERRDRVEDALHATRAAIEEGIVPGGGVALLYASSALDKLKGAGDEEQIGINIIKKVLNVPIKRLVKNAGLESAVIIDYLIKQNNKELIYNVEAMNYVNAFTAGVIDPAKVVRIAFETAISVASVLITTESMIVDVPSKDENASSPMSAGGMGRMNEF

SEQ ID NO: 37905 - protein, 303 aa, Shewanella sp. ANA-3
MSHILVIGSANADHVMNFEYLPVPGQTLMSRAYRLEHGGKGANQAVACARLCQGDAEVAFICHLGQDSVGNDMRTSWLKDGIKAEGITQVANMSTGTALIFVGDNGENSIGIAAGANADLTPSELEKHYALFANAQFLLIQLETPMETVHHALQTAKRLGITTVLNPAPATSQELDYLKWVDIITPNETEAEALTGIEVNNEEDAELAAQWLHQQGVATVVITLGSKGAFISSAGFTGLIPALTVQAIDTVAAGDTFNGALVVGLSEGMSIAAAVGFANAASAITVTREGAQRAIPYRHEVQR

SEQ ID NO: 37906 - protein, 492 aa, Haemophilus influenzae Rd KW20
MANYFNTLNLRQKLDQLGRCRFMDREEFADEANFLKGKKIVIVGCGAQGLNQGLNMRDSGLDISYALRPEAIAEKRASFQRATENGFKVGTYEELIPTADLVVNLTPDKQHSKVVADVMPLMKKDSAFGYSHGFNIVEVGEEIRKDITVVMVAPKCPGTEVREEYKRGFGVPTLIAVHPENDPKGEGMAIAKAWAAATGGHKAGVLESSFVAEVKSDLMGEQTILCGMLQAGSIVCYDKLVADGKDPAYAGKLIQYGWETITEALKQGGITLMMDRLSNSAKLRAFELAEQIKESLGFLYYKHMDDIISGHFSATMMADWANGDKDLFAWREATGKTAFENAPKYDGKISEQEYFDNGVLMIAMVKAGVELAFDAMVASGIYEESAYYESLHELPLIANTIARKRLYEMNVVISDTAEYGNYLFSNVATPILAKEIIPNLQKGDLGEPTPAVEVDNITLRDVNDAIRNHPVELIGQELRGYMTDMKRIAVAG

SEQ ID NO: 37907 - protein, 544 aa, Oryza sativa
MESEMADAAPAPAVAAAATAEPLAAVAEEGEEGGEAAVGSTLTMERVAAAKKFIENHYRSQMKNIQERKERRFRLERQLESSQVPREQQINLLKDLERKETEYMRLKRHKICVDDFELLTIIGRGAFGEVRLCREKTSSNIYAMKKLKKSDMVVRGQVEHVRAERNLLAEVASHCIVKLYYSFQDSEYLYLIMEYLPGGDIMTLLMREDTLTEHVARFYIAETILAIESIHKHNYIHRDIKPDNLLLDKNGHMKLSDFGLCKPIDCSKLSTLNEDEPMGDDNLRESMDIDSSFSETTNGRRWRSQHEQLQHWQMNRRKLAFSTVGTPDYIAPEVLLKKGYGMECDWWSLGAIMYEMLVGYPPFYSDDPITTCRKIVHWRNHLKFPEDSKVSPEARDLICRLLCDVDHRIGSAGADQIKAHPWFRGVAWEKLYEMEAAFKPQVNDELDTQNFMKFEEMDNAPTRTGSGPSRKMMLNSKDLSFVGYTYKNFDAVKGLKHSDQQRNQSLIRPSIGSIFGPADMDPSREPNGRDKHMHTVSSGDPMIQ

SEQ ID NO: 37908 - protein, 148 aa, Arabidopsis thaliana
  misc_feature (20)..(20): Xaa can be any naturally occurring amino acid
  unsure (1)..(148): unsure at all Xaa locations
GTAARRRQKGRKRRKKKCLXRDHVKTVEEENQGVMDRIKQKFPLGEKPGGDDVPVVTTMPAPHSVEDLKPEQEEKKGFMDKIKEKLPGHRAKPAGAQVVNTTPLVETATPIADIPEEKKGFMPKIKEKLPGYHAKTTGEEEKKEKVSD

SEQ ID NO: 37909 - protein, 542 aa, Zea mays
  misc_feature (499)..(499): Xaa can be any naturally occurring amino acid
  misc_feature (512)..(512): Xaa can be any naturally occurring amino acid
  unsure (1)..(542): unsure at all Xaa locations
MNTVALLSLAPQLLIKPSLTCFSRKGVGRYGGIKVYAVLRDDGAEFAKNNNLEALFHVDDPGPRVPIKKGRFLDVNEALEVVRFDIQYCDWRARHDLLTIMVLHNKVVEVLNPLAREFKSIGTLRKELAELQQELAKAHNQVHLSETRVSSALDKLAHMETLVNDRLLPPDGASSTSTAQPTSLVPSTSSTARVRAKKPPRRGLNVSGPVKPYNPSLKNFWYPVAFSSDLKDDTMVPIACFEEQWVIFRGKDGRPGCVQNTCAHRACPLHLGSVNEGRIQCPYHGWEYSTDGKCEKMPSTKMLNVRIQSLPCFEQEGMVWIWPGDDPPKATIPSLLPPSGFTVHAEIVMELPVEHGLLLDNLLDLAHAPFTHTSTFAKGWSVPSLVKFLTPASGLQGYWDPYPIDMEFRPPCMVLSTIGISKPGKLEGKSTQQCSTHLHQLHVCLPSSRNKTRLLYRMSLDFAPWLKHVPLMHLLWSHFAEKAFLNEDLRLVLGQQERXQWRQRLELAGIIXKLGVRYRLWRDTVERGSERLPFSNQAESGS

SEQ ID NO: 37910 - protein, 490 aa, Buchnera aphidicola str. APS (Acyrthosiphon pisum)
MNYFNTLNFTQKINQINKCRFMKKEEFNKKNDILKNKNIVIVGCGAQGLNQGLNMRDAGLNISYALKKNSIANKNQSWINAIENNFKVDDYDALIPDADLVINLTPDKQHHSVIKKLQKLMKKNAVLGYSHGFNIVEFGEKIRKDITVIMVAPKCPGTEVREEYKRGFGVPTLIAVHHENDINKIGLEVAKAWAFSTGGHRAGVLESSFIAEVKSDLMGEQTILCGMLQTASLLCYEKLITEKCNPAYSAKLIQNGWETITESLKHGGITLMMDRLSNSSKIRAYKLSKEIKKILSPLFQKHMDDIISGEFSNEMMKDWENQDLKLLNWRYKTKNTSFETAPVYNEKIPEQEYYDHGILMIAILKSGIELSFEKMIETGIKEESAYYESLHELPLIANTIARKKLYEMNKVISDTAEYGSYLFSESAYPILKEFISTLNKSDLGCALSHQSVNNIELYRINQKIQNHPIEIIGCTLRNYMKKMKAITVAK

SEQ ID NO: 37911 - protein, 191 aa, Wolbachia endosymbiont of Drosophila simulans
MTDYDLIVIGGGPGGYKCAIAAAKLGLKVACIDKNSIFGGTCLRVGCIPSKALLHSSYQYAHTKNDLSKLGIKIKDASFDLKEMLGYKDARVQELGKGIEYLFNLHKITKINGLASFDQGNLEVSVEGKVLKTKNIVIATGSDVISLPGINIDEKNIISSTGALSLTEVPKKLVVIGAGAIGLEMSSVGAG

SEQ ID NO: 37912 - protein, 95 aa, Xanthomonas campestris pv. vesicatoria str. 85-10
MSIKPLHDRVVVKPIEADEVSAGGIVIPDSAKEKSTKGEVVAIGAGKPLDNGSLRAPVVKVGDKVIYGQYAGSSYKSEGVEYKVLREDDILAVIG

SEQ ID NO: 37913 - protein, 546 aa, Xanthomonas campestris pv. vesicatoria str. 85-10
MAAKDIRFGEDARTRMVRGVNVLANAVKATLGPKGRNVVLEKSFGAPTITKDGVSVAKEIELADKFENMGAQMVKEVASKTNDNAGDGTTTATVLAQALIREGAKAVAAGMNPMDLKRGIDQAVKAAVVELKNISKPTTDDKAIAQVGTISANSDESIGNIIAEAMKKVGKEGVITVEEGSGLENELDVVEGMQFDRGYLSPYFINNQQSQSADLDDPFILLHDKKISNVRDLLPVLEGVAKAGKPLLIVAEEVEGEALATLVVNTIRGIVKVVAVKAPGFGDRRKAMLEDMAVLTGGTVISEEVGLALEKATIKDLGRAKKVQVSKENTTIIDGAGDTAAIESRVGQIKTQIEDTSSDYDREKLQERVAKLAGGVAVIKVGASTEIEMKEKKARVEDALHATRAAVEEGVVPGGGVALVRALVAVGELKGANEDQTHGIQIALRAMEAPLREIVANAGEEPSVILNKVKEGSGNYGYNAANGEFGDMVEFGILDPTKVTRSALQNAASIAGLMITTEAMVADAPKKDEPAMPAGGGMGGMGGMDF

SEQ ID NO: 37914 - protein, 127 aa, Buchnera aphidicola str. APS (Acyrthosiphon pisum)
MAYSKKVMDHYENPRNVGSFSSTDLNVGSGLVGAPACGDVMKLQIKVNEKGIIEDACFKTYGCGSAIASSSLVTEWVKGKSIEEAESIKNTTIVEELDLPPVKIHCSILAEDAIKAAISDYKRKKIN

SEQ ID NO: 37915 - protein, 189 aa, Rhodococcus erythropolis
MVDTRLPVTVLSGFLGAGKTTLLNEILRNREGRRVAVIVNDMSEINIDSAEVEREISLSRSEEKLVEMTNGCICCTLREDLLSEISALAADGRFDYLLIESSGISEPLPVAETFTFIDTDGHALADVARLDTMVTVVDGHSFLRDYTAGGRVEADAPEDERDIADLLVDQIEFADVILVSKADLVSHQH

SEQ ID NO: 37916 - protein, 128 aa, Brassica napus
SQLKLVIRPMYSNPPLHGASIVATILRDSEMFNEWTLELKAMADRIINMRQQLFNALKSRGTPGDWSHIIKQIGMFTFTGLNSEQVAFMRQEYHIYMTSDGRISMAGLSMRTVPHLADAIHAAVTQLK

SEQ ID NO: 37917 - protein, 491 aa, Pasteurella multocida subsp. multocida str. Pm70
MANYFNTLNLRQQLDQLGRCRFMDRNEFANEADYLKGKKIVIVGCGAQGLNQGLNMRDSGLDISYALRAEAIAEKRASFQRATENGFKVGTYDELIPSADLVVNLTPDKQHSKVVADVMPLMKQGAALGYSHGLNIVEVGEQIRKDITVVMVAPKCPGTEVREEYKRGFGVPTLIAVHPENDPNGDGLEIAKAWAAATGGHRAGVLESSFVAEVKSDLMGEQTILCGMLQAGSIVCYDKLVADGKDPAYAGKLIQYGWETITEALKQGGITLMMDRLSNSAKLRAFELSEQIKAKLTFLFEKHMDDIISGEFSATMMADWANGDANLLKWREETGKTAFENAPKYEGKISEQEYFDHGVLMVAMVKAGVELAFDTMVASGIYEESAYYESLHELPLIANTIARKRLYEMNVVISDTAEYGNYLFANVATPILAKEIMPTLQKGDLGEPTPTVEIDNITLRDVNDAIRNHPIELIGQELRGYMTDMKRISSH

SEQ ID NO: 37918 - protein, 520 aa, Helianthus tuberosus
MEIPYLLTVVLLLLTTLYLLLFTTLLLLFTTLYLLLRRRRSSTLPPTIFPYLPIIGHLYLLKPPLYRTLAKLSAKHGPILRLQLGFRRVLIVSSPSAAEECFTKNDIVFANRPKMLFGKIIGVNYTSLAWSPYGDNWRNLRRIASIEILSIHRLNEFHDIRVEETRLLIQKLLSACNSGSSQVTMKFSFYELTLNVMMRMISGKRYFGGDNPELEEEGKRFRDMLDETFVLAGASNVGDYLPVLSWLGVKGLEKKLIKLQEKRDVFFQGLIDQLRKSKGTEDVNKKKTMIELLLSLQETEPEYYTDAMIRSFVLVLLAAGSDTSAGTMEWVMSLLLNHPQVLKKAQNEIDSVIGKNCLVDESDIPNLPYLRCIINETLRLYPAGPLLVPHEASSDCVVGGYNVPRGTILIVNQWAIHHDPKVWDEPETFKPERFEGLEGTRDGFKLLPFGSGRRSCPGEGLAVRMLGMTLGSIIQCFDWERTSEELVDMTEGPGLTMPKAIPLVAKCKPRVEMTNLLSEL

SEQ ID NO: 37919 - protein, 174 aa, Triticum aestivum
  misc_feature (23)..(23): Xaa can be any naturally occurring amino acid
  unsure (1)..(174): unsure at all Xaa locations
MAPTVMASSATSGTPFQGLKSTXAGLPISRRSSSAGLSSVSNGGRIRCMQVWPIEGIKKFETLSYLPPLSTEALLKQVDYLIRSKWVPCLEFSKVGFVFREHNSCHGYYDGRYWTMWKLPMVWCTDATQVLNEVEEVKKEYPDAYVRVISIDNLRQVQCVSFIAFMPPGCEESG

SEQ ID NO: 37920 - protein, 1013 aa, Yarrowia lipolytica CLIB122
MNDSVSTPLVKKEDSLGLDDEATVLRRPSMNSTFPQISPPAMMALSSQHATHELDFPNIQPKRESPDNPNNTNDGGEQVKLEEPLPPLMDEIESGDDDSSRVSAYARLDFESFTFYVQTLQVVLGRRVENSSSMVDVHLGDTKAISRKHAKIFYNFGTQRFELSVLGRNGAFVDDVFVETGSTVPLKDGTKVQVGTIPFSFVLPSLPDHTTGSPTPINPADALSMRSNNIRVLSRQGSPAIVSPRKKSTGSSNSKQSTKSATGSPGTPVLDPLDYNLPTEVTEANASSSSVNLFEQENSKYTENMDVKYDSDKYSDKYDLPLDDMDLDDAVDASLSDLQPVYPTGSQYNMPSQQQHQHNQHQQSNMQPGNMFQQQKPQSKPRKQPKREYQLHEIPEEYRTKPNFSFSHLIATALEQAPDKGVSLAEIYRSIQEIFPYYKYCPHGWQNSVRHNLSSSKTFRKVSKEGKGWLWGIDREWCAERDRQKRKSTLSKNKSMRPDSHIPGSAPNPAFSNFSVNNFDSGEVKMYSPDTNTYGTQIDLNSHNTDAHGGQTMTFDQNKNDGGVNVIDFSSANFTLDNNASTSSSSAGSSSQPRGGQEIKFMPGSGPNGVIDFSSQPKARQKTIAEMAQEIQLQNSGSQQRMYQSPYQSQTTPAGGMGQQNTSSQQARAQAGSSAGGKATAPKLGKDAMKILALLQQKISQQFQQQLGGKAPSSALITNALAIAIAQATKKNPSGGVNALQSLLNGDNQQQLNQIVMAAYNAVKTKQDAQGGGNSSNSRQPTPQQSTPQQSTLQIKQERPMSTQQQGQSQFSTQTQFQSQSPAPQYSPPAQASPQISQPQMSQSPQIVTSGTPGASGSMPGSATASPAPAPAPVQAPVPVQTQAPAQHTTAPQARPAVPGTSSAVPTPSASSAPATAPAGSSSSPATAKPAGGLTSLSNSDTTIAQVLEQASKISNPSPAVQAALKQLRAHAEKYGADIPIGSLGKLPKPGDKRKAEDPPSAHEQPAKKPLNN

SEQ ID NO: 37921 - protein, 293 aa, Gemmata sp. Wa1-1
  misc_feature (278)..(278): Xaa can be any naturally occurring amino acid
  unsure (1)..(293): unsure at all Xaa locations
MGLKYLEKAANKDLAAAATKDLANPKTSKERAAVADAWYKLARDYRGAEHRRVVDRAWEWYSAALVVAVGDEELKVGERVKEIEKNYPELFNVTFAGHTGATAAIAVTPNGKTLVSVSNDNSVRLWDATTGRLQKVLEGHTSWVGSVVLTPDSTQAVTAGGDNTIRVWDLQSGKEVAQLKGHAVAIRGLALTADGKTLISGASDKTCRAWDLKSGKEVKRYGEGKDSVESVAVTPDGKSVLVGNDAGVVTVYDAKSGDVVSKFDKHDGMMVYTIVTCXTGMTASPGARKLDRP

SEQ ID NO: 37922 - protein, 230 aa, Lactobacillus gasseri
MSKLVLIRHGQSEWNLSNQFTGWVDVNLSEKGVEEAKKAGRLIKEHGLEFDQAYTSLLTRAIKTLHYALEESDQLWIPETKTWRLNERHYGALQGLNKKATAEKYGDEQVHIWRRSYDVLPPAIDDDNEFSQAHDRRYANLDPHIVPKAENLHVCLDRVMPFWEDHIAPDLLDGKNVIIAAHGNSLRALTKYIENISDDDIMNLEMKTGEPVVYTFDDKLDVVNKEKLDD

SEQ ID NO: 37923 - protein, 465 aa, Gemmata sp. Wa1-1
MDSEGHLTRTGILVGTPAYMAPEQADAQRAREVGPACDVYGLGAILYECLTGRPPFRADTLLATVLQVRTEEPVAPRRVQPTVPRDLETICLKCLHKDPRRRYASAEALADDLQRYLDGKPVVARPAGAIERGVKWARRRPTLAALLVTVPVLVALGFSGVFWQWRETVGALRETREEQKKTLRAHEATKAHLYLNQVSLAWNELRSNSGGRAEALLRDTDPALRNWEWHYLQRHAQTDLFTLVGHNNEIQALAWSPDGQLIASGSGHWSSGLESEFKIWDARTGQLLRTITQEIGTVLALAFSPDGTVLASGSHDRVVRLWNPRTGQLVKELPGHSNRVSRVVFSPDGKRLASAALDNTARIWDLETGKTLHVLRGHKDNVFCLEFSPDGKMLVTGDRKHVARVWDPATGKLLRTETGPGDLRATSFSPDGAWLAFGTFQGSIWVWDLTQPNAKPVIHNPVGSI

SEQ ID NO: 37924 - protein, 516 aa, Cryptococcus neoformans var. neoformans
MFQKVSDKFHRKQQSTTLPGKTQQVPNPTSPVLAKANSQAQQAYSLPQDHSPMEGIQRDSPPIQQPMATEKAPIVGSSASTSLPTLSVQDGTLPLTPGAQGMQTGTIDGHRQLQSPVSRSSSAGEDKMREKARDAQEQAAQSQANLHHATQQARVAAINAAATQAALETAAQLPATARVPVSGGGVEQGQARRKTAGRYALSDFLIERTLGTGSFGRVHLVRSRHNGRFYAVKVLNKEKVIKMKQVEHTNSEREMLVRVRHPFLVNLWGTFQDVNNLYMVMDFVAGGELFSLLRKSQRFPNSVAKFYAAEVALALDYLHSLDIIYRDLKPENLLLGADGHVKVTNFGFAKYVPDITWTLCGTPDYLAPEVVQSKGYNKSVDWYALGVLIFEMLAGYPPFFTEDGNPMKLYEKIIAGKVRYPTYFDALAKELLKNLLIGDLTKRYGNLRAGSSDIFAHGWFAEVDWDKLYRREIPAPYVPKIDGEGDASQFDRYQEADVSAYGKVGNGPYDHFFTEF

SEQ ID NO: 37925 - protein, 508 aa, Nicotiana tabacum
MAIENNNNGVNFCTVKRPKTKIVCTLGPASRSVPMIEKLLRAGMNVARFNFSHGSHDYHQETIDNLRQAMESTGILCAVMLDTKGPEIRTGFLKDAKPVQLKQGQEITISTDYSIKGDESMICMSYKKLAEDVKPQSVILCADGQITFTVLSCDKENGLDRCRCENTAVLGERKNVNLPGVIVDLPTLTDKDKDDILNWGVPNHIDMIALSFVRKGSDLVEVRKLLGEHAKNILLMSKVENQEGVANFDDILLNSDAFMVARGDLGMEIPIEKIFLAQKVMIYKCNIQGKPVVTATQMLESMIKSPRPTRAEATDVANAVLDGTDCVMLSGETAAGAYPDLAVGTMAKICIEAESTIDYPDVFKRIMSNAPVPMSPLESLASSAVRTANSAKAALILVLTRGGSTAKLVAKYRPGMPILSVVVPEIKTDSFDWTCSDESPARHSLIFRGLVPVLHAGSARASHEESTEEALDFALQHAKTKGLCKQGDSVVALHRVGTASVIKIVTVK

SEQ ID NO: 37926 - protein, 133 aa, Hordeum vulgare subsp. vulgare
MASGQQERSELDRMAREGETVVPGGTGGKTLEAQEHLAEGRSRGGQTRKDQLGEEGYREMGHKGGETRKEQLGEEGYREMGHKGGETRKEQMGEEGYHEMGRKGGLSTMEESGGERAAREGIDIDESKFKTKS

SEQ ID NO: 37927 - protein, 320 aa, Lactobacillus gasseri
MKLGIIGSGKIVHDFLTIADQIPNLELTALATTKRSHQIGLDLQKEYQITKLYDNNDDLFNDPNVDTVYVAVPNSFHFSISKAALEAGKNVICEKPFVATVDEARELKAIADQKKLIIIEAITNIYLENFKFIEENLDKIAPIHVVNLNYTQYSSRYDAFLAGDIQPAFDPKKDGGALMDLGIYNLHIIIKLFGKPEAVNYFPTMQKNIDTSGILHLSYPDKQASSIAAKDSFSPNVSTIEGEKGALIIYGHPNEMPKVGMQLKGQEVKVINNNKYSHRMVAEFIEFTKIIAQHDFKEADQAFTHSLNTLAVLQEAKSQR

SEQ ID NO: 37928 - protein, 153 aa, Hordeum vulgare subsp. vulgare
MASGQQERSELDRMAREGETVVPGGTGGKTLEAQEHLAEGRSRGGQTRKEQLGEEGYREMGHKGGETRKEQLGEEGYREMGHKGGETRKEQLGEEGYREMGHKGGETRKEQMGEEGYREMGRKGGLSTMNESGGERAAREGIDIDESKFKTKS

SEQ ID NO: 37929 - protein, 284 aa, Triticum aestivum
  misc_feature (19)..(19): Xaa can be any naturally occurring amino acid
  misc_feature (165)..(165): Xaa can be any naturally occurring amino acid
  misc_feature (264)..(264): Xaa can be any naturally occurring amino acid
  unsure (1)..(284): unsure at all Xaa locations
ELNFRSLYLFHTPLGSNQXNQSGIVDSNVTTGLGATVVNNWPICDGPSPGATVVARAQGLHIYAGNWQNTFSITFEVERFKGSTLQVMGISVEEGEWAIVGGTGQFAMTTGVIYKKFHEQRSDGNIIELTVHGFCPMLKGSQSRPTKVGPWGGNGGSDKDIVEAXSGTIIDSIKFSYVDQAGQLLDLGGGSGGKQNMSVLGTSEFVKEVSGTFGLYGRDNHNIITSLKFVTNVKTYGPFGQAKGTTFTIPVQKNSSIVGFFRRXGYISTRLVSTCTLSKLLASG

SEQ ID NO: 37930 - protein, 325 aa, Triticum aestivum
MAWWAGSMGGLDLRNHLAQFGGPAAGGAAMGGAEQAPTTPNSSGSNNHDDSSGAAQDSPTAGAGDNSPNPNAAISGSGPSGGGGGSGGGGSSSGRRPRGRPAGSKNKPKPPIIITRESPNTLRSHVLEIASGADIMEAVSTFARRRQRGVSVLSGSGVVGNVTLRQPAAPPGSVVTLHGRFEILSLSGAFLPSPCPPGATGLAVYLAGGQGQVVGGTVIGELVASGPVMVVAATFSNATYERLPLADEEPGEAAAAATGSDGMQLPDGPAPGGNGGMGAAVGVPGLPDPSSMPFYNLPPNLQMPNGGGQMAHDVFGSFRPPPPAF

SEQ ID NO: 37931 - protein, 163 aa, Vitis riparia
GEGGFGGVYKGLLSDSKTEVAVKRVSRGSKQGKKEYVSEVKIISRLRHRNLVQLIGWCHEHGELLLVYEFMPNGSLDTHLFGGNSTLKWTVRYKIALGLASSLLYLHEEWEQCVVHRDIKSSNVMLDSNFNAKLGDFGLARFVDHELGSQTTVLAGTMGYIDL

SEQ ID NO: 37932 - protein, 285 aa, Sinorhizobium meliloti
MTFKAAAVQICSGVDPAGNAETMAKLVREAASRGATYVQTPEMTGAVQRDRTGLRSVLKDGENDVVVREASRLARELGIYLHVGSTPIARADGKIANRGFLFGPDGAKICDYDKIHMFDVDLENGESWRESAAYHPGNTARTADLPFGKLGFSICYDVRFPELFRQQAVAGAEIMSVPAAFTRQTGEAHWEILLRARAIENGLFVIAAAQAGTHEDGRETFGHSMIVDPWGRVLAEAGATGEEIIVAEIDVAAVHAARAKIPNLRNARSFVLDEVVPVGKGGAAA

SEQ ID NO: 37933 - protein, 540 aa, Schizosaccharomyces pombe
MSSFLTGGGSSPTSSYGSGSASPRKSTVISSPFDPKHVTHVGFNYDTGEFTGMPTEWQALLKVSGITKSEQVQHPQAVLDAMAFYSQSKKYLEEGAKPPFPRESTEKPLLSVSALSSSSHLQPTSATSSSSRLYPSRPAPTPPASSSSSPLLSSQTVKTTTSNASRQPSPLVSSKSTDNIIRSHSPVLLTPQTLSTSETKHIRPNNSTPYQRRAETSTKPKAVATPQKVEAPSAPRLQKRAPRQQSNDSAVLAKLQSICNPKNPTLLYRNFVKIGQGASGDVYSARQVGTNLSVAIKKMNINQQPKKEFIVNEILVMKSHHHKNIVNFIDTFFYKSELWMVMEYMRGGSLTEVVTNNTLSEGQIAAICKETLEGLQHLHENGIVHRDIKSDNILLSLQGDIKLTDFGFCAQIDSNMTKRTTMVGTPYWMAPEVVTRKEYGFKVDVWSLGIMAIEMVEGEPPYLNENPLRALYLIATIGTPKISRPELLSSVFHDFLSKSLTVNPKQRPSSGELLRHPFLKQAVPVSSLIPLIKSIHHSGK

SEQ ID NO: 37934 - protein, 533 aa, Streptomyces avermitilis MA-4680
MGQPTPARIQKDWWRTAVIYQVYVRSFADGDGDGTGDLAGVRARLPYLAGLGVDAIWFNPWYLSPMKDGGYDVADYRAVDPAFGTLAEAEKLIAEARELGIRTLVDIVPNHVSDQHPWFRAALAAGPGSPERALFHFRGGRGAHGELPPNDWPSQFAGSTEPVWTQLPDGDWYLHLFTPEQPDLNWAHPAVRQEHEDVLRFWFERGVAGVRIDSAALLAKDPDLPDLVEGRAPHPFVDRDELHDIYRSWRAIADEYGAVFVGEVWLPDTERFARYLRPDELHTAFNFSFLSCPWDARRLRTAIDETLAEHAPVGAPATWVLCNHDVTRTVTRYGRTDTGFDFAAKAFGTPTDLALGTRRARAAALLSLALPGSVYLYQGEELGLPEAEIPRESIQDPMHFRSHGVDPGRDGCRVPLPWVADAPHAGFGGEPWLPQPARWSAYAADLQAEDPGSMLSLYREALRLRPAYADGPLTWLPAPDGVLAFARTEGLMCVVNLADTPAGLPAHSRLLLSSGPLDDQGRLPQDTAAWLRI

SEQ ID NO: 37935 - protein, 364 aa, Arabidopsis thaliana
MGKGGMSQGEGSKVEEENMAAWLVGINTLKIQPFLLPSVGPHDVRVRMKAVGICGSDVHYLKTMRCADFVVKEPMVIGHECAGIIEEVGEEVKHLVVGDRVALEPGISCWRCNLCREGRYNLCPEMKFFATPPVHGSLANQVVHPADLCFKLPENVSLEEGAMCEPLSVGVHACRRAEVGPETNVLVMGAGPIGLVTMLAAQAFSVPRIVIVDVDENRLAVAKQLGADEIVQVTTNLEDVGSEVEQIQKAMGSNIDVTFDCAGFNKTMSTALAATRCGGKVCLVGMGHGIMTVPLTPAAAREVDVVGVFRYKNTWPLCLEFLTSGKIDVKPLITHRFGFSQKEVEDAFETSARGSNAIKVMFNL

SEQ ID NO: 37936 - protein, 970 aa, Ustilago maydis 521
MAARTPAREAAAAKMAMPSSLLKRAALTASDETLLVSALKMLATFDNAKNTVFALVVYRYSTRLLRHVRAYGISESLYQLYCLVSAQVFALILKTPAAKRKVKRELDTAMAEVEAKIVPRPSHLGIHHQLPQLGKETEWIKTELAKLQIMEAGVDAKLVEADWENRDGQMVWKGGKVSGAVYHGGDDLSDLLADTIKQFLVSNPLHPDVFPGVRKMEAEVVSMVLKMYNAPAGAVGATSSGGTESILLSCLAMREWARATKGIKEPELIVSVSAHAAFDKAGQYFGIKVHHIPVDTVTRKVQVARVARAINSNTIGLVGSAPNFPDGIIDDIPNLAKLAKRHKILLHVDCCLGSFLVPFLEKAGFESEPFDFRIDGVTSISCDTHKYGFGPKGLSTILYRSADLRRFQYYVKTDWPGGVYATPTLSGSRPGSLIAGTWAAMMKIGESGYTQSCRDIVGAAKEISTRIEREIPELRVLGRPLVSVVAFASAAPNSVSIYDLITDLKAAVKHARSSFTGQKGSMATLYGLGSGVSATAIVGQLASSRLELQQLRLQDLVGLAQPCTLLCQGVQFLLGVHRLGVLLAEEDADFVAQGCALLHLARQLCAQVLVFELYTLQPILDVVQTCLCGLDEVDHLVPLVQELAHLHPLLLVLEHIRIPLDHFGAIALQLRVHLKQLCARLLELPSERNDACRIFLCLRLELSCLGRPRLALLSLGVLRLVRRAQRAHRVVQILSLRFQRCVGDLFAISKLSSLRSSRFSRCSNDTLVAWLPTLPSTAVRIVVSYDGMADNAVSLDASRAAVVGASAAKWLIASACRDVGDRGDVPLTVWLRDCNDDIEPDRERTRASDTCVAGDTGIEQATCEALELPIAVTIAGVAAAAALAAGSSFESVLLAAMPLAALVGIGVASSNLCAAAAMGWMAEPKSISVHVASLAASPAAPVETSGAPERNDAYVSRISSGFTERGSRCH

SEQ ID NO: 37937 - protein, 264 aa, Haemophilus influenzae Rd KW20
MDKSLKANCIGEFLGTALLIFFGVGCVAALKVAGASFGLWEISIMWGMGVALAVYATAGLSGAHLNPAVTIALWKFACFDGKKVIPYIISQMLGAFFAAALVYALYRNVFIDYETVHNIVRGTQESLSLAGTFSTYPHPSLSIGGAFAVEFVITAILMALIMALTDDGNGVPRGPLAPLLIGILIAVIGGAMGPLTGFAMNPARDFGPKFFAYLAGWGELALTGGREIPYFIVPMVAPVLGALAGAWLYKKAIGGNLPCNCGCE

SEQ ID NO: 37938 - protein, 257 aa, Bacillus cereus G9241
  misc_feature (18)..(18): Xaa can be any naturally occurring amino acid
  unsure (1)..(257): unsure at all Xaa locations
RNKVEICGVDTAKLPVLXNDEMRKLFREMQSGEISAREKLVNGNLRLVLSVIQRFNNRGEYVDDLFQVGCIGLMKSIDNFDLGQNVKFSTYAVPMIIGEIRRYLRDNNPIRVSRSLRDIAYKALQVREKLIAENSKEPTAMDIAKVLEVTHEEIVFALDAIQDPVSLFEPIYNDGGDPIFVMDQLSDEKQKDEQWVEELALKEGMKRLNDREKMIIRKRFFQGKTQMEVAEEIGISQAQVSRLEKSAIKQMNKTIQG

SEQ ID NO: 37939 - protein, 453 aa, Mycoplasma pulmonis UAB CTIP
MHDQNKKKMLDISNHLKNFGFIFQGSEIYGGLANTWDYGPVGFLLKQKIEEFWRKFFILKQDNSVEIDSKILMNPNVWKASGHVSNFSDPLIENKVNGKRYRADKIIEENFPEVNVQSMSEKEIHAFIVEHVKEYENSKTSWSEIRKFQLMFQTSQGVVEDSKNLVYLRPETAQGIFINFKNILRSTRAKLPLAVGQVGKSFRNEVTPGNFIFRTREFEQMELEVFCLPEEAEEIYQKYINLCWEFLLELGINKNSIRKRIHQKEELAHYSKGTCDYEFNFPFGWGELLGIANRGDFDLKNHSHFSQEDLSYLNPLDNQRIIPYVIEPSIGLDRLMLALLCDAYHEESVENETRVVLKLDKKIAPYRFAVLPLVKKLSEKAKELYKNLVDLNLMVSYDESGSIGKRYRRQDAIGTYECITIDYQSLEDDSFTIRNRDSMEQKRLSFEELKGLL

SEQ ID NO: 37940 - protein, 427 aa, Arabidopsis thaliana
MDALTSSLVRSPIVPSRTSDNGSGSMFLTASGPGFTRSGSSRLQLRLRVCPKSLQNASARSSRSLQSLTTTAKTRRSFVVRASSASNDASSGSSPKPIAPLQLQSPAGQFLSQILVSHPHLVPAAVEQQLEQLQTDRDSQGQNKDSASVPGTDIVLYRRIAELKENERRRTLEEILYALVVQKFMEANVSLVPSVSPSSDPSGRVDTWPTKVEKLERLHSPEMYEMIHNHLALILESRMGDLNSVAQISKLRVGQVYAASVMYGYFLKRVDQRFQLEKTMKILPGGSDESQTSVEQAEGTATYQAAVSSHPEVGAFAGGVSAKGFGSEIKPSRLRSYVMSFDAETLQRYATIRSREAVGIIEKHTEALFGKPEIVITPEGTVDSSKDEQIKISFGGMKRLVLEAVTFGSFLWDVESHVDARYHFVLN

SEQ ID NO: 37941 - protein, 461 aa, Mycoplasma pulmonis UAB CTIP
MKKNKKSWKEWFCKEGVKMTKNSSSSYNQIINDISKIMKKRKVKTLSQSEIFELLDSEGLFIDEDSSDEFLDVLKEKKILLDEVDPDDLVEVSGDTIENELDDEVDIKKLKSIKKEMLNDDLFNDDDLNDDGDEDFESNIFDDDEIKEYSSKSLQDKNISKLSGEKLKSKLIETNDIVKWYMRWIGKYGTLLTAAEEKQLAIDMKKGGLKGKIAKDKLINRNLRLVINNAKKYKNRGLSFIDLISEGNAGIIKAVQKFDESKGFKFSTYATWWIRQSITRAVADQARTIRIPVHMVETINKIIKIERELQQELGVNPTDEQIAERYGNDYDAKKVRYIRKMNIDPISLDKTVGKENDSFFSDFVKDESVISPIDHAAKEDLNEHLLELLNEQLTEEERVLIMKRYGIGEDENGVPYQVHTFDQLATEKNTSKEKIRQWENKILRRLKATKKRKILKEYLVK

SEQ ID NO: 37942 - protein, 302 aa, Thermus thermophilus
  misc_feature (1)..(1): Xaa can be any naturally occurring amino acid
  misc_feature (44)..(44): Xaa can be any naturally occurring amino acid
  misc_feature (61)..(61): Xaa can be any naturally occurring amino acid
  misc_feature (149)..(149): Xaa can be any naturally occurring amino acid
  misc_feature (233)..(233): Xaa can be any naturally occurring amino acid
  unsure (1)..(302): unsure at all Xaa locations
XKAWVLKRLGGPLELVDLPEPEAEEGEVVLRVEAVGLNFADHLXRLGAYLTRLHPPFIPGXEVVGVVEGRRYAALVPQGGLAERVAVPKGALLPLPEGLSPEEAAAFPVSFLTAYLALKRAQARPGEKVLVQAAAGALGTAAVQVARAXGLRVLAAASRPEKLALPLALGAEEAATYAEVPERAKAWGGLDLVLEVRGKEVEESLGLLAHGGRLVYIGAAEGEVAPIPPLRLXRRNLAVLGFWLTPLLREGALVEEALGFLLPRLGRELRPVVGPVFPFAEAEAAFRALLDRGHTGKVVVRL

SEQ ID NO: 37943 - protein, 186 aa, Triticum aestivum
GLNALGVETDKGGRILVDKRFMTNVKGVYAIGDAIPGPMLAHKAEEDGVACVEFIAGKEGHVDYDTVPGVVYTHPEVASVGKTEEQVKASGVAYQVGKFPLLANSRAKAIDDAEGLVKVVAEKETDRILGVHIMAPNAGEIIHEAVLALQYGASSEDIARTCHAHPTVSEALKEACLQTYLKAIHI

SEQ ID NO: 37944 - protein, 93 aa, Glycine max
  misc_feature (12)..(12): Xaa can be any naturally occurring amino acid
  misc_feature (18)..(18): Xaa can be any naturally occurring amino acid
  unsure (1)..(93): unsure at all Xaa locations
GQGGAGRAFLSXGMGFCXNITLFYRTDYPLVHYAVMFGLSTCFAICLRSSHTGNDDYVLEFFLPPRITHIHEQKTLLGSILAIMTQHFQSLHI

SEQ ID NO: 37945 - protein, 870 aa, Oryza sativa (japonica cultivar-group)
MDLAINPFSSGTRLRDMIRAIRACKTAAEERAVVRRECAAIRAAISEGDQDYRHRNMAKLMFIHMLGYPTHFGQMECLKLIAAAGFPEKRIGYLGLMLLLDERQEVLMLVTNSLKQDLNHSNQFIVGLALCALGNICSAEMARDLSPEVERLLQSREPNTKKKAALCSIRIVRKVPDLAENFMGSAVSLLKEKHHGVLISAVQLCAELCKASKEALEYLRKNCLDGLVRILRDVSNSSYAPEYDIAGITDPFLHIRVLKLMRILGQGDADCSEFVNDILAQVATKTESNKNAGNAILYECVETIMGIEATSGLRVLAINILGRFLSNRDNNIRYVALNMLMKAMEVDTQAVQRHRATILECVKDADVSIRKRALELVYLLVNDANAKSLTKELVDYLEVSDQDFKDDLTAKICSIVEKFSQDKLWYLDQMFKVLSLAGNYVKDDVWHALIVLISNASELQGYSVRSLYKALLACGEQESLVRVAVWCIGEYGEMLVNNVGMLDIEEPITVTESDAVDAVEVSLKRYSADVTTRAMCLVSLLKLSSRFPPTSERIKEIVAQNKGNTVLELQQRSIEFNSIIQRHQSIKSSLLERMPVIDEASYLAKRAASTQATISSDKLAAAATPGSSLKLPNGVAKPPPAPLADLLDLSSDDAPATTSAPTTAPNDFLQDLLGIGLTDTSTAGGAPSASTDILMDLLSIGSSPVQNGPPTVSNFSLPGQAETKVAPVTPQVVDLLDGLSSSTSLSDENTAYPPITAFQSAALKITFNFKKQSGKPQETTIHASFTNLTSNTFTDFIFQAAVPKFIQLRLDPASSNTLPASGNDSVTQSLSVTNNQHGQKPLAMRIRITYKVNGEDRLEQGQINNFPAGL

SEQ ID NO: 37946 - protein, 940 aa, Streptococcus thermophilus LMG 18311
MAFNKLESSNNQEIISEEVGILKELLDDATRGMAGEQGLTTIQHLVELYDEGDYEALTQAISEMTNDDMVVASRYFSLLPLLINISEDVDLAYEVNRKNNIDESYLGKLSETFDVVAESDNARDILENVNVVPVLTAHPTQVQRKTMLELTNHIHELLRKHRDVKDGLINKDKWYADLRRYVEIMMKTDIIREKKLKVKNEITNVMEYYNSSLIKAITKLSHEFKRLAVEKGIELDNPTPITMGMWIGGDRDGNPFVTAETLKLSATLQSEVILNYYIEKVDNLYRSFSLSSRLTEVSETVAEMAKLSPDTSVYRENEPYRRAFSYIQSKLIQTLLFFKAGNFSKERAAKRLSENVRLGSVSTGEVVADFVHDRLSQSLQAVSQQTTEFYETAEAFHDDLLAIKNSLLENDDSVLISGDFEELLQAVEVFGFYLATIDMRQDSSVHEACVAELLKSANIVDNYSELTEVEKVAVLLKELQEDPRTLSSTNVSKSETLEKELAIFRTARLLKDYLGEEVIKQHIISHTESVSDMFELAILLKEVGLVDTERARVQIVPLFETIEDLENSNEIMKQYLGYDIVKRWIKNSNNYQEIMLGYSDSNKDGGYLSSGWTLYKAQNELTNIGEERGIKITFFHGRGGTVGRGGGPSYDAITSQPFGTIKDRIRLTEQGEVIGNKYGNKDAAYYNLEMLVSATLDRMVTRQITDPDELVDFREIMDSIVQDSNRIYRDLVFGNEHFYDYFFEASPIKEVSSLNIGSRPAARKTITDISGLRAIPWVFSWSQNRIMLPGWYGVGSAFNHYIEAEEGNLEKLQHMFETWPFFRSLLSNVDMVLSKSDMNIAFHYAQLAESEEVRSVFNIILDEWQLTKNVILAIEKHDDFLEESPSLKASLGFRLPYFNVLNYIQIELIKRLRNNNLTDDEISLIHITINGIATGLRNSG

SEQ ID NO: 37947 - protein, 154 aa, Triticum aestivum
KASVTSAEVSQDGRFITTADGSSVKFWDANHFGLVKSYDMPCNVESASLEPKSGSKFVAGGEDLWVHVFDFFTGEEIACNKGHHGPVHCVRFAPGGESYASGSEDGTIRIWQLSPANSDDNEAANANGKTTAGVNEVTTKIEGFHIPKEGQTEG

SEQ ID NO: 37948 - protein, 488 aa, Streptomyces coelicolor
MPENNQKPLTTVAGPPVPDNQNSLTSGPRRPMLLQDVWFLEKLAHFDREVIPERRMHAKGSGLFGTFTVTHDITRYTSAKIFSEIGKKTPLFTRFSTVAGERGAADAERDIRGFAVKFYTDEGNWDLVGNNTPVFFFRDPLKFPDLNHAVKRDPRTNLRNAENNWDFWTNLPEALHQVTIVMSDRGIPASYRHMHGFGSHTYSLINAEGERFWVKFHHRTQQGIKNLTDAEAEALVGKDRESHQRDLFDAIEDGDFPKWKLFIQVMPEADAENYRFHPFDLTKVWSKKDYPLIEVGEWELNRNPDNYFADVEQAAFSPANVVPGIEASPDRMLQGRLFSYGDAQRYRLGVNHHHQIPVNAPKNPVNSYHRDPAMRVDGNQGATPGIEPNSYGRWQEQPAYRDPAQAVGAVADRFNYREDDDNYFEQPGNLFRQMSPEQQQVLFENTARAIDGASAQTIERHIGNCTQADPAYGAGVRKAIEALAAGNL

SEQ ID NO: 37949 - protein, 437 aa, Nepenthes gracilis
MASSLYSFLLALSIVYIFVAPTHSTSRTALNHRHEAKVTGFQIMLEHVDSGKNLTKFQLLERAIERGSRRLQRLEAMLNGPSGVETSVYAGDGEYLMNLSIGTPAQPFSAIMDTGSDLIWTQCQPCTQCFNQSTPIFNPQGSSSFSTLPCSSQLCQALSSPTCSNNFCQYTYGYGDGSETQGSMGTETLTFGSVSIPNITFGCGENNQGFGQGNGAGLVGMGRGPLSLPSQLDVTKFSYCMTPIGSSTPSNLLLGSLANSVTAGSPNTTLIQSSQIPTFYYITLNGLSVGSTRLPIDPSAFALNSNNGTGGIIIDSGTTLTYFVNNAYQSVRQEFISQINLPVVNGSSSGFDLCFQTPSDPSNLQIPTFVMHFDGGDLELPSENYFISPSNGLICLAMGSSSQGMSIFGNIQQQNMLVVYDTGNSVVSFASAQCGAS

SEQ ID NO: 37950 - protein, 362 aa, Hordeum vulgare
MAHARVLLLALAVLATAAVAVASSSSFADSNPIRPVTDRAASTLESAVLGALGRTRHALRFARFAVRYGKSYESAAEVRRRFRIFSESLEEVRSTNRKGLPYRLGINRFSDMSWEEFQATRLGAAQTCSATLAGNHLMRDAAALPETKDWREDGIVSPVKNQAHCGSCWTFSTTGALEAAYTQATGKNISLSEQQLVDCAGGFNNFGCNGGLPSQAFEYIKYNGGIDTEESYPYKGVNGVCHYKAENAAVQVLDSVNITLNAEDELKNAVGLVRPVSVAFQVIDGFRQYKSGVYTSDHCGTTPDDVNHAVLAVGYGVENGVPYWLIKNSWGADWGDNGYFKMEMGKNMCAIATCASYPVVAA

SEQ ID NO: 37951 - protein, 561 aa, Arabidopsis thaliana
MLQNQHKTTKNQRNKNIGTKYFLRKKIMGFCFSKFGKSQTHEIPISSSSDSSPPHHYQPLPKPTVSQGQTSNPTSNPQPKPKPAPPPPPSTSSGSQIGPILNRPMIDLSALYDLHKELGRGQFGITYKCTDKSNGREYACKSISKRKLIRRKDIEDVRREVMILQHLTGQPNIVEFRGAYEDKDNLHLVMELCSGGELFDRIIKKGSYSEKEAANIFRQIVNVVHVCHFMGVVHRDLKPENFLLVSNEEDSPIKATDFGLSVFIEEGKVYRDIVGSAYYVAPEVLHRNYGKEIDVWSAGVMLYILLSGVPPFWGETEKTIFEAILEGKLDLETSPWPTISESAKDLIRKMLIRDPKKRITAAEALEHPWMTDTKISDKPINSAVLVRMKQFRAMNKLKKLALKVIAENLSEEEIKGLKQTFKNMDTDESGTITFDELRNGLHRLGSKLTESEIKQLMEAADVDKSGTIDYIEFVTATMHRHRLEKEENLIEAFKYFDKDRSGFITRDELKHSMTEYGMGDDATIDEVINDVDTDNDGRINYEEFVAMMRKGTTDSDPKLIR

SEQ ID NO: 37952 - protein, 391 aa, Lycopersicon esculentum
MALSTSRAINHIMKPLSRAVCATRRLSSDSTATITVETSLPFTSHNVDPPSRSVETSPMELMTFFKDMTEMRRMEIAADSLYKAKLIRGFCHLYDGQEAVAVGMEAAITKKDCIITAYRDHCIFLGRGGTLVESFAELMGRRDGCSRGKGGSMHFYKKESGFYGGHGIVGAQVPLGIGLAFAQKYKKEDYVTFAMYGDGAANQGQLFEALNMAALWDLPAILVCENNHYGMGTAEWRAAKSPAYYKRGDYVPGLRVDGMDVFAVKQACAFAKQHALKNGPIILEMDTYRYHGHSMSDPGSTYRTRDEISGVRQERDPVERIRSLILAHNIATEAELKDIEKENRKVVDEAIRKAKESPMPDPSELFTNVYVKGFGVEAYGADRKELRATLP

SEQ ID NO: 37953 - protein, 230 aa, Triticum aestivum
  misc_feature (17)..(17): Xaa can be any naturally occurring amino acid
  misc_feature (191)..(191): Xaa can be any naturally occurring amino acid
  unsure (1)..(230): unsure at all Xaa locations
MQIFVRPSPARPIPLEXGLSDTIDNVKAKIQDKEGIPPDQQRLIFAGKQLENARTLADYNIQKESTLHLVLRLRGGMQIFVKTLTGKTITLEVESSDTIDNVKAKIQDKEGIPPDQQRLIFAGKQLEDGRTLADYNIQKESTLHLVLRLRGGMQIFVKTLTGKTITLEVESSDTIDNVKAKIQDKEGIPPXDQQRLIFAGKQLEDGRTLADYNIQKESTLHLVLRLRGGQ

SEQ ID NO: 37954 - protein, 181 aa, Gemmata sp. Wa1-1
MCGRGPNRSPLRRTNRAMGPYRSARTAHGSSPRAWTVRQRCGTPKPEPNCLPLKGHTKWVTSVAFSANGSWIVTGSLDNTAKIWDAKTGTEVRTLNGYTGIVNAASFSPDGKRIVTGSADHMVKLWDITTGVEVLTLKGHTGAVTSVSFSLDGSQIVSTSWDGTTKVWDSRPFRDSRPNPR

SEQ ID NO: 37955 - protein, 120 aa, Bacillus anthracis str. A2012
MTYDYPNQPLPLPDRFRGIQKFYPEKCIVCNQCSNICPTDCIQLTGKKHPDPTKKGKIIDTYDINFEICILCDLCTEVCPTEAIVMTNNFELAEYSRDDLFKNLQWLDENDENVRKENKA

SEQ ID NO: 37956 - protein, 338 aa, Vibrio parahaemolyticus RIMD 2210633
MKVLVTGGMGYIGSHTCIQMIEAGMTPVILDNLYNSKSTVLERIEKVRGVKPTFIEADIRDKAALVEALKVHNIEAVIHFAGLKAVGESVEKPLEYYDNNVNGTLVLVDAMREAGVKSLVFSSSATVYGDPASVPITEDFPTSATNPYGRSKLMVEECLTDFQKANPDWSITLLRYFNPVGSHPTGELGEDPQGIPNNLMPFISQVAVGRREFLSVFGSDYPTKDGTGVRDYIHVMDLSDGHVAALEKVGSKAGLHIYNLGTGNGYSVLEMVKAFESACGKNVPYQLVERRPGDIAECWADPSKAMNELGWKASRTLEEMTGDTWRWQSNNPQGYPDA

SEQ ID NO: 37957 - protein, 442 aa, Streptomyces spectabilis
MSTTAMPASTHHTIALEQSHRLPGGQSMTDLSGLVVDRARNAEVWDKDGKRYIDFFTGVGVCNIGHSHPRFLAEVGEQLSACAVGTFYTDARSRYYELLAAQLPERLGRIHMFSTGSEAVEAAVKLARAATGKHEVVSFWGGFHGKTQGALSLHGGPRKHRSGPFPPGSHQVPYAYCYRCPLQLEHSTCGQRCVDLAEQSIENGSVGDIAAIIVEPVQGTNGNIIPPAGYLRAVRRLADRHGALLILDEVITGFGRTGSLFAFEQDPEVRPDVVVLGKAMASGVPASAIVSRAELVEGTSFGQPSAAASTFGGNPLASAAALATLRILLDERLPERSRLLGETVARRLASWKEEFPFVGNAANVGLMVGVELVEPGTRRPLPKDVTRRIFQGLLAEGVLAMAYDSRIRIYPPLSIPADHLDEGLTAFESVFRSLRSLRSTQT

SEQ ID NO: 37958 - protein, 159 aa, Streptococcus thermophilus
MASKRLRHVLKVFSSVGLLSYREKHLPQDQQTTPVKLRQAFEQLGPSFVKIGQILSTRSDLLSEAYIRELSKLQSSVPPLNKEEVMTAIRQELPTDLSEVFVDFSKEPLASGSVAQTHRARLLSGQEVIIKIQRPGIDDIVNEDIQLLIKLARHIPKYF

SEQ ID NO: 37959 - protein, 129 aa, Triticum aestivum
MQEFQPIPGLAGRLFGGAADRPAGLLRHGGAPEEVRCPRCDSANTKFCYYNNYNLSQPRHFCKGCRRYWTKGGLLRNVPVGGGCRKPKRKAAAASSSDVDKDPSGANSEAKNARSSCSAGSSSLTSGAS

SEQ ID NO: 37960 - protein, 211 aa, Glycine max
MSKLQSDALREAISGIMADSKEKNRKFVETIELQIGLKNYDPQKDKRFSGSVKLPHIPRPKMKICMLGDAQHVEEAEKIGLDWMDVEALKKLNKNKKLVKKLAKKYHAFLASEAVIKQIPRLLGPGKFPTLVTHQETLESKVNESKAMVKFQLKKVLCMGVAVGNVSMEEKQIFQNVQLSVNFLVSLLKKNWQNVRCLYLKSTMGKSYRVF

SEQ ID NO: 37961 - protein, 597 aa, Arabidopsis thaliana
MKYVVVSGGVVSGLGKGVTASSIGLILKSCGFRVTAIKIDPYLNIDAGTMSPIEHGEVYVLDDGGEVDLDLGNYERFMDIKLTSENNITTGKVYKHVLEKERRGDYLGKTVQVVPHITDAIQKWIERAARIPVDGQSGPADVCVIELGGTIGDIESMPFIEALGQFSYRVGTDNFCLIHVSLVPVLNVVGEQKTKPTQHSVRDLRGLGLSPNILACRSTKPLEDNVKAKLSQFCHVPMENVVTLYDCPNIWHIPLLLKEQKAHEAIFRVLNLEGVAKEPALEEWSLMAKMTDKLHVPVRIAVVGKYTELLDSYLSIHKALLHASVARRKKLIIDWISASDLEQGAKKENPDAYKAAWKLLKGADGVLVPGGFGSRGVEGKMLAAKYARENRIPYLGICLGMQLAVIEYARTILGLADANSTELDPNTKNPCVIFMPEGSKTHMGGTMRLGSRRTYFHSKDSKSARLYGNKSFVDERHRHRYEVNPAMVPRFESSGLTFTGKDETGQRMEIIELPNHPFYVGAQFHPEYKSRPGKPSPLFLGLIGAASGELDTVLLQSYQETVVPRSLPNGKLERVYWKGAAKKPVSVVYSLCDRVYS

SEQ ID NO: 37962 - protein, 564 aa, Synechococcus elongatus PCC 7942
MLESIAVPTATGTERWKSMTKFIFVTGGVVSSIGKGIVAASLGRLLKSRGYSVSILKLDPYINVDPGTMSPYQHGEVFVTADGAETDLDLGHYERFTDTPMSRLNSVTTGSIYQAVINKERRGDYNGGTVQVIPHITAEIRDRIHRVAQDTHPDVVITEIGGTVGDIESLPFLEAIRQFRKDVGRRDLAYIHVTLVPWIPSAGEMKTKPTQHSVKELRSIGIQPDILVCRCDRPLQAGMKEKMSEFCNVSPEAVITSQDASSIYEVPLMLEREGLAEQVLDILQLEQRQPDLTQWQRWVHQLQNPSRRVEVVIVGKYVRLNDAYLSVSESLRHAAASADADLQLRWVDAEDLENGDPATYLDGVDGIVVPGGFGARGVDGKVAAIQFARDHQIPFLGLCLGMQAAVIDWARNVAGLDGANSAEFDPETPHPVIALLPEQQDVVDLGGTMRLGLCPCKIQSGSLAQRLYGEDIIYERHRHRYEFNNAYRSLFLESGYCVSGTSPDSHLVEIVERPDHPFFIACQFHPEFVSRPNHPHPLFQGLIKAALGSDLTLVDPAPLPAETV

SEQ ID NO: 37963 - protein, 232 aa, Triticum aestivum
  misc_feature (57)..(57): Xaa can be any naturally occurring amino acid
  misc_feature (182)..(182): Xaa can be any naturally occurring amino acid
  misc_feature (199)..(199): Xaa can be any naturally occurring amino acid
  misc_feature (223)..(223): Xaa can be any naturally occurring amino acid
  unsure (1)..(232): unsure at all Xaa locations
MQIFVKTLTGKTITLEVESSDTIDNVKAKIQDKEGIPPDQQRLIFAGKQLEDGRTLXDYNIQKESTLHLVLRLRGGMQIFVKTLTGKTITLEVESSDTIDNVKAKIQDKEGMPPDQQRLIFAGKQLEDGRTLADYNIQESTLHLVLRLRGGMQIFVKTLTGKTITLEVESSDTIDNVRAKIXDKEGMPPDQQRLIFAGXQLEDGRTLADYNIQKECTLPLFLXLCGGMQILS

SEQ ID NO: 37964 - protein, 727 aa, Nocardioides sp. JS614
MGVLGLLVVGDGGPVADGAGARYRARGGEQSLRECGLARSCRAHEHHVADPVRAARRQILTRCSPVSAALFCHDRSSCHGSRCWDLGPTQLLIGPGNKGCWSRFASLTLVAPCLGWWVVSPCSRRSGTPSVKARRHPYSGSAWSTLKYDVPWPAPARSTAHLQGRTRGPRHAGAPAPPPGRHGARGCSGPPRQRVNPSLHGVSKGFLPTTRCSLRSRRIQGDTLPSACQRFHPRSRGARLGSMNGLDLLGPTQRGLLIGGTWRDAEGGKRLDVIDPADGSVLTDVADGSVADAVDALDAAVAAQADWAATPPRQRGELLRTAFELIIERSEQFAHLMSLEMGKTVAEAAGEVTYGAEFFRWYAEEAVRIHGRWMQAPGGGSRLLTIKKPVGPCLFITPWNFPLAMGTRKIGPAVAAGCTMVVKPASQTPLSMLALAAVLEEAGLPAGVLNVVTTSHTGEFSETLQADDRLRKVSFTGSTGVGRVLVRQSADRLQRVSMELGGNAPFLVFEDADVDAAVDGAMVAKMRNMGEACTAANRFLVHASVADDFAEKLGKRMGALSLGRGQDDGVDVGPLIDERAVESVSQLVTDAVHDGATVVTGGRPVDGPGYFYPPTVLLGVPADSEINVQEIFGPVAPITTFDSEADAIRMANDTEYGLASYVYTRDLARTIRLAEALEFGMVGVNTGLISNPAAPFGGVKSSGFGREGGFEGIEEYLETTYVALPAG

SEQ ID NO: 37965 - protein, 422 aa, Pasteurella multocida subsp. multocida str. Pm70
MSITLEQLIQWRREFHRFPEIGWSEFWTTSRIADYLEEMGFDILLGDKIINPEFVRGRQQAVVEAGLAKAIAYGAKAKWLDQMKGYTGCVAVLDTGKPGKTVALRFDIDCVNVSETTHPEHIPNQYGFASLNDGFMHACGHDAHITIGLGTAKWLAENKDKLRGKIKIVFQPAEEGVRGAAAIAASGIIDDADYFASSHISFCADTGTVISNPRNFLSTTKIDIRYQGKPAHAGAAPHLGHNALLAAAHTVTQLHGIARHGEGMTRINVGVLNAGEGRNVIPATAQLQLEVRGENKAINEYMVAQVMQMAKGIAIGFDVSYETEIMGEAVDMVNDEELIQLVENIALQQADIKQVNADYAFNASEDATILGRRVQEQGGKAIYFILGADRTAGHHQAEFDFDETQLLTGVNIYTALLQHLLA

SEQ ID NO: 37966 - protein, 282 aa, Chromobacterium violaceum ATCC 12472
MIANRPQHEKWAVIVNEFGEVGIDGAALLNDELAVAEIAGGCLCCVAGPQMTATVATLLRREKPDRLLIEASGLAHAAGVIDELRAKPLGEALEVAAVLTLVDPRQFIQPDYHRQPLYRDQISIADVLVANKIDTADIPTMEAFRAQAAALFPPKSLVGEVRDGQLDVAWLDAELAAKPRYRPAVLPDNASAWQSAGWTFDPELNFDGERLTRLFDGLPAKVPGLVRAKGVFRVLDSWVWLNWAAGQWGAAQVSWRRDSRFELIAPEFDAAAVEAWLKECLE

SEQ ID NO: 37967 - protein, 267 aa, Pseudomonas fluorescens PfO-1
MSVPAFGLGTFRLQGQVVIDSVSTALELGYRVIDTAQIYENEADVGEAIAASGIARDKLFITSKIWIANFAKDRLIESLKASLQKLQTDYLDLTLIHWPSPEDQVPVEEFMGALLEAKRLGLTRQIGVSNFTIDLMKQAIAAVGAENIATNQIELHPYLQNRKVVEFAQSQGIQITSYMTLAYGEVLKDPLIVQIAERLQATPAQVTLAWAMQSGYAVIPSSTKRANLQGNLGAMALTLSDADMALIATLDRGHRLTSPKGIAPQWD

SEQ ID NO: 37968 - protein, 257 aa, Dianthus plumarius
GVFHIATPMDFESKDPENEMIKPTINGMLDILKSCVKAKVRRVVFTSSGGTVNVEATQKPVYDETCWSDLDFIRSVKMTGWMYFVSKILAEQAAWKYAAENNLDFISIIPPLVVGPFIMPSMPPSLITALSPITRTESHYTIIKQGQYVHLDDLCMSHIFLYENPKANGRYIASACAATIYDIAKMLREEYPEYNVPTKFKDYKEDMGQVQFSSKKLTDLGFEFKYGLKDMYTEAVETCRAKGLLPLSLEHHENGSA

SEQ ID NO: 37969 - protein, 300 aa, Arabidopsis thaliana
MESPESFSTMFMKPIRHILSEKKSRKIALFLLINTAYMVVEFVAGFMSNSLGLISDACHMLFDCAALAIGLYASYISRLPANHQYNYGRGRFEVLSGYVNAVFLVLVGALIVLESIERILDPQEISTNSLLVVSVGGLLVNIVGLIFFHEEHHHAHGGSGIFLHVLADTMGSVGVVISTLLIKYKGWLVADPASSIFISILIIASVIPLLRNSAEILLQRVPRAHRQDLKEAMRNILKTKGVCSIQRLHVWSFTNSDVVATLHLLVSADSDKTDTKLQVSRLLEDAGVKDWTLQVESVNS

SEQ ID NO: 37970 - protein, 506 aa, Pseudomonas fluorescens PfO-1
MKTPHVSHQRPEDENLGVGANMAYGLQHVLTMYGGIVAVPLIIGQAAGLSPADIGLLIAASLFAGGLATLLQTLGLPFFGCQLPLVQGVSFSGVATMVAIVSSGGEGGFQSVLGAVIAASLIGLLITPVFSRITKFFPPLVTGIVITTIGLTLMPVAARWAMGGNSHAPDFGSMQNIGLAAVTLVLVLLLSKVGSSTISRLSILLAMVIGTVLAVFLGMADFSSVTQGPMFGFPTPFHFGMPTFHFAAILSMCIVVMVTLVETSADILAVGEIIGTKVDSKRLGNGLRADMLSSMFAPIFGSFTQSAFAQNVGLVAVTGIKSRYVVATGGIFLVILGLLPFMGRVIAAVPTSVLGGAGIVLFGTVAASGIRTLSKVDYRNNVNLIIVATSIGFGMIPIAAPNFYDHFPSWFATIFHSGISSSAIMAILLNLAFNHFTAGNSDQQSVFAAAEERTLRYRDLAALREGDYFSDGKLHDCDGNEVPVIDPDADHGHGAPKVHAKSSEHV

SEQ ID NO: 37971 - protein, 363 aa, Prunus persica
MESTDSSTASQQQQQQQPQPPPQPNLPPGFRFHPTDEELVVHYLKKKVTSAPLPVAIIAEIELYKFDPWELPAKATFGEQEWYFFSPRDRKYPNGARPNRAATSGYWKATGTDKPVLTSGGTQKVGVKKALVFYGGKPPKGIKTNWIMHEYRLADSKTSNKPPGCDLGNKKNSLRLDDWVLCRIYKKNNSHRPMDLEREDSMEDMMGPLMPPSISHVGHHQNMNLHLPKSNTNYGPPFIENDQIIFDGIMSSTDGSASLSNGTSQLPLKRSIVPSLYRNDQEDDQTAGASSSKRVVQLHQLDSGTNNSVAANNNSTSIANLLSQLPQTPPLHQHAMLGSLGDGLFRTPYQLPGMNWFSESNLG

SEQ ID NO: 37972 - protein, 195 aa, Gossypium hirsutum
MSASRFIKCVTVGDGAVGKTCLLISYTSNTFPTDYVPTVFDNFSANVVVDGSTVNLGLWDTAGQEDYNRLRPLSYRGADVFILAFSLISKASYENVAKKWIPELKHYAPGVPIVLVGTKLDLRDDQQFLTDHPNAVPISTAQGEELKKQIAAPAYIECSSKTQQNVKAVFDAAIKVVLQPPNKNKKKKSGGCSIL

SEQ ID NO: 37973 - protein, 211 aa, Gossypium hirsutum
MASSASRFIKCVTVGDGAVGKTCMLICYTSNKFPTDYIPTVFDNFSANVVVEGTTVNLGLWDTAGQEDYNRLRPLSYRGADVFVLAFSLVSRASHENVLKKWIPELQHYAPGVPVVLVGTKLDLREDKHYLADHPGLLPVSTAQGEELRKQIGAAYYIECSSKTQQNVKAVFDDAIKVVIKPPQKQKEKKKKPSRGCLINVFCGRNFVPAK

SEQ ID NO: 37974 - protein, 198 aa, Oryza sativa
  misc_feature (9)..(9): Xaa can be any naturally occurring amino acid
  unsure (1)..(198): unsure at all Xaa locations
QQGSYPIKXFYTSNMPIILHSALITNLYFISQLLYRRYSGNFLVNLLGKWKESEYSGHSVPVGGLAYYVTAPSSLADVLANPFHALFYVVFMLSACALFSKTWIEVSGSSAKDVAKQLKEQQMVMPGHRESNLQKELNRYIPTAAAFGGVCIGALTVLADFMGAIGSGTGILLAVTIIYQYFETFEKERATELGFFGF

SEQ ID NO: 37975 - protein, 279 aa, Brucella suis 1330
MTTRIDTKFAELKAEGRPALVTYFMGGDPDLETALKVMKALPKAGADVIELGMPFSDPMADGPAIQAAGLRALNAGQTLAKTLYMAAEFRKEDDTTPIVMMGYYNPIYVYGVERFLTDAKASGVDGLIVVDLPSEMDAELCIPAMKAGINFIRLTTPTTDDKRLPKVLHNSSGFVYYVSMNGITGAAIADTAKVGEAVRHIKKSTDLPICVGFGVKTPEQAAAIATHADGVVVGTAIVNAIAGELDEKGKVKGDPVAAATRLVHALAESVRATRLEAAQ

SEQ ID NO: 37976 - protein, 515 aa, Yarrowia lipolytica CLIB122
MKLSTLVLAALTAVAVADDYKSISCDVDNHCPEDKPCCSQYGECGTGAYCLGGCDPKSSFELKSCMPMPVCKKRQSKFTSMDRIAKNTEYLGDAENFDWVYTGNLIQQNNGLLLTMPKNSVGTVLSSTDYMWYGKVSATFKSSHLQGVVSAFILFSDVKDEIDYEFVGADVNTVQTNYYWQGVLDWTHGINISVDNTHENFFTYSIDWTPDQITWAVDDQPGRVLKKSDTWDEKTKSYMYPQTPSRIQLSLWPAGQASNAEGTIAWAGGEIDWDAEDIQKYGYYYATVTEIDVDCYDPPASAKKSGDKSYRYTDLNAMEADVEITGDDTVLASFDATGADPEKDDGSKNGTAPTGMMQHPDNDPNIANVTGGVAASTKKTTSVASSTESLEDVSGSAIKKSTSSKESTSSDADPTEVVSGERVSSKETSSASASSGNNNGGNNNNGGNSGSAAATGSSSRNPQGNAATASNTGNGGFQQFGQASGSAAEKANTAGSNGMSSLLLAGALAAASLLM

SEQ ID NO: 37977 - protein, 151 aa, Zea mays
MSSSSLSPTAGRTSGSDGDSAADTHRREKRRLSNRESARRSRLRKQQHLDELVQEVARLQADNARVAARARDIASQYTRVEQENTVLRARAAELGDRLRSVNEVLRLVEEFSGVAMDIQEEMPADDPLLRPWQLPYPAAAMPMGAPHMLHY

SEQ ID NO: 37978 - protein, 218 aa, Mesorhizobium loti MAFF303099
MKFFVDTADIKDIRELNDLGLLDGVTTNPSLILKSGGKIADVTKQICDIVQGPVSAEVVATEYKDMMAEAEVLAKIAPNVCIKVPLTLDGLKACKTIRTQMNRMVNVTLCFSANQALLAAKAGASFISPFVGRIDDTGSDGMELIQEIRQIYDNYDYQTEILTASVRTVNHVKQAALIGADVITAPPATLKALVNHPLTDKGLAAFLADWAKTGQKIG

SEQ ID NO: 37979 - protein, 101 aa, Brassica napus
MASSILMSFAPATVRCFATGAKGTTNTTTTKEEKSIIDFVLGSLTKQDQFYETDPLLKKVDDKEGTTGGNGGRKTVSGGKNSLAVPQKKNGGGFGGLFAKK

SEQ ID NO: 37980 - protein, 691 aa, Ashbya gossypii ATCC 10895
MERNTVQRSGTMQTGGSSSASKNYSNINANLHARVKAFQEQRKLQRSGSVGSKSSGQSQDSAAIQHIVNKPLPPLPPGKGKEAAPPLRRQGSMLKADSRPRSMSSFTGSPPAVGASIADAEPVASAERPAPVLQANVGQEADSMPVQQSIPLKAAAVPGRQPHQKTHSASDIFQRTSSHVLPQIPIPLNPIRKAPRPPDAGMGHQRGRQGSHSGIVLGPQSGAGGTGSASDAPKHIMTKSKPSLSARRGLKLPSGGISLKMKQPLQEFASQPSNKDTALATSGVVPGHRVSKSNPGSLTNGIQTTSTSSDKQVDTKGTEPSKSGNSGTNSNGGLFAVFSKYVDIKSGSLNFAGKLSLSSQGVDFSNGSSFRITLDELEFLEELGHGNYGTVSKVLHKPTNIMMAMKEVRLELDESKFRQILMELEVLHKCQSPYIVDFYGAFFIEGAVYMCMEFMDGGSLDKSYDPHEIGGIEEPQLALITESVIRGLKELKDVHNIIHRDVKPTNILCSATQGTVKLCDFGVSGNLVASLARTNIGCQSYMAPERIKSLNPDKATYSVQSDIWSLGLSIVEMALGAYPYPPETYDNIFSQLSAIVDGPPPRLPKDTFSSDAQDFVRLCLQKIPERRPTYASLLEHPWLKKYRGLDVHMSEYITKRLVQRQHYLEQSGGDELPKVLPALHGRLVKPQPHIP

SEQ ID NO: 37981 - protein, 196 aa, Physcomitrella patens
MSTSRFIKCVTVGDGAVGKTCMLISYTSNTFPTDYVPTVFDNFSANVVVDGNTVNLGLWDTAGQEDYNRLRPLSYRGADVFLLAFSLISKASYENISKKWIPELRHYAPSVPIILVGTKLDLRDDKQFFADHPGAAPITTSQGEELRKAIGAASYIECSSKTQQNVKAVFDAAIKVVLQPPKQKKKKKKQKNCVIL

SEQ ID NO: 37982 - protein, 224 aa, Arabidopsis thaliana
MAGGGGYGGASGKVDYVFKVVLIGDSAVGKSQLLARFARDEFSMDSKATIGVEFQTRTLSIEQKSIKAQIWDTAGQERYRAVTSAYYRGAVGAMLVYDMTKRETFEHIPRWLEELRAHADKNIVIILIGNKSDLEDQRAVPTEDAKEFAEKEGLFFLETSALNATNVENSFNTLMTQIYNTVNKKNLASECDSNNPGSLAGKKILIPGSGQEIPAKTSTCCTSS

SEQ ID NO: 37983 - protein, 247 aa, Synechococcus elongatus PCC 7942
MLDRIREVATRLEPRLLEIRRHLHAHPELSGHEHQTAAYVAGVLSSCGLQVREGVGRTGVVGDLPGTGRDRRCLALRTDMDALPIEEQTGLPFASRQQGIMHACGHDLHTTLGLGAAMVLSELGEPLPGDVRWLFQPAEEIAQGARWMVAAEALEGVDAILGVHVFPSIPAGVVGIRYGALTAAADDLEIVIQGESGHGARPHEAKDAIWIAAQIITMLQQAISRTQNPLRPVVLTIGQIQGGELLM

SEQ ID NO: 37984 - protein, 546 aa, Xanthomonas axonopodis pv. citri str. 306
MAAKDIRFGEDARTRMVRGVNVLANAVKATLGPKGRNVVLEKSFGAPTITKDGVSVAKEIELADKFENMGAQMVKEVASKTNDNAGDGTTTATVLAQALIREGAKAVAAGMNPMDLKRGIDQAVKAAVVELKNISKPTTDDKAIAQVGTISANSDESIGNIIAEAMKKVGKEGVITVEEGSGLENELDVVEGMQFDRGYLSPYFINNQQSQSADLDDPFILLHDKKISNVRDLLPVLEGVAKAGKPLLIVAEEVEGEALATLVVNTIRGIVKVVAVKAPGFGDRRKAMLEDMAVLTGGTVISEEVGLALEKATIKDLGRAKKVQVSKENTTIIDGAGDSAAIESRVGQIKTQIEDTSSDYDREKLQERVAKLAGGVAVIKVGASTEIEMKEKKARVEDALHATRAAVEEGVVPGGGVALVRALVAVGDLKGANEDQTHGIQIALRAMEAPLREIVANAGEEPSVILNKVKEGTGNYGYNAANGEFGDMVEFGILDPTKVTRSALQNAASIAGLMITTEAMVADAPKKDEPALPAGGGMGGMGGMDF

SEQ ID NO: 37985 - protein, 547 aa, Ustilago maydis 521
MSSTTPTSQTVESKPAPAALQASSIDQPPAFSSATPTCDIANPLPKPALATPRESSASSNNLAHRPKRAVIADSEPDMLEKGQAGSSNEASSALSRTLSSSDPASSITARKRGVTRDASSGGEGLGGPFAGPPRRATMESRATTRRSFNDLFTPEHRLAKPPATLVSLKNLLFGSILNLLLVFIPISWALHFALDQSVTRNGIAVFVTSFLAIMPLATILSQATEELSLRVGETIGGLINASLGNAVELIVAIVSLFNCELIVTQTSLLGSILSNLLLVLGTCFFVGGLRVKEQVFLEAPAQLNTSLLMMAVISLVIPSAFHAVLGGIPDNTERGDILKFSRGVSVLLLLIYIGFLYFSLSSHKEFFEDDNEDEEEQPQMNMTAVIITLVIVTVLIGVTSEWLVTAIDVVTSSGAITRTWIGLILLPIASNATEHLAAVIFAWKNKIQMASSIAIGSSIQIALFVIPLLVIIAWIGDRPLTLLFDPFATILLFLTVLIVNFAIADNRSNYLEGFVLIMVYLIVALTVWFVPDDLADTLFSDAYCHNR

SEQ ID NO: 37986 - protein, 142 aa, Staphylococcus aureus subsp. aureus MSSA476
MLKKDKSELTDIEYIVTQENGTEPPFMNEYWNHFAKGIYVDKISGKPLFTSEEKFHSECGWPSFSKALDDDEIIELVDKSFGMLRTEVRSEESNSHLGHVFNDGPKESGGLRYCINSAAIQFIPYEKLEELGYGDLISHFDK

SEQ ID NO: 37987 - protein, 177 aa, Staphylococcus aureus subsp. aureus MSSA476
MTKEYATLAGGCFWCMVKPFTSYPGIKSVVSGYSGGHVDNPTYEQVCTNQTGHVEAVQITFDPEVTSFENILDIYFKTFDPTDDQGQFFDRGESYQPVIFYHDEHQKKAAEFKKQQLNEQGIFKKPVITPIKPYKNFYPAEDYHQDYYKKNPVHYYQYQRGSGRKAFIESHWGNQNA

SEQ ID NO: 37988 - protein, 235 aa, Dechloromonas aromatica RCB
MRTRLSSRHPEKHRTTRIGWLRAAVLGANDGIVSTASLILGVAAAGVDAKAILISGVAGLVAGASSMAAGEYVSVSSQSDTERADLTREKEELATDPAHEHAEMAAIYVKRGLDPALAAVVATQLTAHDALGAHARDELGITDTSTARPLQAALSSALAFSLGAALPLLVVLLAPGHWLALAVAGSALLFLAVLGALSAAVGGAPVLMATLRVTLWGALAMATTAGIGALFGVSA

SEQ ID NO: 37989 - protein, 472 aa, Vigna radiata
MKFLSTKATCNSHGQDSSYFLGWQEYEKNPYDEVLNPQGIIQMGLAENQLSFDLLESWLAKNPDVAGFKSDGKSIFRELALFQDYHGLPSFKKALVDFMAEIRGNKVTFDPNHIVLTAGSTSANETLMFCLAELGDAFLLPTPYYPGFDRDLKWRTGVEIVPIQCTSSNNFQITEAALKQAYQEAKKRNLRVKGVLVTNPSNPLGTTMSRSELNLLVDFIKDKNMHLISDEIYSGTVYNSPGFVSIMEILKDRNDLKDCGANVWDRVHIVYSLSKDLGLPGFRVGAIYSENEVVVAAATKMSSFGLVSSQTQYLLSAMLGDKKFTKNYISENLKRLKRRQRNLVSGLQKAGISCLKTNNAGLFCWVDMRHLLHSNTFEAEMELWKKILYQERLNISPGSSCHCTEPGWFRMCFANMSEETLNLAMNGLKTFVQESNHDNGCTTKRVQSSRRKSLSNWVFRLSSREHREQEQR

SEQ ID NO: 37990 - protein, 211 aa, Dechloromonas aromatica RCB
MQKVIEGFLKFQKDVFPERTQLFKQLAQQQNPKVLFVTCSDSRVVPELFTQQEPGDLFVIRNAGNIVPSYGPEPGGVSATVEYAVSVLQVSDIVICGHSNCGAMAAISSCQCLDHLPAVAHWLRHADSAKAIVASETYATQQEKADALVRQNVIAQLANIRTHPSVALALAQRRLNLHGWVYDIENGVIDALDGASASFVPLSANHQVVAT

SEQ ID NO: 37991 - protein, 467 aa, Vigna radiata
MRLLSTIATCNSHGQDSSYFLGWQEYEKNPYDELHNPKGIIQMGLAENQLSFDLLESWLAKNPDVAGFKRDGKSIFRELALFQDYHGLPSFKKALVDFMSEIRGNKVTFDPNHIVLTAGSTSANETLMFCLAEQGDAFLLPTPYYPGFDRDLKWRTGAEIVPIQCTSSNNFQITEPALKQAYEEARKRNLRVKGLLVTNPSNPLGTTMSRSELNLLVDFIKEKKDTHLISDEIYSGTVFSSPGFVSVMEILKERNDTEEIWNRVHVVYSLSKDLGLPGFRVGAIYSENDTVVAAATKMSSFGLVSSQTQYLLSAMLGDKKFARNYIVENQKRLKRRQRMMVSGLQKAGISCLESNAGLFCWVDMRHLLHSNTFEAEMELWKKIVYQVGLNISPGSSCHCTEPGWFRVCFANMSEETLTLAMKRLKNFVVESTCTQRSALFNGTSKRKSLTKWVFRLSSRDHREQEER

SEQ ID NO: 37992 - protein, 345 aa, Arabidopsis halleri subsp. halleri
MASNSALLMKTIFLVLIFVSFAISPATSTAPQECGSESVNPCVNKAKALPLKIIAIVAILIASMIGVGAPLFSRNVSFLQPDGNIFTIIKCFASGIILGTGFMHVLPDSFEMLSSICLEENPWHKFPFSGFLAMLSGLITLAIDSMATSLYTSKNAVGIMPHGHGHGPANDVTLPIKEDDSANAQLLRYRVIAMVLELGIIVHSVVIGLSLGATSDTCTIKGLIAALCFHQMFEGMGLGGCILQAEYTNLKKFVMSFFFAVTTPFGIALGIALSTVYQDNSPKALITVGLLNACSAGLLIYMALVDLLAAEFMGPKLQGSIKMQFKCLVAALLGCGGMSIIAKWA

SEQ ID NO: 37993 - protein, 620 aa, Zea mays
NPLPCYHFDLEQAHSSCCRLAAVAAYMDTLFRLVSLQASEQQQQQQSASYNSRSTTSSGSRSSSHQTNASYNYYYHSNSSGGGGGGQYYYGQQHPQQHQHQQYYLEPYQQEECGNTHHLYMDEDFSSSSSSRQHFHSHGAVVQPPTSSTATPTAPTPSLSTSSTAAGAAHALFEAADLSFPPDLNLDFSSPASSSGGGAASSAAVGGGGGGRWASQLLLECARAVAGRDSQRVQQLMWMLNELASPYGDVEQKLASYFLQGLFARLTASGPRTLRTLAAASDRNTSFDSTRRTALRFQELSPWSSFGHVAANGAILESFLEAAAASPEPQRLHILDLSNTFCTQWPTLLEALATRSADDTPHLSITTVVSSAPSAPTAAVQRVMREIGQRMEKFARLMGVPFSFRAVHHAGDLAGLDLDALDLRDGGATTALAINCVNSLRGVVPGGARRRDAFAASLRRLDPRVVTVVEEEADLVAFDPGAPDESGDTEAAFLKVFGEGLRFFSAYMDSLEESFPKTSNERLALERGAGRAIVDLVSCPASESMERRETAASWARRMRSSGFSPVAFSEDVADDVRSLLRRYREGWSMRDAGLDDSEAGAGVFLAWKEQPLVWASAWRP

SEQ ID NO: 37994 - protein, 362 aa, Oryza sativa
  misc_feature (243)..(243): Xaa can be any naturally occurring amino acid
  unsure (1)..(362): unsure at all Xaa locations
MDMDSVECLSLPDSSMDVDDVDGGGSVHHHHHHHHALPPHLPAGVAVGVGPGGRAFPKANVAGVGGGGAAGAPAAGGAVAGGGGPGGGPPATSVHELLECPVCTNSMFPPIHQCQNGHTLCSTCKARVHNRCPTCRQELGDIRCLALEKVAESLELPCKYCSLGCPEIFPYYSKIKHEAQCSFRPYNCPYAGSECAVAGDIPFLVAHLRDDHKVDMHSGCTFNHPGLQANPREVENATWMLTXVFHCFGQYFCLHFEAFQLGMAPVYMAFLRFMGDENEARNYTYSLEVGGNGRKMVWEGTPRSIRDSHRKVRDSHDGLIIQRNMALFFSGGDRKELKLRVTGRIWKEQTNPDGACIPNLCS

SEQ ID NO: 37995 - protein, 701 aa, Zea mays
MAAVATPPAPAPAAPAPAPAPAAAPAPVTVAPAADQTTDLLQKLSLDSQPKAAGATEPAAAAAKEGAVTSQPLSVAIPPERSITPVLQDFMDPNLFYLPAYYYGGYDSSMSEWDDYPRYLNSDGVEIAPAVYGDIYGYGYAPYGAYSPATSPVPTVDGQMFGAQHYQYPTTYFQPPTPIPSTTQSNLQSSNNPEKPAAKADPAKATANGVPNGTGHTHSYSGTVPSQQSSALTPDGTYRAPLLGGVPSAGYLDTTYYGYDSTGAQFAWYDGSAYANGQQRTTTTNRFPSSSFSGNGSSAIYQNKSSTTQQMGMQNRRPTTTSAAPTYPNRMYPSPRPYTQYGNSVKTGLPYGSNGYDSRIYGRCGLGNGMDNRYRPRACSGYYGYGNESQDGTIELNRGPRSGRFKNQKLYGHTVTIAVKGQSLPSSESKNDSAVPDRAKYNRDDFPVQYDAAKFFVIKSYSEDDIHKSVKYNVWASTTNGNKKLDAAYQEAQSKGSACPIFLFFSVNTSGQFVGVAEMTGAVDFEKTLEYWQQDKWNGSFSVKWHIVKDVPNNILKHIILENNENKPVTNSRDTQEIRLEQGLQMLKIFKDHVSKTSILDDFAFYESRQKLMQDKRSKQQQLQKQVWDTRTPVSVTGERPQEPADGKPNPSVPDGVTAEVKAVKAPSENGITAPVVSYAAKVAQTAPEKPVLSNGVAKTG

SEQ ID NO: 37996 - protein, 433 aa, Synechococcus elongatus PCC 6301
MVTSSPFKTIKSDEIFAAAQKLMPGGVSSPVRAFKSVGGQPIVFDRVKDAYAWDVDGNRYIDYVGTWGPAICGHAHPEVIEALKVAMEKGTSFGAPCALENVLAEMVIDAVPSIEMVRFVNSGTEACMAVLRLMRAYTGRDKIIKFEGCYHGHADMFLVKAGSGVATLGLPDSPGVPKSTTANTLTAPYNDLEAVKALFAENPGEIAGVILEPIVGNSGFIVPDAGFLEGLREITLEHDALLVFDEVMTGFRIAYGGVQEKFGVTPDLTTLGKIIGGGLPVGAYGGKREIMQLVAPAGPMYQAGTLSGNPLAMTAGIKTLELLRQPATYEYLDQITKRLSDGLLAIAQETGHAACGGQVSGMFGFFFTEGPVHNYEDAKKSDLQKFSRFHRGMLEQGIYLAPSQFEAGFTSLAHTEEDIDATLAAARTVMSAL

SEQ ID NO: 37997 - protein, 270 aa, Elaeis guineensis
ASEATSVEVDTATGKKELLVFEREEELAVSLAKYTAELSEKFAQERGAFTLVISGGSLIKSLRKLVDSPYLETVDWTKWHVFWVDERVVPKDHADSNYKLAYDVFLSKVPIPPGQVYAINDSLSAEGAADDYETCLKHLVNTGVVAVSPATGFPKFDLMLLGMGPDGHIASLFPGHPLLNENERWITFIEDSPKPPPERITFTFPVINSSAYVALVVTGSGKAGAVHKALGGEQSSSDMLPVEMVSLKDGKFIWFTDKAAVSMLREKASL

SEQ ID NO: 37998 - protein, 555 aa, Pseudomonas aeruginosa PAO1
MVTANRLPLEVFFEREKRHPQRRYLVQPIGGGRVEELSWGEVGDQARRAAAWLRTLDLPAGSRIAIISKNCAHWIVTDLAIWMAGHVSVPLYPNLTAESARQVLEHSESAVVFVGKLDDWPAMAPGVPEGIPTVAMPLHPEGRFDRQWSDLQACAPLEGDTPTAAEQLATLIYTSGTTGVPKGVMHNFSSFAFAASRGVELFGTREDDRMLSYLPLCHVAERMFVEMGSLYGGTTVFFAESLDTFVEDMKRARPTLLFGVPRIWTKFQMGVYSKMPAQKLDRLLKLPILGRIVGRKVLAGLGLDAVRYALCGAAPVPEALLLWYRRLGLDVLEVYGMTENSGYSHVCRPGRQKTGWIGQNSPGVEVRISDEGEVQVRSGATMVGYYKEPEKTAEVLTADGFLRTGDKGEQDADGNLRLTGRMKEIFKTSKGKYVAPAPIENRLAVHDRIEQVCVVGEGLSAPLGLCVLSEVGRREALNGTRGALESSLRAHLEQVNGALDKHERLVGLVLVQETWAVDNGFLTPTLKIKRNMVEGAYGSRFHEWVERREAVLWHE

SEQ ID NO: 37999 - protein, 256 aa, Oryza sativa
VDPRAAGPQLLGGFAFIGEGIPVATGAAFAAKYRHEVLKQSSPDGLDVTLAFFGDGTCNNGQFFECLNMAQLWKLPIVFVVENNLWAIGMSHLRATSDPEIYKKGPAFGMPGVHVDGMDVLKVREAAKDAIERARRGEGPTLVECETYRFRGHSLADPDELRRPDEKSHYAARDPITALKKYIIEQNLATESELKSIEKKIDDVVEEAVEFADASPLPPRSQLLENVFSDPKGFGIGPDGKYRCEDPLFTQGTAQV

SEQ ID NO: 38000 - protein, 304 aa, Phanerochaete chrysosporium
MSRDSHGELVVLNEKAAAAKAHATGGRRRALLYGAIAALLLIVALALGLGLGLGLGLKHHHDSTAPASTNSSGQSLPSLQPTPQNNFVLDGLAGQPPQTRSYDFVISQVLGAPDGVSKPMLVVNGMYPGPTIEVNQGDRIVVNVTNLLENRTTIHWHGLFQNQTNYYDGTAGITECGIPPGQSLVYNFTLGDFSGTTWWHAHYSTQYTDGITGALIVHPASPPPVKFPSWDHELVVQVADLYHTFSSILLASYLSPWGIDGTAGDEPVPDAGVLNGLGQWGGGGDYFNVRCLSIWGSLSRSKPL

SEQ ID NO: 38001 - protein, 222 aa, Triticum aestivum
  misc_feature (13)..(13): Xaa can be any naturally occurring amino acid
  misc_feature (15)..(15): Xaa can be any naturally occurring amino acid
  misc_feature (17)..(17): Xaa can be any naturally occurring amino acid
  misc_feature (26)..(26): Xaa can be any naturally occurring amino acid
  unsure (1)..(222): unsure at all Xaa locations
GGPFPELHRPHGXLXNXKCPFAAGVXFAPGLTAENNPDVDFDEGLKKGRLSECCEDGFGLPAQKSSEGLQTPVAEKRVFPVRLGKFKNVGTQGAVEGGHGDSAVLRREEGESSSSSLDARKCFSMGTYQYVLGTSELQVALQPGRTRNGAMRSRPPGISCVNADIMEGKKICARNKGESFSMSKIWQWSNLKGKLPAGSDDCSEAGSLPWMKRGGTGDKLNL

SEQ ID NO: 38002 - protein, 613 aa, Phanerochaete chrysosporium
MAAAEDIAPEEKVALLEPHSNHDTQSASPRRRRPHAAHAALLAVFLLGVALLALGVWGTYASSPRGPSLPRELQRTPHTHFALDGLRGQPPQTRSHAFVVSEVEGAPDGVRKPMLVVNGMYPGPTIEANQGDRVVVKVTNMLENRTTIHWHGLFQNGTNYYDGTAAITECGIPPGQTLVYNFTLGEFSGTTWWHAHYSTQYTDGITGALVVHPTDPLPASIPPWDGDLVVQVSDLYHTFSPVLLERFLSPWGIDGVPGDEPVPDAGTLNGLGQWAGHGDYFNFTLEANKTYRLRVVNTGSFASVRFSVDRHVLRVVEADGTLVEPHDVSGVTLAVGQRYSVLLRTDNATGGPFWMRATLQKHMFRYDLPGQNRDIRGVIRYGPAADTTALPAETDDPGVRSHPGLADADDRQLVPALFNTAPERTRSYPLRVSLQLHDSLVMLGFLNTTSWEPLRGTTTLLRVREAFRAGGVYGGGDGGSLQDGEQFVLTEDSIQVVDLVIDNIDDGDHPFHLHGHRPWIVGSGVGRYIGQPLNATNPLRRDTVLVRAYSWMVLRFVTDNPGLWAFHCHLAWHMAAGMLMQVNSLPTRAAQLDIPQTIVDQCQVDVGGAGARR

SEQ ID NO: 38003 - protein, 411 aa, Medicago sativa
MDSLLVGSFPKSCSYSFTTTGGNLWRSKRYVNNCYSIPSSCASKASRHKKIQNEYNILRFWQPSLNHYCEGAEGRSTYQECNKKFVVKAAPEQSFESEHPAFDPKNILDTVKNSLDAFYRFSRPHTVIGTALSIISVSLLAVEKLSDISPLFFTGVLEAVVAALFMNIYIVGLNQLSDVEIDKINKPYLPLASGEYSFATGAIIVVSSSILSFWLAWIVGSWPLFWALFISFVLGTAYSINVPLLRWKRFAVLAAMCILSVRAVIVQLAFFLHMQTFVYKRPIVFSRPLIFATAFMSFFSVVIALFKDIPDIEGDKIFGIQSFSVRLGQKRVFWICVTLLELAYGVSLVVGATSSCLWSKIVTSLGHAVLASILFNHAKSVDLKSKASITSFYMFIWKLFYAEYFLIPLVR

SEQ ID NO: 38004 - protein, 368 aa, Desulfovibrio vulgaris subsp. vulgaris str. Hildenborough
MRYTTIPMVPGPVTLHPDVLAALARDYPSGQVDEAFMPLYTHTGVALGALMGTANDVVLMTGEGMLALWGALKSTLRPGDKVLSVGTGVFGDGIGDMAASIGCEVCKVSLPYDETIGATREALAPIEEAIARFRPHMLTAVHCETPSGTLNPLAALGDLRRELGVPLFYVDAVASVGGAPVEADAWGVDLILGGSQKCLAAPPSMSFVGVSPAAWERIEEVGYQGYDALAPFRNVQRQGRCPYTPYWHGIAALAAGAEAILREGMDNVFRRHAEVAAHCRKRIAELGLSLWTAPDAVNSPTVTAVNLPVGISWPRWKQALLERDLAITGSFGPMAGKVFRIGHMGTQAHFDLVDAALDVIAGTLHGMR

SEQ ID NO: 38005 - protein, 214 aa, Phanerochaete chrysosporium
MAAAEDIAPEEKVALLEPHSNHDTQSASPRRRRPHAAHAALLAVFLLGVALLALGVWGTYASSPRGPSLPRELQRTPHTHFALDGLRGQPPQTRSHAFVVSEVEGAPDGVRKPMLVVNGMYPGPTIEANQGDRVVVKVTNMLENRTTIHWHGLFQNGTNYYDGTAAITECGIPPGQTLVYNFTLGEFSGTTWWHARTSDPLYNNEQLTLAQPLC

SEQ ID NO: 38006 - protein, 285 aa, Phanerochaete chrysosporium
MAAAEDIAPEEKVALLEPHSNHDTQSASPRRRRPHAAHAALLAVFLLGVALLALGVWGTYASSPRGPSLPRELQRTPHTHFALDGLRGQPPQTRSHAFVVSEVEGAPDGVRKPMLVVNGMYPGPTIEANQGDRVVVKVTNMLENRTTIHWHGLFQNGTNYYDGTAAITECGIPPGQTLVYNFTLGEFSGTTWWHAHCTHSIYHPSPCGLTLLLQIRRNTRTASPARWSCIPQTRCRRPFHPGMATSSCRSRTCTTPSARCCSSASSRRGASTVFPATSPCLTPAP

SEQ ID NO: 38007 - protein, 1022 aa, Streptomyces avermitilis MA-4680
MHDERRRIEERVERIHNQRIKPAVYAAAVPFAVEAWQAPGEPVPFEEAAAASYAPFAMDTPWGPPWGTTWFRMRGRVPAEWAGRRVEAVIDLGFTGDWPGNQAEALVHRTDGTPLKAVNPLNQYVPIGNPATGGEEIDYLVEAASNPDILAGDFARPTPLGDVLTAGDKPLYTFRRADLAILDEEVWHLDLDVQVLRELMLELGEHDPRRHEIMHTLDRALDALDLDDISGSATAVREVLAPALARPAHASAHTLSGVGHAHIDSAWLWPIRETKRKTSRTFSNVTSLADEYDDFIFACSQAQQYEWVRDNYPHVWARIQESVKKGQWAPVGGMWVEADGNLPGGEALARQLIHGKRFFIEHFGVETKGVWLPDSFGYNASYPQLAKLAGNEWFLTQKLSWNQTNKLPHHTFWWEGIDGTRIFTHFPPIDTYNARFSGEEMSRTVRNYADKGRGTRSLAPFGWGDGGGGPTREIMERARRLADLEGSPKVVVEHPDAFFKAAREEYPDAPVWVGELYLELHRATYTSQARTKQGNRRSEHKLREAELWATTAALHAPGYAYPYEKLDRLWKTVLLHQFHDILPGSSIAWVHREAEAEYARVATELEELTAEAVAALGGGGPRVFNTSPRDRAEVVRTSTGAPAYVEVPAGGSAPLDGAAPPRPVTVTGRVLDNGLVRVEVAEDGTLASVRDLTADREVLADQGNLLRLHTDLPNYWDAWDIDKHYKNRYTDLLDADSVTVVEQDPLIGAIRVERSFGKGSKITQTITVRAGSRRIDVETEIDWHEAEKILKAAFPVDLRAPHSSAEIQFGHVQRPTHTNTSWEAARFEVYGHRWVHIGEPGYGVAVINDSTYGHDVSRTVREDGGTTTTVRLSLVRAPRVPDPEADQGRHRFTYALLPGASIEDAVAEGYALNLPLRVADAQGAPEPVVSVDGAGLTVEAVKLADDASGDVVVRLYESGGGRSRGTLRTGFPLAGVHVTDLLERPLAEGAGDAVVDGDGAVAVELRPFQVLTLRLKRAATAQ

SEQ ID NO: 38008 - protein, 455 aa, Kluyveromyces lactis NRRL Y-1140
MRPFDNESKGFLSGRTDQIELPVVQAVSTSSNSQEPLLSSKDPLRDGSNVGNRLSGNSETLITNSDADHPMETDNNNSNLNNTNSSTNTNDNKDSSSNSSNNENGDSSNNSNRRHSNHCHKHNHLSSTSTLKARVTSGKYALYDFQILRTLGTGSFGRVHLVRSNHNGRFYAMKVLKKNTVVKLKQVEHTNDERNMLSIVSHPFIIRMWGTFQDSQQLFMIMDYIEGGELFSLLRKSQRFPNPVAKFYAAEVCLALEYLHSKGIIYRDLKPENILLDKNGHIKLTDFGFAKYVPDVTYTLCGTPDYIAPEVVSTKPYNKSVDWWSFGVLIYEMLAGYTPFYDSNTIKTYENILNAPVRFPPFFHSDAQDLISKLITRDLSQRLGNLQNGSEDVKNHPWFSEVVWEKLLCKNIETPYEPPIQAGQGDTSQYDRYPEEEVNYGIQGEDPYHSIFTNF

SEQ ID NO: 38009 - protein, 389 aa, Escherichia coli O157:H7 EDL933
MSDTTILQNSTHVIKPKKSVALSGVPAGNTALCTVGKSGNDLHYRGYDILDLAEHCEFEEVAHLLIHGKLPTRDELAAYKTKLKALRGLPANVRTVLEALPAASHPMDVMRTGVSALGCTLPEKEGHTVSGARDIADKLLASLSSILLYWYHYSHNGERIQPETDDDSIGGHFLHLLHGEKPSQSWEKAMHISLVLYAEHEFNASTFTSRVIAGTGSDMYSAIIGAIGALRGPKHGGANEVSLEIQQRYETPDEAEADIRKRVESKEVVIGFGHPVYTIADPRHQVIKRVAKQLSQEGGSLKMYNIADRLETVMWESKKMFPNLDWFSAVSYNMMGVPTEMFTPLFVIARVTGWAAHIIEQRQDNKIIRPSANYVGPEDRQFVALDKRQ

SEQ ID NO: 38010 - protein, 520 aa, Arabidopsis thaliana
  misc_feature (494)..(494): Xaa can be any naturally occurring amino acid
  unsure (1)..(520): unsure at all Xaa locations
MSGAITCSAADLATLLGPNATAAADYICGQLGTVNNKFTDAAFAIDNTYLLFSAYLVFAMQLGFAMLCAGSVRAKNTMNIMLTNVLDAAAGGLFYYLFGYAFAFGGSSEGFIGRHNFALRDFPTPTADYSFFLYQWAFAIAAAGITSGSIAERTQFVAYLIYSSFLTGFVYPVVSHWFWSPDGWASPFRSADDRLFSTGAIDFAGSGVVHMVGGIAGLWGALIEGPRRGRFEKGGRAIALRGHSASLVVLGTFLLWFGWYGFNPGSFTKILVPYNSGSNYGQWSGIGRTAVNTTLSGCTAALTTLFGKRLLSGHWNVTDVCNGLLGGFAAITAGCSVVEPWAAIVCGFMASVVLIGCNKLAELVQYDDPLEAAQLHGGCGAWGLIFVGLFAKEKYLNEVYGATPGRPYGLFMGGGGKLLGAQLVQILVIVGWVSATMGTLFFILKRLNLLRISEQHEMQGMDMTRHGGFAYIYHDNDDESHRVDPGSPFPRSAXLLLAFNFQLFGNLLPFKYCLGFGFEI

SEQ ID NO: 38011 - protein, 642 aa, Neisseria meningitidis MC58
MSRNQNHEEYQDDTRPLSIEEQRARLRQLIIMGKERGYITYSEINDALPDDMSDADQIDNIVSMISGLGIQVTEHAPDAEDILLSDNAAVTDDDAVEEAEAALSSADSEFGRTTDPVRMYMREMGQVDLLTREDEIIIAKKIENALKNMVQAISACPGSIAEILELIEKIRKDEIRVDEVVEAIIDPNEVLLNELGLGHLETTAPEKPSNDNSDENEDDEESEEDADEISAANLAELKQKVIGHFAQIEKDYKKMIGRLEKHHSRHKDYLAYRDAIANKLLEVRFATRQIDSLSSSLRGKVENIRKLEREIRDICLDRVHMERDYFIQNFLPEITNLEWIEEEIAKGRVWSDALDRFRHAILEKQTELADMEKETRISIEELKEINKNMVSSEKETAAAKQEMIQANLRLVISIAKKYTNRGLQFLDLIQEGNIGLMKAVDKFEYRRGYKFSTYATWWIRQAITRSIADQARTIRIPVHMIETINKMNRISRQHLQETGEEPDSAKLAELMQMPEDKIRKIMKIAKEPISMETPIGDDDDSHLGDFIEDANNVAPADAAMYTSLHEVTKEILESLTPREAKVLRMRFGIDMNTDHTLEEVGRQFDVTRERIRQIEAKALRKLRHPTRSDRLRSFLDSEDSKL

SEQ ID NO: 38012 - protein, 496 aa, Saccharomyces cerevisiae
MSAVNVAPELINADNTITYDAIVIGAGVIGPCVATGLARKGKKVLIVERDWAMPDRIVGELMQPGGVRALRSLGMIQSINNIEAYPVTGYTVFFNGEQVDIPYPYKADIPKVEKLKDLVKDGNDKVLEDSTIHIKDYEDDERERGVAFVHGRFLNNLRNITAQEPNVTRVQGNCIEILKDEKNEVVGAKVDIDGRGKVEFKAHLTFICDGIFSRFRKELHPDHVPTVGSSFVGMSLFNAKNPAPMHGHVILGSDHMPILVYQISPEETRILCAYNSPKVPADIKSWMIKDVQPFIPKSLRPSFDEAVSQGKFRAMPNSYLPARQNDVTGMCVIGDALNMRHPLTGGGMTVGLHDVVLLIKKIGDLDFSDREKVLDELLDYHFERKSYDSVINVLSVALYSLFAADSDNLKALQKGCFKYFQRGGDCVNKPVEFLSGVLPKPLQLTRVFFAVAFYTIYLNMEERGFLGLPMALLEGIMILITAIRVFTPFLFGELIG

SEQ ID NO: 38013 - protein, 373 aa, Wolinella succinogenes
MQRSFIREILEAISPQTLSLAGGLPDESLFPLQALSHCAQKVLSQPHSLQYSISQGLPVLREKIAQHYSELGFPTNVDEILITTGAQQALDLLSKALASSGLIVESPAYLGAIGAFKSNQIPLVEIEMEEDGIELESLRAKLPKHRLAYLMSDFQNPTSRRYSLSKRQEIARLIESSEAILIEDGAYNELYFKERFPSISSLIPHRSFHVGTFSKILSPSLRVGFIRASKENLAKILPYKESMDLHTSGITQGIVNAFWEEYDFKAHKEKIRHAYALKAKALAQALQTHCPSFSFKEPEGGMFIYGSFAKGVDARALAFDSLKQGAVFVPGGEFYLQRRQSPEARLNFTHLDPRSLDLGVQIIAQTLRAQTKQ

SEQ ID NO: 38014 - protein, 766 aa, Haemophilus somnus 129PT
MYLHTGDLVMTTFHVLGFPRVGAKRELKFAQERYWRKELAEQDLLDLAKALREKNWKHQADANADFVAVGDFTFYDHILDLQVATGAIPARFGFDSKNLTLDQYFQLARGNKDQFAIEMTKWFDTNYHYLVPEFHKDTQFKANPTHYVNQIREAKVAGHQVKPVIVGPLTFLWLGKEKGESFNRFELLAQLVPVYVEILNALVAEGAEWIQIDEPALAVDLPKEWGNAYKDVYATLSEKVNAKLLLATYFGSVTEHATLLKELSVDGLHLDLVRAPEQLVAFEDYNKVLSAGVIDGRNIWRANLNTVLDVLEPLKEKLGERLWIAPSCSLLHTPFDLNVETQLQENNPALYSWLAFTLQKVQELSVLKTALEKGRTAVNVELDASQVAADARANSKEIHRPEVAERLANLPKNADQRKSPFGERIKLQNAWLNLPLLPTTSIGSFPQTTDIRRARAAFKKGDLSLEEYENSMKKEIELVVREQEKLDLDVLVHGEPERNDMVEYFGELLDGFAFTKFGWVQSYGSRCVKPPVIYGDVVRPKAMTVRWSKYAQSLTKKVMKGMLTGPVTILQWSFVRNDIPRSTVCKQIGVALSDEVLDLEKAGIKVIQIDEPAIREGLPLKRADWDTYLQWAGEAFRLSSMGVADDTQIHTHMCYSEFNDILPAIAALDADVITIETSRSDMELLTAFGDFKYPNDIGPGVYDIHSPRVPTAEEIEHLLRKALNVVPKERLWVNPDCGLKTRGWSETIAQLEVMMSVTKKLRAELA

SEQ ID NO: 38015 - protein, 150 aa, Daucus carota
MADQLTDDQISEFKEAFSLFDKDGDGCITTKELGTVMRSLGQNPTEAELQDMINEVDADGNGTIDFPEFLNLMARKMKDTDSEEELKEAFRVFDKDQNGFISAAELRHVMTNLGEKLTDEEVDEMIREADVDGDGQINYEEFVKVMMAKG

SEQ ID NO: 38016 - protein, 591 aa, Yarrowia lipolytica CLIB122
MRNYELVGLGRSVANISKKAWDIQKQSIHDHLEGSSIVSGLKGCVVSSVCPPAPLSTANGTIPRDPPAQTGPTGLTPGVPNGPLGSGSSSAKMVFDPFNNKRPTINGNSVDPSTKRMYSSSSDKGPSIGEEIIGAEVPKDRIIGEKEIREEMMSSAVPSGRFERLFHYGTLATGLGVGALGEGFRRLTGDNSHAGSLVLTPGNVERLVKSLSQMRGAALKIGQQLSFQDSRVFPPEIQQIFSRVQNSANYMPAEQLHKVLTKELGQGWRNEFFSSFEDKPIAAASIGQVNTAVLRDSYEPVAIKIQYPGVADSIDSDLNNLMILMTASSMLPEGLFLDKTVANARVELKWECDYIREAQNLERFQELLADYPDYVVPKVYHEASTDKVLTMQRLRGQDIVKGPWDQDTKNWIATRIMELCLLEIAKFKFMQTDPNWANFLYNPKTHKLELLDFGASRGYSDQFINDYLNCLRAAVRKDRASCEKYSLELGYLTGLESKAMLNAHIDSMITLGEPFNGENGGGDFNFANQTVTDRVRENIGVMLKERLTPPPEETYGLHRKLSGAFLLCAKLNAEVPCQKLFEDIVGLDDQS

SEQ ID NO: 38017 - protein, 164 aa, Glycine max
AVTSAEVSQDGRYITTADGSTVKFWDANYYGLVKSYDMPCTIESVSLEPKYGNKFVAGGEDMWVHVFDFHTGNEIACNKGHHGPVHCVRFSPGGESYASGSEDGTIRIWQTGPLTLDGSETVSANGSVDKVKVTADEVSHKIEGFQIADEGKSKEKDEAVEESS

SEQ ID NO: 38018 - protein, 220 aa, Pseudomonas aeruginosa PAO1
MIDLYTAATPNGHKVSIALEEMGLPYRVHALSFDKKEQKAPEFLRINPNGRIPAIVDRDNDDFAVFESGAILIYLAEKTGQLMPTDVKGRSRVIQWLMFQMGGVGPMQGQANVFFRYFPEKLQGAIDRYQHETRRLYEVLDGRLGEAEYLAGDYSIADIATYPWVRIHDWSGVAVDGLDNLQRWIAAIEARPAVQRGLLVPRREKEGDDAIRTAQSMLTR

SEQ ID NO: 38019 - protein, 504 aa, Oryza sativa; identical to SEQ ID NO: 1129

SEQ ID NO: 38020 - protein, 267 aa, Hordeum vulgare subsp. vulgare
MGRSPCCEKAHTNKGAWTKEEDDRLTAYIKAHGEGCWRSLPKAAGLLRCGKSCRLRWINYLRPDLKRGNFSHEEDELIIKLHSLLGNKWSLIAGRLPGRTDNEIKNYWNTHIRRKLTSRGIDPVTHRAINSDHAASNITISFESAQRDDKGAVFRRDAEPAKAAAAAAAISHHVDHHHRSNPQLDWGQGKPLKCPDLNLDLCISPPIHEDPMVDTKPVVKREAGVGVGVVGLCFSCSMGLPRSSDCKCSSFMGLRTAMLDFRSIEMK

SEQ ID NO: 38021 - protein, 196 aa, Phanerochaete chrysosporium
MAAAEDIAPEEKVALLEPHSNHDTQSASPRRRRPHAAHAALLAVFLLGVALLALGVWGTYASSPRGPSLPRELQRTPHTHFALDGLRGQPPQTRSHAFVVSEVEGAPDGVRKPMLVVNGMYPGPTIEANQGDRVVVKVTNMLENRTTIHWHGLFQNGTNYYDGTAAITECGIPPGQTLVYKCVFLLLRGPSLHCAR

SEQ ID NO: 38022 - protein, 251 aa, Hordeum vulgare subsp. vulgare
MGRSPCCEKEHTNKGAWTKEEDQRLIAYIRANGEGCWRSLPKAAGLLRCGKSCRLRWMNYLRPDLKRGNFTDDEDELIIRLHSLLGNKWSLIAGQLPGRTDNEIKNYWNTHIKRKLLSRGMDPHTHRPLTAVIDAAAPTRPAQIAVPARAAPTTMFALPTKQQQPPVPVESSDDDGSSGATSTGEPRCPDLNLDLSVGPPAADTPTSHPVCLCRHLGFRGGEACSCRQADSAGSQGGGFRYFRPLEEGQYI

SEQ ID NO: 38023 - protein, 297 aa, Phanerochaete chrysosporium
MAAAEDIAPEEKVALLEPHSNHDTQSASPRRRRPHAAHAALLAVFLLGVALLALGVWGTYASSPRGPSLPRELQRTPHTHFALDGLRGQPPQTRSHAFVVSEVEGAPDGVRKPMLVVNGMYPGPTIEANQGDRVVVKVTNMLENRTTIHWHGLFQNGTNYYDGTAAITECGIPPGQTLVYNFTLGEFSGTTWWHAHYSTQYTDGITGALVVHPTDPLPASIPPWDGDLVVQVSDLYHTFSPVLLERFLSVSPPALRPTRHTAVLREPPAAAAWWRTIVALRSTDDTAFFGNDVTPFC

SEQ ID NO: 38024 - protein, 104 aa, Hordeum vulgare subsp. vulgare
MGRSPCCEKEHTNKGAWTKEEDQRLIAYIRANGEGCWRSLPKAAGLLRCGKSCRLRWMNYLRPDLKRGNFTDDEDELIIRLHSLLGNKWSLIAGQLPGRTDNEI

SEQ ID NO: 38025 - protein, 462 aa, Phanerochaete chrysosporium
MAAAEDIAPEEKVALLEPHSNHDTQSASPRRRRPHAAHAALLAVFLLGVALLALGVWGTYASSPRGPSLPRELQRTPHTHFALDGLRGQPPQTRSHAFVVSEVEGAPDGVRKPMLVVNGMYPGPTIEANQGDRVVVKVTNMLENRTTIHWHGLFQNGTNYYDGTAAITECGIPPGQTLVYNFTLGEFSGTTWWHAHYSTQYTDGITGALVVHPTDPLPASIPPWDGDLVVQVSDLYHTFSPVLLERFLSPWGIDGVPGDEPVPDAGTLNGLGQWAGHGDYFNFTLEANKTYRLRVVNTGSFASVRFSVDRHVLRVVEADGTLVEPHDVSGVTLAVGQRYSVLLRTDNATGGPFWMRATLQKHMFRYDLPGQNRDIRGVIRYGPAADTTALPAETDDPGVRSHPGLADADDRQLVPALFNTAPERTRSYPLRVSLQLHDSLVMLGFLNTTVRPVSRPGVRCSR

SEQ ID NO: 38026 - protein, 139 aa, Bacillus cereus ATCC 14579
MKGLFKGLKYTLSNLSKKKVTYDYPNQPLPLPDRFRGIQKFYPEKCIVCNQCSNICPTDCIQLTGKKHPDPTKKGKIIDTYDINFEICILCDLCTEVCPTEAIVMTNNFELAEYSRDDLFKNLQWLDENDENVRKENKA

SEQ ID NO: 38027 - protein, 286 aa, Phanerochaete chrysosporium
MAAAEDIAPEEKVALLEPHSNHDTQSASPRRRRPHAAHAALLAVFLLGVALLALGVWGTYASSPRGPSLPRELQRTPHTHFALDGLRGQPPQTRSHAFVVSEVEGAPDGVRKPMLVVNGMYPGPTIEANQGDRVVVKVTNMLENRTTIHWHGLFQNGTNYYDGTAAITECGIPPGQTLVYNFTLGEFSGTTWWHAHYSTQYTDGITGALVVHPTDPLPASIPPWDGDLVVQVSDLYHTFSLCSRRIRYRSSTWSLTTSTTGTIRSICTDTGHGSWALASGGTLASR

SEQ ID NO: 38028 - protein, 915 aa, Candida glabrata CBS138
MSNANQKENVPSLGLPRTHGTLNVNALKATDILKHKGKLNEVNSDQSTTNENDEVQEEAVFLDDPVHFTRVSSSSELSAALSVNTTEQEQDEEKGTEHAELEPAEEDTVEVDTIRNNGDKTYSTIRESASDFETTNNTLIEISKNSSTYSSTEFLNNNNNGISNSNRATIDSESKLRMNKLREGSSTSLSNDSNGFNGMISSNQASTVLSTPSQKPSSTTNTITKANNGGSTRAQKEKHTSPKLPSTVTAPSSHRKSADLSKTNKLPSTTAKRTPKQAVTSSSPKEPAKRKSSTSKMKGMFSSLVQNMKRNSSDNRKSASSLSSVSSSSSSTLKISTPYNPKHIYHVGVDARTGEYTGLPEEWERLLASSGISRKEQQQNMQAVIDIVNFYQDVADHTGEEKVIKTFDPKKQNPLVRDSLSKYEQVDDNRTSYASGGTPTLEQNGFHTSSTPRSRTSLTSPTAGYSMISTPPMATQEKYIPTRPAPKPPGQQTPSSNASLTPKMQNATMSPIKENISSPVTKSEVDDELLLSKKNASLPKLPSDDSSSHKKSATDSAPTSVETDTETVKVPPIPKTTPTVPAKASRRSNEKKKEERERNKKLLYAKLTEICSPGDPKSKYRDLIKIGQGASGGVYIAHDTESEDSVAIKQMNLEKQPKKELILNEILVMRESKHSNIVNFIDSYLAKGDLWIVMEYMEGGSLTDVVTHCLLSEGQIGAVCRETLKGLQFLHSKGVLHRDIKSDNILLSLKGNIKLTDFGFCAQINENNLKRTTMVGTPYWMAPEVVSRKEYGPKVDIWSLGIMIIEMIEGEPPYLNETPLRALYLIATNGTPKLKEPEALSDTLTKFLDWCLKVDPSERATATELLDDPFITEIAEDNSSLSPLVKLARIKKLEEQEEDAGTDETEPETTPDTTI

SEQ ID NO: 38029 - protein, 591 aa, Phanerochaete chrysosporium
MDQSAYSRFGRANHARRRLNLCLRPAPVYLPLLLALLAIAFVTSVDARAVSYASRDTPELASHEATVAVPRADNFVVGSIRGQPPTTRHFNFVVSQMNGSPDGFSKPMLVVNGLFPGPTIEANQGDRIVVHVTNTLSTRTTIHWHGLYQNSTNYYDGTAGVTECGIPPGQSLTYNFTVDDFSGTTWWHAHYDTQYTDGVTGALIVHPRKYPRGFPTWDEDIVVELTDIYHAFSETILSEYLGGGGGPLTGLQLETPDSGAINGIGQYNGSTKYTNLNLKPNKTYRLRLIHTGSAAAIRFSVDYHALTVIEADSTLTQPYTVSSVTLAVAQRYSVLLTTNQHAEPARNYWMRAALKSAVAVPGANADIRGILRYGSGHAAPTAGADPGVPGSGLADLDVAKLVPAAPRTPPPATKAYTVDFSIGGKPDGGAFATMNGTSWQPLQGTTTLLQIVDAARNGSMYAPEGASIQPGGQFLITEDNIEVVDVLLVNTGPGDHPFHLHGHTPYIMGFGTGAYTGTGLNTVNPFMRDTFAVPGSGWLLMRIVTDNPGIWTLHCHIAWHMAAGLMMQISSLPSKAAQLDIPRDIVRQCSA

SEQ ID NO: 38030 - protein, 335 aa, Pyrococcus horikoshii OT3
MIGEIYYSRKFLLHKPKNYHPENPGRLWIILTAIRELGLENQIVEPLPIDEAQIYKIHDPEYVKRIRGLSLNGGGYLDADTYVNQRTWEVAMLALGASRLATLSALEYGGLNMALVRPPGHHAGRRGRALGAPTLGFCIFNNSAMAALTCKEETGEALIIDFDAHHGNGTQEIFWNDPEVVHVDLHERDIYPGSGDVNEIGGYNARGSKINIPMPHYSDDGDYIYAWNEIVLPIVERVKPKVIIVSAGFDGFKGDGLTTLKLTEIFYSYAGVTLRKYPLVLILEGGYSSGLKRGFPAFIMGYEEDKIKRDEGQPSYETLKVVEEVKDILSPWWPL

SEQ ID NO: 38031 - protein, 531 aa, Magnaporthe grisea 70-15
MPSLGFLKKKRTRDGNNDNSSQPASPVTPTAAQSFEQAQVLGAPSAINNSHAHTQQQSYLVPQPGYSVGTEVQAQQPQMNSISQQQQQAFAPPAHTPSPGTIDPQQSLPSISNLMNPAVQQQNSQPSANFQPQSQSQSQSQSQFPLPPSHGNGDQSQQQNFQVQQQIQSQQDAMDIQPSQVQDQSHSQQAQPQHQPQHHVQHHVNHAHQGSQDQQTRVTKGKYSLTDFEILRTLGTGSFGRVHLVQSRHNQRFYAVKVLKKAQVVKMKQVEHTNDERKMLGEVKNPFLITLWGTFQDCRNLYMVMDFVEGGELFSLLRKSGRFPNPVAKFYAAEVTLALEYLHAKNIIYRDLKPENLLLDRHGHLKITDFGFAKRVPDKTWTLCGTPDYLAPEVVSNKGYNKSVDWWSLGILIYEMLCGYTPFWDSGSPMKIYENILKGKVRYPAYINPDAQDLLQRLITADLTKRLGNLYGGSQDVRNHPWFAEVTWDRLARKDIDAPYTPPVKAGAGDASQFDRYPEETERYGQTGHDE

SEQ ID NO: 38032 - protein, 382 aa, Magnetospirillum magnetotacticum MS-1
MKGLDDSIGRFLDGLDQAGRKRGLRPAEPMPAGRIRMGGRELINFSSNDYLGLSRNPVVVERARRWLNEFGAGVGASRLVTGHLAALEALEAKIARAKQTEAALVLASGWQCNASVLPALLDKALWGAEPLVFADKLIHASLHTGLELSDARRYRYRHDDLDHLESLLKAHSDKTGPRFIVTETVFSMDGDVTDMAALAELAKRWDAFLYVDEAHATGIMGPQGFGLSPGMGADLAMGTFSKGMGSFGAYVACSAQLRSYLINRASGLIYATGLPPAVLGAMDAALDLVPSLEGERARLHLMARRLRDGLRAAGLDCGASASQIVPLILGDEHRTLAVAKALEARGILGIAIRPPTVTNGTSRIRIRPFKTTNSNAQYRESC

SEQ ID NO: 38033 - protein, 314 aa, Glycine max
RTNSLLVVSIGGLVVNVIGLIFFHEEHHHAHGHVLSGSSCSHSHTHTESHSHHTHHHHDHDHDHDHLHSHGHETTIHGSNQEYISVSSDCRDDSCPGDHGHHHNHNHCSHERKHHGEWADHEDKHSIPSFKHHDAAAHCHDHGEHHDQTGHSCHEDAPLVRKEHDHRHIDHNMEGIFLHVLADTMGSVGVVISTLLIKYKGWLIADPACSIFISILIVSSVIPLLKNSAEVLLQRVPRAHEHELKDALINVSKIRGVYGIQKFHSWNFTNTDVVGTMHLHVSTDTDKTSAKSQVLHLLRNAGIKDVTLQVECVG

SEQ ID NO: 38034 - protein, 634 aa, Magnaporthe grisea 70-15
MTAPEDAPAQIDAQIRVRSPAVREASSSETGSVSDTVKAMDPCHAPDASIKRTTSSASQHPIPAAEPPRAVVGEAVGADATDEEAAVTPPKDHEKSTPPEAGRTKLETTVIVVSLATALFLAALDISIVTVAVPAIASDFRSTVGYTWIGSAYLLANAAMAPIWGKISDIWGRKQILLLAACVFWVGSLLCALSVSMAMLIASRAVQGMGGGGIIIMVNVCISDLFSIRKRGVYFGVMGLVWAVAGAVGPVVGGLFTTKVSWRWCFYINLPIAGVGIIILFFVLKLHNPRTPMRQGLAAVDWLGSLTIIAGTVMVLMGLTLGGVTAPWASPTVLCLLIIGAAMVAVFVLVELRVAPYPVVPMHLFKVRSNVASLSVAFAHGFTTMSGFYYLPLYFQAVLGADALMSGVYILPYAVVLSLVSVAAGWYIKKTGKYLPPIIFGFVFLTLGMGLLTDLGGPSPSGPNWAKLMIYTIITGIGVGPNFQSPLIALQTTVAQRDMASATATYQFVRQMSTSISVVVGGVIFQNSMDGQHARLLERLGPDIAALLTGQDAAASVEAVAAIPGEEGLIARDAFWISLRTMYIVYTVAAGVGLVLCFFIGTRKLSTEHEEHKTGLKTLARVRSKVTGEKQEAD

SEQ ID NO: 38035 - protein, 416 aa, Magnaporthe grisea 70-15
MLSRGLRIGRAVQAPLRQRTQAPFVAVARRCVTTDAASAHVEKGAVPKSDDEPFTVNLSDESFETYELDPPPYTLDVTKKDLKQMYYDMVVVRQMEMAADRLYKEKKIRGFCHLSTGQEAVAVGIEHAINKSDDVITSYRCHGFAYMRGGTVRSIIGELLGRREGIAYGKGGSMHMFAKGFYGGNGIVGAQVPVGAGLAFAQKYTGGKKASIILYGDGASNQGQVFEAFNMAKLWNLPALFGCENNKYGMGTSASRSSALTDYYKRGQYIPGLKVNGMDALAVKAAVKYGKEWTESGNGPLVLEYVTYRYGGHSMSDPGTTYRTREEIQRMRSTNDPIAGLKQKMMDWDVVTEEELKSLDKKARSFVNEEVKAAEAMVPPEPTQQILYEDIYVKGTEPEYIRGRTPDELFYFENKN

SEQ ID NO: 38036 - protein, 255 aa, Triticum aestivum
  misc_feature (129)..(129): Xaa can be any naturally occurring amino acid
  misc_feature (149)..(149): Xaa can be any naturally occurring amino acid
  unsure (1)..(255): unsure at all Xaa locations
MGCMGWARRAARRLASELRSRGPGPWPLSSSTVLVLGVPSGDQSRGFCSVRRFAGDSAAAAAVEEPENGLAAGDLQFVDFPGGKLSFVGEMNFLPESQRERINCYRVLDDDGGTIYSSRFQEVSKELAXKMYSNMVTLQIMDTIFYEAXQRQGKKFPFYLTSNGEEAINIASAAALSAQDIVLPQYREPGVLLWRGFTLQEFANQLFGNKLDYGKGRQMPIHYGSNRLNYFTVSSPIATQLPQAVGAAYSLKMDK

SEQ ID NO: 38037 - protein, 138 aa, Brassica napus
MEKVVDLFGVGEANTQKLLEGGNDLSQIQQGLFIGSVAEANNKDLLKASNVTHVLTIAVALSPPYPDDFVYKVIEVVDRSETDLTVYFDECYSFIDQAIESGGGVLVHCFMGISRSVTIVVAYLMRKHGIGFSKAMEI

SEQ ID NO: 38038 - protein, 604 aa, Perilla frutescens
MATVTASQFAAYVHGGATSVDSKSNLGQIGQRAQLITHNGLRSVNRADALQMRNNVKVSAKRVGQVPINKDRCETSGMTLIFVSAECGPWSKTGGLGDVVGGLPPALAANRHRVMTVSPRYDQYKDAWDTSVVVEIQVGDKVETVGFFHCYKRGVDRVFVDHPLFLEKVWGKTKSKVYGPSAGVDYEDNQLRFSLLSLAALEAPRVLNLTSNKYFSGPYGEDVVFVANDWHTAVLPCYLKTIYQPKGIYTNAKVVLCIHNIAYQGRFAFSDFYKLNLPDQLKSSFDFMDGYEKPVKGRKINWMKAGIIESDRVLTVSPYYANELVSGPDKGVELDNILRKCTVTGIVNGMDTQEWNPATDKYIDNHYDITTVMDGKPLLKEALQAEVGLPVDRNVPLVGFIGRLEEQKGSDILVAALHKFIEMDVQVVILGTGKKEFEKQIEQLEELYPGKAVGVAKFNVPLAHKITAGADFMLVPSRFEPCGLIQLHAMRYGTIPICASTGGLVDTVKEGFTGFHMGAFNVECDAVDPADVLKIVKTVGRALEVYGTPAFREMINNCMSLDLSWKGPAKNWETVLLSLGVAGSEPGVEGDEIAPLAKENVATP

SEQ ID NO: 38039 - protein, 625 aa, Cryptococcus neoformans var. neoformans JEC21
MVKYILVCGGVISGIGKGVIASSTGLILKTAGLKVTSIKIDPYMNIDAGTMAPTEHGEVYVLNDGGETDLDLGNYERYLDVSLNKDNNVTTGKVYQHVIDRERRGDYLGKTVQIVPHLTNAIQDWVERVSKVPVDETGEEPDVCIIELGGTVGDIESMPFIEAMRQFQFRVGHENFALVYVSLIPVVGGEQKTKPTQAGVRDLRGLGLLPDLIACRCTEKLLTATMEKVSMFCHVSPRQVLGVHNVSSTYHVPLLLQEQGMLKFLWERLSLSSINMRPELKARGEKIMEKWQVLTTGLERCFETVEIVLVGKYITLEDSYMSVVKSLEHAAMRCGRKLILHWVDSSDLELTMQTENPIKFHNAWQAVCSARGIIVPGGFGLRGTEGMIAAAKWAREQNIPYLGICLGFQVAVIEWARHVCGLEKANSAELVPDSPHPVICFMPEISKTHMGGTMRLGLRPTIFEPNTEKSKLRRLYGSRNIAWERHRHRYEVEPKYVEQLEAPGGMRFIGKDERGERMQMLELDDHPYFVGLQAHPEFCSRPLNPSPPFVGLIAAACGLDVLEEQLANNEKNYVDPHPESDKVIPESEAATQAGKGKSQSVEGVRVKHEDVVDALGKKLDEVAEI

SEQ ID NO: 38040 - protein, 325 aa, Yarrowia lipolytica CLIB122
MVLHNPNNWHWVDKNCIDWTRQYFQEKLPGLEATSKGGEVKAKIDKVTSVEGDVDVSQRKGRLISLFDVEIKLAFSGTNGPEEASGTITIPEVAYDTEEDEYQFNVVITDDSFAKLPVKELVLSDIVPELRKRLFQFKDDLLTTNGASIQHPADQVKSKLTLGNLNKQSESAGANSSNSTTAAAAPKSSGSYNTTNIELDPIFHTSADQLYQTFLDPQRVAVWSRAPPQIEEKEGSEFALFGGNVSGKITKLEKNKRIVQSWRLKEWKEGHFSTLDLEFKQGTSDTKLIVKWSGIPVGQEDVARGNFEEYYVKSIQVAFGFGAPL

SEQ ID NO: 38041 - protein, 298 aa, Gemmata sp. Wa1-1
MWLLWPRGQERASLSAGGSVRVVAVSPDGVLIAAAGEDKVIRVWDAGATTTKFALEGHAGKVFGLAFSPDSKTLCSCGDDRTVRLWDAATGTPGAVITASDATVECVAFAPDGKTLASAGSDHIVRLWTVPDGKPIRTLKGHTRRIHALVFADSKTLASAGEDGGVRLWNWPTGALIGQLPVEKHRVHALTVSADGKVLAAAATGGPRWWTLADKSERPKVTSAGGTRAVAFDRDGKFLATGHEDGAVKLWSALDGAEVKTLTGHRGAVFGVGFTPDGKTLVSAGSDGTVKLWDVPVK

SEQ ID NO: 38042 - protein, 591 aa, Phanerochaete chrysosporium
MDQSAYSRFGRANHARRRLNLCLRPTPVYLPLLLALLAIAFVTSVDARAVSYDSRDTRDLASDEATVAVPRADNFVVGSIRGQPPTTRHFNFVVSQMNGSPDGFSKPMLVVNGLFPGPTIEANQGDRIVVHVTNTLSTRTTIHWHGLYQNGTNYYDGTAGVTECGIPPGQSLTYNFTVDDFSGTTWWHAHYDTQYTDGVTGALIVHPRKYPRGFPTWDEDIVVELTDIYHAFSATILSEYLGGGGGPLTGLQLETPDSGAINGIGQYNGSTKYTNLNLKPNKTYRLRLIHTGSAAAIRFSVDYHALTVIEADSTLTQPYTVSSVTLAVAQRYSVLLTTNQPAEPARNYWMRAALKSAVAVPGANADIRGILRYGSGHAAPTAGADPGVPGSGLADLDVAKLVPAAPRTPPPATKAYTVDFSIGGKPDGGAFATMNGTSWQPLQGTTTLLQIVDAARNGSMYAPEGSSIQPGSQFLITEDSVEVVDILLVNTGPGDHPFHLHGHTPYIMGFGTGTYTGTGLNTVNPFMRDTFAVPGSGWLLMRIVTDNPGIWTLHCHIAWHMAAGLMMQISSLPSKAAQLDIPRDIVRQCSA

SEQ ID NO: 38043 - protein, 387 aa, Arabidopsis thaliana
MATMITNLRRDLIEEIISRVPLRSMKAVRLTCKSWNNISKSEIFTKMQIDKATTREGKTMMISVMPHNLSLMSVAVDDVDPSVEFKGQLSFLCNQVSIHKVIHCEGLLLCFLKDHTRVVVWNPYSGQTRWVKLRYPHPPSPSKWDWFRYALGYEDKGSCRSVKFLRFLDYLPEEPENQNVCYEIYDFDSDLWTTLDVTSHSWICYSSCGVFLKGNAYWPVVKSSSEANIDHIIYFDFTRESFGPPLPLPFGATDRGYSYVNLSCVKEEKLAAFFQHYISYKYEFEIWVTTKIEAEMVSWSKFLRMDLGPNIDIPITFFIDEEKKVFMGFEHREYPKRFINIIGEAKYLRKLDLQVPQGQYCCPPLCSYVPSSIQIKKPALRQKDRAK

SEQ ID NO: 38044 - protein, 336 aa, Pyrobaculum aerophilum str. IM2
MIVYYSEVFKRHVPPYRHPEAPDRLDYLIEGVREAGGRVKEPKMREDVWQLIHLAHDKNYVNLINKLCEKGQGEIDGDTYVSPGTCEAAALAVSAVADAVEKRETALIAARPPGHHAGFMGRALTAPTQGFCIFNTAAIAALYVGEGAAVVDIDVHHGNGTQEILYDKDLLYISTHQHPATLYPGTGYPEEVGEGRGEGYNINIPLPPQVGDDVYIKVVDEVVIPLLRQYDPKVIVVSLGWDAHRDDPLADLNLSLKSYLYFFDQVLKMQKLTVVVLEGGYNRSVIKNGTEALLRLALRGEFAPKESATETAHSVYKHFETTMREVRQYAGRYWRL

SEQ ID NO: 38045 - protein, 188 aa, Phanerochaete chrysosporium
MDQSAYSRFGRANHARRRLNLCLRPTPVYLPLLLALLAIAFVTSVDARAVSYDSRDTRDLASDEATVAVPRADNFVVGSIRGQPPTTRHFNFVVSQMNGSPDGFSKPMLVVNGLFPGPTIEANQGDRIVVHVTNTLSTRTTIHWHGLYQNGTNYYDGTAGVTECGIPPGQSLTYNFTVDDFSGTTWWQ

SEQ ID NO: 38046 - protein, 397 aa, Candida glabrata CBS138
MSLRALRGFLIGTRNLPLRGIRYQSTSTGTSNNVDVNENTDDLYLMKQQELNNVVVQQLKEFSKMSQAEIDNYLNNSKGAEPTEKEQLLEQELRNLFQKYSQDNQLLGGLDTAEEGHSRAVEEILQTKRFPFLVPSASDKPYSPQELYLRQAHHGSHVAKLGARVEQVFSPNRDIYTPPTPEKMSIEKLMAAGVHLGQSTSLWRSSTQPFIYGEYNGIHIIDLNQTLAYLKRAAQVVEGVAERGGVILFLGTRKGQKVALEEAAKRTHGYFVSTRWIPGTLTNSTEISGGWEKHEVDLQDKPTGRPLQTDEKSRIVKPDLLVVLNPTENRNALNEAMKSRVPTIGIVDTDSEPSFLTYPIPGNDDSLRSVNLLLGVLAKAGERGVKNRIRKASEMKQ

SEQ ID NO: 38047 - protein, 349 aa, Porphyromonas gingivalis W83
  misc_feature (30)..(30): Xaa can be any naturally occurring amino acid
  misc_feature (100)..(100): Xaa can be any naturally occurring amino acid
  misc_feature (111)..(111): Xaa can be any naturally occurring amino acid
  misc_feature (240)..(240): Xaa can be any naturally occurring amino acid
  misc_feature (262)..(262): Xaa can be any naturally occurring amino acid
  misc_feature (304)..(304): Xaa can be any naturally occurring amino acid
  misc_feature (333)..(333): Xaa can be any naturally occurring amino acid
  unsure (1)..(349): unsure at all Xaa locations
MTKRLFLPEWAPQEAVQLTWPHDRTDWAYXLDEVETCFVRIATAILRHERLIVVCPDRKRVFGLLPPELHHRLYCFELPSNDTWARDHGGISLLADGRPXIADFAFNGWGXKFAAHHDNLITRRLHALGLFAEGVTLDNRLAFVLEGGALETDGEGTLLTTDSCLFEPNRNAGLSRTAIIDTLKESLGVSRVLSLRHGALAGDDTDGHIDTLARFVDTRTIVYVRSEDPSDEHYSDLTAXEQELKELRRPDGQPYRLVPLPXAEALYDGADRLPATYANFLIINGAVLVPTYDSHLDAVALSVXQGLFPDREVIGIDCRPLVKQHGSLHCVTXQYPQGFIRLEHHHHHH

SEQ ID NO: 38048 - protein, 444 aa, Phanerochaete chrysosporium
MDQSAYSRFGRANHARRRLNLCLRPTPVYLPLLLALLAIAFVTSVDARAVSYDSRDTRDLASDEATVAVPRADNFVVGSIRGQPPTTRHFNFVVSQMNGSPDGFSKPMLVVNGLFPGPTIEANQGDRIVVHVTNTLSTRTTIHWHGLYQNGTNYYDGTAGVTECGIPPGQSLTYNFTVDDFSGTTWWHAHYDTQYTDGVTGALIVHPRKYPRGFPTWDEDIVVELTDIYHAFSATILSEYLGGGGGPLTGLQLETPDSGAINGIGQYNGSTKYTNLNLKPNKTYRLRLIHTGSAAAIRFSVDYHALTVIEADSTLTQPYTVSSVTLAVAQRYSVLLTTNQPAEPARNYWMRAALKSAVAVPGANADIRGILRYGSGHAAPTAGADPGVPGSGLADLDVAKLVPAAPRTPPPATKAYTVDFSIGGKPDGGAFATMNGTVRSALCS

SEQ ID NO: 38049 - protein, 426 aa, Salmonella enterica subsp. enterica serovar Typhimurium
MSKSENLYSAARELIPGGVNSPVRAFTGVGGTPLFIEKADGAYLYDVDGKAYIDYVGSWGPMVLGHNHPAIRNAVIEAAERGLSFGAPTEMEVKMAELVTNLVPTMDMVRMVNSGTEATMSAIRLARGFTGRDKIIKFEGCYHGHADCLLVKAGSGALTLGQPNSPGVPADFAKHTLTCTYNDLTSVRAAFEQYPQEIASIIVEPVAGNMNCVPPLPEFLPGLRALCDEFGALLIIDEVMTGFRVALAGAQDYYGVVPDLTCLGKIIGGGMPVGAFGGRRDVMDALAPTGPVYQAGTLSGNPIAMAAGFACLNEVAQPGIHETLDELTTRLAEGLCEAAQEAGIPLVVNHVGGMFGIFFTDAESVTCYQDVMACDVERFKRFFHLMLEEGVYLAPSAFEAGFMSVAHSMDDINNTIDAARRVFAKL

SEQ ID NO: 38050 - protein, 389 aa, Digitalis mariana subsp. heywoodii
MSWWWAGAIGAAKKKLEEDDAPPKHSSVALIVGVTGIIGNSLAEILPLADTPGGPWKVYGVARRTRPAWHEDNPINYIQCDISDPDDSLAKLSPLTDVTHVFYVTCANRSTEPENCEANSKMFRNVLDAVIPNCPNLKHISLQTGRKHYMGPFESYGKIESHDPPYTEDMPRLKYINFYYDLEDIMLEEVEKKEGLTWSVHAPGNIFGFSPYSMMNLVGTLCVYAAICKHEGKVLRFPGCKAAWDGYSDCSDADLIAEHHIWAAVDPYAKNEAFNVSNGDVFKWKHFWKVLAEQFGVECGEYEEGVDLKLQDLMKGKEAVWEEIVRENGLTPTKLKDIGIWWFGDVILGNECFLDSMNKSKEHGFLGFRNSKNAFISWIDKAKAYKIVP

SEQ ID NO: 38051 - protein, 228 aa, Zea mays
MDSEHWISRLAAAKRFYAAQLGHSDRAGMDELEMDEEVRPEFPCPYCYEDHDVGSLCAHLEEGHPFEPQAAACPVCSEMVTKDMVNHITTRHGYLFKNRRRLRRFIIPGSQALSLLSRDPREAHLQVLLGGGGQRSSDNSSSSATNISADPLLSSFGLGFPTSDAEQASKSTVSIPDDATTVKEAPAQARKLSIDSSLTSEERELKRKQARVRATFVQDLLLSTLFGD

SEQ ID NO: 38052 - protein, 1641 aa, Vicia sativa
MDVGGGDEEFRRCNRNGSGRRCKDGALPGNLQCEKHQLCAVERKKNRKETSSGRKRKAEESLLDEDDGGNGLFAGGAGGAGGAGGGVFVEGGVNVGIGSESFNLWQEGEGQQVEVFGEGSGNLGKFLGDGVEFLGGFVEDRNVVGLGQPWSSVGVFGNAGGVAGVGKEDHGSRVDGVCGNDSLAFHSQGIEGLIGEEEGGFGNLYDRSFQALLCQGKVCDEDVNLIGGATGFQGLVGESAFNFSGQDGEGVGNLSQHDGKFDGEKNVGNILEAPSSSNKMKAIGVEEGVELLPSAGVSANEEARGEVLKPLTSRGGRPKGSKNKKKKGVSLVLDGEAVCGSDNAGTIGMGTVEVLENEKSVFCGKSDGEGVDTGEIARTRECSPPENQKSTTEIFLAHGYEVAGVGEISRPLNKEKNVEEVSSEVAVEISRSKKRGRPKGSTKKKVTCSASRKGAGDIATQGSEEKMLIVPYQKDADEFASLTSKLGPALSTRNKLRSTEFEGCKHPGMSSNVRLEENDGTASGLEITTLAPLREAEKGMPFESAKHIENLTTPPIVKRGRPKGSKNKKKTLADQEHIGHGGDIIKLIGMESSEAAVSVGDQELVVQPLVKVRFRMLNPKMGRPKGSKNKKKNVDGEAENGLHKEGKKRGRPKGSVNNPKETGNEKIAKGLVSESSNVHKIERRGRPKGSAPNPKENASRLDAEIEREKNTHVYGILSTTMPHKHIHEESILLLEDHVNKKDDADFVLECSKESGIEKIAKGLVSESDNVHKTHDVEVGDIFYEKEVKETIDHRLEPSDMLGDCETKKEPRNSRCHQCWKKSRTGLVVCSKCKKKKYCYECVAKWYQDKTREEIETACPFCLDYCNCRMCLKKAISSMNGNDEADRDVKLRKLFYLLKKTLPLLQDIQREQRYELEVEATMHGSQLVEEEDIRKAEVDDDDRVYCDNCNTSIVNFHRSCSNPNCEYDLCLTCCTELRLGVHCKDIPTSGNEEMVDAPPESIAWRAETNGSIPCPPEARGGCGTAILSLRRLFEANWIDKLTRGVEELTVKYQPPIMDLALGCSECRSFEEDVAQNSARKAASRETGYDNFLYCPDAVETGETTFEHFQRHWIRGEPVIVRNAYKKASGLSWDPMVMWRAFMGARKILKEDAVNFKAIDCLDWCEVEINAFQFFKGYLEGRRYRNGWPAMLKLKDWPPSNFFEECLPRHGAEFIAMLPFSDYTHPKSGILNLATKLPAASKPDLGPKTYIAYGTSDELSRGDSVTKLHCDISDAVNILTHTAEVKPPPWQSRIIRKLQKKYEDEDMRELYSQDKKEVGLPRKRGRKRRVGFSVDPKTSEKEDTSGRDSTLQGSQGKEEKLDDQESSEPTKIEFDLNASEQEISDSPRFQQFDLNSHDSSLLVPGNDCESMHYDNVQERCSSQGDGSYKGISSVIDDQPCSGTKETKNVNKLNSSDDNCSDIETNNIDSVEKDILSNSLCQNDVHLGTQNGSAVWDIFRRHDVPKLTEYLKKHHREFRHIVNLPVNSVIHPIHDQILYLNEKHKKQLKIEYGVEPWTFEQHLGEAVFIPAGCPHQVRNRKSCIKVAMDFVSPENVRECVQLTEEFRLLPKNHRSKEDKLEIKKMALYAADVAVAEANKLLGAK

SEQ ID NO: 38053 - protein, 323 aa, Zea mays
FCPPDVAANDSDSLWLQCDDIDMDMDMAQLEWLSGLFDDASIPHEPAFPGAAPIIKSSALAAGALLPPDKMGDALLFRSSSPISVLEHGSFNNANGGGGGCSASSESSSASSSSESFSGSGSGSGEGHAWSAPVSPPPVLVIPARARSKRSRPSAFTRAGAEAPTILVPTPMYSSGPSHSDPESIAESSPHPAPPMKKKKKAKKPPAPPAPASSDDNDGDADYEEGGERTEPQGCAVRRCTHCQIEKTPQWRAGPLGPKTLCNACGVRYKSGRLFPEYRPAASPTFVPSIHSNSHKKVVEMRQKAVRSGDPSCDLLQFIRRRD

SEQ ID NO: 38054 - protein, 197 aa, Zea mays
  misc_feature (133)..(133): Xaa can be any naturally occurring amino acid
  misc_feature (186)..(186): Xaa can be any naturally occurring amino acid
  unsure (1)..(197): unsure at all Xaa locations
RGHCSIKDCHVEPCPESKIPVGIKAGHSNKYLKMANNTKELEVCEQANKLGAINSTLSNQSKEAFIDWARYDDSRDHFCELDDERSPAAQYVDLLLNPERYTGYKGTSAWRVWNSIYEENCFKPRSVYRPLNXPLAPSRGEDDGESFYTWLEGLCLEKRVFYKLISGLHASINLHLCANYLLEETXGKPSWGPNIKE

SEQ ID NO: 38055 - protein, 503 aa, Glycine max
MGKHLLLLVLTLHLLLLFATLHVSAAPSTTSPAKIVNGFLSNAVPAFTKWVWSLKATTKTAVSSRSMMKFESGYNVETVFDGSKLGIEPYAVEVLPNGELLILDSANSNIYRISSSLSLYSRPKLVAGSAEGYSGHVDGKLREARMNHPKGITVDDRGNIYVADTTNMAIRKISDSGVTTIAGGKWNRGGGHVDGPSEEAKFSDDLDVVYVGSSCSLLVIDRGNRAIREIQLHFDDCAYQYGSGFPLGIAMLVGAGFFGYMLALLQRRLGTIVASQEAQVPVMVTSSVPPSPYQKPLKSVRPPLIPSEYEPDKQEEGFFGSLGKLLANTGASMVEIIGGLFPSFRRKSLRYQFQRQPLIQQPQKQVNAWPVQESFVIPDEDQPPSIDTRAPTPRKTYPFMSKDAEKMQQLRQSRAFYSGWDGDLQQQQQQQQQKHHRHQYRSSIPHTYYEQSHETTNEIVFGAVQEQDRKQESVVIKPVDYGESMYEHNIRSRMSSMGYGYRY

SEQ ID NO: 38056 - protein, 354 aa, Vibrio parahaemolyticus RIMD 2210633
MLSFLLRSVFLGLATAAVVLLAVPSLRNNVIPVALDQQPKNIASLELSFNQAVRRAAPAVVNIYSRKYVENDRSKLSTQGLGSGVIVSEKGYIITNYHVVAQADQVVVALQDGRAAAAQLVGTDKRTDIAVLRVEGSNLPVIPLNSEYKPQVGDVVLAIGNPYNLGQTTTFGIISATGRSSISDGRQAFIQTDAAINEGNSGGALVNTQGELVGINTASFQQATDLETYGISFAIPAPLASKIMQKIIADGRVIRGYIGIDGQDINAVTARLLGNEHIGGIVVLGIDPNGPASAAGFEKQDIIISIDGNKVQGRQSVMDIVTDLRPGTSVDVGIIRKGKEMTLKVTIAEDKQEA

SEQ ID NO: 38057 - protein, 651 aa, Ralstonia eutropha JMP134
MEALMAMQTETVPVTANDDIGQYLRAQQHKGLLRFITCGSVDDGKSTLIGRLLYESKMLFEDQLAQLEADSKKMGTQGENLDFALLVDGLAAEREQGITIDVAYRFFATDKRKFIVADTPGHEQYTRNMVTGASTADLAILLVDARRGVQTQTRRHSYLVSTLGIRRVVVAINKLDMVDYSREVYDRIEAEYRDFARQIGLNDIVCIPMSALHGDNITQPSANTPWYHGPTLMAHLESVPVDRAPAQDESFRLPVQWVNRPNLDFRGFAGTVSAGEIRCGDRVRALPSGRESRVASIVGADGECGQAMRGQAVTLTLADEIDVSRGDVLACAEDPAEVADQFEATLVWMNEDAMLPGRPYLLKLGTRTVGVTVAQPKYKVNVNTLEHLAARTLELNEIGVCNLHLDQPVAFAPYTRNRDLGGFIMIDRLTNNTVGAGMLHFALRRAQNVHWQAIDVDRRAHAALKHQAPRIVWFTGLSGAGKSTIANLVEKRLHALGHHTYLLDGDNVRHGLNKDLGFSEADRVENIRRVAEVARLMLDAGLVVLVSFISPFRSEREMARALAGDGEFAEVFIDTPLDVAELRDPKGLYRKARRGELKNFTGIDSPYEPPERPEIRIDTTADTAEQAAERIVAWLQETGLQESGAPSTNGR

SEQ ID NO: 38058 - protein, 455 aa, Vibrio parahaemolyticus RIMD 2210633
MKKPLLALTVLSLSLSSIITPITATAALPLSVDGQQLPSLAPMLEKVTPAVVSIAVEGKQVQTSRIPEQFQFFFGPDFPMEQTRERPFRGLGSGVIIDAQKGHIVTNYHVIKGADEIRVRLYDGREYDAELVGGDEMADVALLKLEKAKNLTQIKIADSDKLRVGDFTVAIGNPFGLGQTVTSGIVSALGRSGLNVENFENFIQTDAAINSGNSGGALVNLNGELIGINTAILGPNGGNVGIGFAIPSNMMRNLTEQILEFGEVKRGMLGVQGGEVTSELAEALGYESSKGAFISQVVPDSAADKAGLKAGDVVVSVNGKSIDTFSELRAKVATLGAGKKITLGVIRDGKSKSFDVTLGESTNMKAKAETLHEGLKGAELSNTTPSDAIQGVKVSSVAENSPAAQYQLKQGDIIIGVNRQRVKNLAELRSIVDKHKGVLALNIQRGERTIYLVIR

SEQ ID NO: 38059 - protein, 514 aa, Aspergillus oryzae
MVHLAQVHRNADLDSTIKRVDSIQLENTDEDGFYSSVYGTRFATEQLPQTEMPEREMPREVAYRMIKDELSLDGNPMLNLASFVTTYMEDEAEKLMTESFSKNFIDYEEYPQSAEIQNRCVNMIARLFNAPVHSEDEHPMGTSTIGSSEAIMLGTLAMKRRWQNKRKAEGKDYSRPNIVMNSAVQVCWEKAARYFDVEERYVYCTEDRYVIDPQQAVDLVDENTIGICAILGTTYTGEYEDVKAINDLLIERNIDVPIHVDAASGGFVAPFINPKLEWDFRLPKVVSINVSGHKYGLVYPGVGWVVWRSPEYLPKDLIFNINYLGAEQASFTLNFSKGASQVIGQYYQMIRLGKRGYRSIMTNITVTADFLAQELEKMGFIIMSQRRGHGLPLVAFRLPAEREGQFDEFALAHQLRERGWIVPAYTMAPNSNNLKLMRVVVREDFTKSRCDALLSDIKLGLKTLGDMDKAMLDKYTQHVRTHATHSHKSKHNHPHYKGETHSLQGKHGKTHGVC

SEQ ID NO: 38060 - protein, 472 aa, Dechloromonas aromatica RCB
MHRNRNAKIVATLGPASSDRDTIQKLYLNGADIFRLNFSHGTHEDHKRSLETIRDVEREAGRPIGVLLDLQGPKLRLGKFANGPITLAEGDKFRLDLDCDRPGDQTRAPMPHPEIFKALSVQSSLLIDDGRIRLFVEKCGPDFAETRVVAGGTLSDRKGVNVPGSLIPMSAMTDKDRADLDFGLTLGVDWVALSFVQRAEDILEIKKIIDGRAGVIAKLEKPAAIERLEAIVNVSDAIMVARGDLGVEMPPEQVPAIQKRIIRACRSAGKPVIVATQMLDSMVAAPVPTRAEASDVATAIYDGADAVMLSAESASGKYPVAAVKMMDSIISRTESDPYYRVAIDASQPPARANKADAIGSAVRHVADLLHIAVTVAYTSSGTSALSMARERPKAPIIALTPRLATARRLSLAWGLHAVMCHDVVDVTEMTDLACETARRQHFASRGQSVVISAGMPFGRSGTTNLLRIAELS

SEQ ID NO: 38061 - protein, 415 aa, Magnetospirillum magnetotacticum MS-1
MFILLGAVMVLAMHSGFAFLEVGTVRKKNQVNALVKIISDFAVSTIAYFFVGYGVAYGTNFLVGADVLIGKTGNAFAASGYDLVKFFFLATFAAAIPAIVSGGIAERAKFTTQLMATAILVGLVYPLFEGMVWGTRFGFQELMKGWFGAAFHDFAGSVVVHAVGGWIGLGAVLMLGTRLGRYRKDGRLVAFPPSNIPFLALGAWILSVGWFGFNVMSAQVIADISGLVAMNSLMAMVGGILTSLVVGRNDPGFIHNGALAGLVAVCAGSDVMHPIGALVTGGIAGALFVWLFNLCQIKWKIDDVLGVWALHGMCGFLGGVACGVFGQEALGGLGGVSFGGQIAGTVIGAAFGLAGGLAVYGGLKAAFGIRLSDEEEFAGADLSIHQIGAYPEDATTVHDDGLAMSVHSANKRKAG

SEQ ID NO: 38062 - protein, 145 aa, Mycoplasma pulmonis UAB CTIP
MNKTKEQRLKELTTLQYKVTQEGQTEKAFDNEYNNHYEEGIYVDIVDGTPLFKSQDKYNSGSGWPAFTSPIKKDEIVENADFSYGLRRVEVKSKNAQSHLGHVFTDGPKDKGGLRYCINSAALRFIPKKDLEKEGYKEYLKLFED

SEQ ID NO: 38063 - protein, 507 aa, Saccharomyces cerevisiae
MKVLDLLTVLSASSLLSTFAAAESTATADSTTAASSTASCNPLKTTGCTPDTALATSFSEDFSSSSKWFTDLKHAGEIKYGSDGLSMTLAKRYDNPSLKSNFYIMYGKLEVILKAANGTGIVSSFYLQSDDLDEIDIEWVGGDNTQFQSNFFSKGDTTTYDRGEFHGVDTPTDKFHNYTLDWAMDKTTWYLDGESVRVLSNTSSEGYPQSPMYLMMGIWAGGDPDNAAGTIEWAGGETNYNDAPFTMYIEKVIVTDYSTGKKYTYGDQSGSWESIEADGGSIYGRYDQAQEDFAVLANGGSISSSSTSSSTVSSSASSTVSSSVSSTVSSSASSTVSSSVSSTVSSSSSVSSSSSTSPSSSTATSSKTLASSSVTTSSSISSFEKQSSSSSKKTVASSSTSESIISSTKTPATVSSTTRSTVAPTTQQSSVSSDSPVQDKGGVATSSNDVTSSTTQISSKYTSTIQSSSSEASSTNSVQISNGADLAQSLPREGKLFSVLVALLALL

SEQ ID NO: 38064 - protein, 150 aa, Sulfolobus acidocaldarius
MPEFQLQRRLAADIAGVGLNNIKFNPERLEEVEEALTREDIKKLIKERAVIVNPKRGISSGRLKERKHKRRSKGEGRKHGSRKGKSGARTGDKEIWINKIRKIRRYIRWLRDNNVIDKHTYRLLYKRAKGNYFKNLSDVKSYLRQMGHKV

SEQ ID NO: 38065 - protein, 726 aa, Yarrowia lipolytica CLIB122
MSSPPSLSDLSLNDRNPDRHPLKGLHEARGIRKVSLHSRSGSVAEEEEPSSTDSNAATASHPPADQLSEVSAETLARIQAIHMSRMSRDRSHSSPPEPEQEQLQQLQDRTPPSWQTQRPHPHVTTDFGPQLTSPEISPFTTASSVPRNSDHSFSQFQTGSLPKSYTGGVIPPGVTASPLNGPLTGPLTGPLTGPLTGGTKPVSRQSSLSSRRGMRLPGSPLVSDDECSQNPAASTPKPMNLHLPDYSKLSYNGDNNGSSSADSRSRESSSSSNASSTSTTPSCALTGGLTGPTVQTGARLPGRLSSQNSIKRKGPGKLSLSGSPSSSPVTPSDGSAVPLPIAKDQAPAQGAPAQGGGLFAQFSKIVDINTGKLNFAGKASLHSEGIDFSGGTSFRINIDELEPLGELGRGNYGTVTKVLHKPTGITMAMKEVKLELDTAKFAQIIMELDILHKCESPYIVDFFGAFFVEGAVYECIEYMDGGSLDKVYAGGVDEPCLAAITDSVVRGLMFLKEEHNIIHRDVKPTNILINTEGKVKLCDFGVSGNLVASKASTVIGCQSYMAPERIHNPDSGNVTYTANSDIWSLGVSILEIAQGSYPYPPEAYNNVFAQLRAIVSGDPPQLAERFSPEARDFVAQCLQKKPYQRPTYQQLLEHPWLKKYRGVDVGMADFVKKALERGKNATSTSNETTPTGTTIPVSRNNPGLVSRDGRNNMVPALHHSFLNNRQ

SEQ ID NO: 38066 - protein, 463 aa, Sulfolobus acidocaldarius
MGFMDFLAKMGENLPAVSKPKDKPTLTRKLLWTFIGLIVYLLMASIPLYGVTSSNSFLSNFLAQQIIFASSQGTLAQLGIGPVITSGLIMQILVGSKLINVDLTTQEGKSKFTQAEKALALIFIIVESSLFGYVFTRATSNILLPIIVVVQLIIASYIILLLDEMIQKGWGLGSGVSLFIMAGIMKVIFWNMFGIVSVQSQNLPVGFFPLLVSYITSGRNLQEIVLNTSSTTPYQPDLIGLIATVGLTILIVYLVNTNIYIPVTTQRLRGIRTTVPLNFLYVSSIPVIFVSVLGADIQLFASLANSISNSASGILTDIANAFFFPPQGVPHSVYALVVDPVGAAIYAAVFIVLSIVFGMLWIDVAGLDPKTQAEQMIRSGIEIPGMRTNPRIIEGILSKYIYALGFFSSLIVGLIAVVATFLGTYGTGVGLLLAITIAMQYYNLLAYERTLEMYPLLKRIVGE

SEQ ID NO: 38067 - protein, 389 aa, Digitalis ferruginea
MSWWWAGAIGAARKKLEEDDAPPKHSSVALIVGVTGIIGNSLAEILPLADTPGGPWKVYGVARRTRPAWHEDNPINYVQCDISDPDDSQAKLSPLTDVTHVFYVTWANRSTEQENCEANSKMFRNVLDAVIPNCPNLKHISLQTGRKHYMGPFESYGKIESHDPPYTEDLPRLKYMNFYYDLEDIMLGEVEKKEGLTWSVHRPGNIFGFSPYSMMNLVGTLCVYAAICKHEGKVLRFTGCKAAWDGYSDCSDADLIAEHHIWAAVDPYAKNEAFNVSNGDVFKWKHFWKVLAEQFGVECGEYEEGVDLKLQDLMKGKEPVWEEIVRENGLTPTKLKDIGIWWFGDVILGNECFLDSMNKSKEHGFLGFRNSKNAFISWIDKAKAYKIVP

SEQ ID NO: 38068 - protein, 389 aa, Digitalis thapsi
MSWWWAGAIGAAKKKLEEDDAPPKHSSVALIVGVTGIIGNSLAEILPLADTPGGPWKVYGVARRTRPAWHEGNPINYIQCDISDPDDSLAKLSPLADVTHVFYVTWANRSTEPENCEANSKMFRNVLDAVIPNCPNLKHISLQTGRKHYMGPFESYGKIESHDPPYTEDMPRLKYINFYYDLEDIMLEEVEKKEGLTWSVHRPGNIFGFSPYSMMNLVGTLCVYAAICKHEGKVFRFPGCKAAWDGYSDCSDADLIAEHHIWAAVDPYAKNEAFNVSNGDVFKWKHFWKVLAEQFGVECGEYEEGVDLKLQDLMKGKEAVWEEIVRENGLTPTKLKDIGIWWFGDVILGNECFLDSMNKSKEHGFLGFRNSKNAFISWIDKAKAYKIVP

SEQ ID NO: 38069 - protein, 255 aa, Zea mays
MGRSPCCEKAHTNRGAWTKEEDERLVAYIRAHGEGCWRSLPKAAGLLRCGKSCRLRWINYLRPDLKRGNFTADEDDLIVKLHSLLGNKWSLIAARLPGRTDNEIKNYWNTHVRRKLLGRGIDPVTHRPIAADAVTVTTVSFQPSPSAAAAAAAEAEATAAKAPRCPDLNLDLCISPPCQQQEEEEVDLKPSAAVVKREVLLGGRGHGHGHGGALCFGCSLGVQKGAPGCSCSSSNGHRCLGLRGGMLDFRGLKMK

SEQ ID NO: 38070 - protein, 666 aa, Neurospora crassa
MASPPIPIQSSGRRRGSAARRESRDFHDTIFDTVSLLGTSYLSTAPIAQEILARDLAELEDDEQHERDEECRSDDEEDVEPPIDVGSLPVGHLVSRPGGVAYGTLRPIIASEMQGSPIVCETDVVESRAAERSLLRDNHLLPPKHPRSPDDPLWKKMYRRLFSTKVPVSDKAFEETPLLQEYPLPPSPTISEEINQWERAVAQNMLKTTWQREAQTITKYSRSLIVTFLLHYSVTVTSVFTVGRIGRLELGAVSLATMTANITCYAPVQGLSTCLDTLCAQAFGSGHKKLVGLQLQRMTYLLWLLLLPIATLWWFSGGVLHRIIPDPDTAALAGMYLRVLILGTPGVAAFESGKRFVQAQGLFHATTFVLLIGAPLNVLANWFFVWRMGWGFTGAASAVVFTQNLLPFLLFLYVRFIQGMECWNGLSRHAFSNWGPMIRLALPGMIMVEAQYFAFEVLTLAASQFGSAHLAAQSVLVTVTSTTFNIPFPLSIAASTRVANLIGAKLSDAARTSAKVALCCGIVVGLFNMTLLSSLRFKIPYLFTKDEEVAAIVSKVLPICAVLQLVDALAAISHGLLRGIGRQGIGGFTNLFSYYLIALPISFSTGWALGWQLQGLWFGVAIGLAVVSTVELWYLHQADWEHAVQEAENRLRSDEACHQSQRRESK

SEQ ID NO: 38071 - protein, 451 aa, Cryptococcus neoformans var. neoformans JEC21
MSNYPSEPEFQQAVAEITQTLEPFLAKNPEYRRALDVVQVPERIVQFRVTWERDDGTIAINRGYRVQFNSALGPYKGGLRLHPTVNLSILKFLGFEQIFKNALTGLMMGGGKGGSDFDPKGKTDSEIRRFCYAFMQELSRHIGTDTDVPAGDIGTGGREIGFMFGAYKKYRNENAGILTGKGADWGGSHIRPEATGYGLVYYVTEMLRDLDNTDWKGKRVLISGAGNVAQYAALKVIELGGTVLSLSDSTGALVATGDEGFTPEEIMNIADIKLQRKSLTAFATGSKFQWHEGKRPWTLVSNADIALPSASQNELNDEEAKALIKAGVRYVAEGSNMGCTLDAIKIFEESRTAAKNATDAGVCFYAPGKAANCGGVAVSGLEMAQNSQRLKWTHEEVDAKLKAIMINCYQTCWETGKQYAEAGVVPSLVAGANIAGFVKVANAMREQGDWW

SEQ ID NO: 38072 - protein, 346 aa, Kluyveromyces lactis NRRL Y-1140
MSTTFGNVFRRVNVKTLSFIVGAGALAGSATGTVMEYQDMRNYNNRNYNKQKLAALAAAHVAAKEKYDVAKYQKVYNDIALKIRDEDEYDDFIGYGPVLVRLAWHCAGTWDAKDNTGGPYGGTYRFAMETNDPSNNGLQNAAKFLEPIHEKYPWLSHGDLYSLAGVTAIQEMQGPTIPWRSGRVDQPEDTTPENGRLPDASKDAKYVRCFFHRLNFEDRQVVALLGAHALGKTHLKNSGFEGPWGAATNIFTNEFYNNLLNEKWDLITNDAGNKQYVNDKGWMMLPTDMALVQDPKYLPIVKEFANDQDTFFKEFTKAFVVLLENGIDFPQENKPIKFKTLDAQDL

SEQ ID NO: 38073 - protein, 304 aa, Escherichia coli O157:H7
MSAKVWVLGDAVVDLLPESDGRLLPCPGGAPANVAVGIARLGGTSGFIGRVGDDPFGALMQRTLLTEGVDITYLKQDEWHRTSTVLVDLNDQGERSFTFMVRPSADLFLETTDLPCWRHGEWLHLCSIALSAEPSRTSAFTAMTEIRHAGGFVSFDPNIREDLWQDEHLLRLCLRQALQLADVVKLSEEEWRLISGKTQNDRDICALAKEYEIAMLLVTKGAEGVVVCYRGQVHHFAGMSVDCVDSTGAGDAFVAGLLTGLSSTGLSTDEREMRRIIDLAQRCGALAVTAKGAMTALPCRQELE

SEQ ID NO: 38074 - protein, 345 aa, Synechococcus elongatus PCC 7942
MFLKNYWYPVALAQKVGDRPLSVTLCGEAIALYRDSAGQIHALSDRCVHRGAALSGGWVENDCLVCPYHGWQYDAQGHCRKIPANTEQQRIPFAAKVPHYDAIERYGLVWLFYGDLPEADRPPLPPLPEYDDPAWRTVQGEVTYTTHYTRVTENLMDFAHAPFTHSGSFGAASDPLIEPYKVEQLPDGLRAQTQFTKSAYRGIWKLFNRGDAPRTVTTTITLYMPCIVRTETDLGNGFRFIGYGANLPIDAETTKTFWLTVRTFFTGAWADGDTVRRSLKIIEEDKRIVETQRPKMIPLDDRSETHVAADALQIGYRNLLRQARDRGWAIAESQPADQELVPAAK

SEQ ID NO: 38075 - protein, 615 aa, Mycoplasma pulmonis UAB CTIP
MNKLDQLSINTLKVNSVAAINKANSGHPGIALGAAIISHSLFTRHLNFDIENPNWINRDRFVLSAGHGSSLLYSHLRILGYISEQDLKDFRQLNSLTPGHPEYKHTIGVEATTGPLGQGLAMAVGLALAQAHLNSRFKELDHYTYVLCGDGDLQEGVANEALDLAGHLGLKKLIVLYDSNDVQLDSKVDIVYSSNNKKRFEAMNFNYILVDKVSIENIDKAIEKAKASSKPTIIEIKTIIGEGAHNQGTSDVHGAPLGKNIDVLLKNLNWNNDSFYLPEEVKKYYQETLGKRSSEAFKKFKASSELEKFLSQKPNVDFSELKLENNLATRIYNGKILDFLSSKNSNIIGGSADLTVSTKAAGSDGIFSKTNLSGRNIFFGVREFAMAAISNGMALHSNLIPFSSTFLVFADYLKAAIRLGALMNLKTLYIFSHDSVFVGEDGPTHQPIEQLAMLRSIPNVAVFRPADQREMQGAYAFALNNNGPTVIATTRQNIVSLENSSSQKSQNGYYQLLDSNSEYSLIASGSEVANALEIAKELKLNMYSVPAMNLVEDFPWKRDKTISIEAASTFGWSKLAKYNIGIDRFGLSAPGNLVYKEMKLDIDSLRQKIKSIIEK

SEQ ID NO: 38076 - protein, 563 aa, Archaeoglobus fulgidus DSM 4304
MEHDIVIVGAGIAGMRAAIAAAEKSRKLSIALIAKTYPIRCHSVCAEGGTAAVLREGDSFDLHAWDTVKGADFLADQDAVEFFVRECPKEIIRLENWGCPWSRNEDGTIAQRPFGGHSFNRATYAKDRTGFHEVHTLYERMLMYDNVEIFPEYFITNLAIENGAVQGVSAIQLKTGEMEFFEAKAVIFATGGAGRLYGFTTYSHQVTGDGLAIAYRNGIPLKDMEFFQFHPTGLVPSGILMTEGCRGEGGYLLNKNGERFMKRYAPEKMEIAPRDVVSRAMWTEIIEGRGFEGEYGPYIALDLRHLGEEKIEERLPLIRDAAIKFAGVDPVEEPIPVRPVAHYTMGGIDTNVRCETAVKGFFAAGECACVSIHGANRLGSNSTAECLVFGRVAGEVAAEYALKAKQGKISAEFREKEEKRIFDELLGKSGDESPYQIKKELNETMEANMWIFREEKGLKEAVKKIKELKERYRNVEINDKSRGFNTDLTSAIEIGYMLDLAEVVAIGALKRQESRGAHYRLDYPKRDDENWLKHTLAYYTPEGPKFDYKPVTITKWQPVERKY

SEQ ID NO: 38077 - protein, 73 aa, Arabidopsis thaliana
MSCFFALYDILYGLYNSLGGSVTVEARICKSRSQKFKGPCVSEDNCANVCHTEGFPDGDCDGLLRRCYCNTHC

SEQ ID NO: 38078 - protein, 334 aa, Synechococcus elongatus PCC 7942
MANLDVALLPNHWYAIAASTDLGSTPIAASLLDQQLVVYRTTAGQVVVLDDRCPHRGASLACGQVKGNAIACPYHGWQFDLDGHCAQIPSQQASARIPQAAKVASYPVQERYGLIWVFTGDRDRAAQTPLWELPEYDQAGWRVVQGQFDWAADYRRVTENGMDVAHSPFVHANSFGASGNEVIADFELEKSDLGAQIWIPIEPKANYRGSFNLLGRKQETPKAGRSGAAFHLPNITRIDIEFGNFHLILVGIHQPISATTTRSHWLHVRNFLTAGWADGGTRKRTAKLFQEDQKIIEGIAPLRDRNEISVASDRLQLYYRQLWQQHHSSLVAQG

SEQ ID NO: 38079 - protein, 332 aa, Saccharomyces cerevisiae
MVRVAINGFGRIGRLVMRIALSRPNVEVVALNDPFITNDYAAYMFKYDSTHGRYAGEVSHDDKHIIVDGKKIATYQERDPANLPWGSSNVDIAIDSTGVFKELDTAQKHIDAGAKKVVITAPSSTAPMFVMGVNEEKYTSDLKIVSNASCTTNCLAPLAKVINDAFGIEEGLMTTVHSLTATQKTVDGPSHKDWRGGRTASGNIIPSSTGAAKAVGKVLPELQGKLTGMAFRVPTVDVSVVDLTVKLNKETTYDEIKKVVKAAAEGKLKGVLGYTEDAVVSSDFLGDSHSSIFDASAGIQLSPKFVKLVSWYDNEYGYSTRVVDLVEHVAKA

SEQ ID NO: 38080 - protein, 324 aa, Xanthomonas campestris pv. vesicatoria str. 85-10
MGLLVDGKWQDRWYDTSKSEGRFERSQSQFRNWVTRDGSAGPHGQGGFKAASGRYHLYVSLACPWAHRTLIFRRLKGLESMIDVSIVHWLMRENGWTFADGPGVVGDTESHAQYLYEVYLKADPHYSGRVTVPVLWDRERKTVVSNESADIIRMFNSAFDAIGAADGDFYPQPLREQIDAVNARVYDTVNNGVYKAGFATTQAAYDEAVVPLFESLDWLEARLSAQRYLCGDRLTEADWRLFTTLVRFDAVYVGHFKCNLRRIADYPQLSGFLRELYQMPGIADTVNFQHIKGHYYQSHDTINPNGIVPMGPLLDLDAPHGRGG

SEQ ID NO: 38081 - protein, 324 aa, Xanthomonas axonopodis pv. citri str. 306
MGLLVDGKWQDRWYDTSKSEGRFERSQSQFRNWVTRDGSAGPHGQGGFQAASGRYHLYVSLACPWAHRTLIFRRLKGLESMIDVSIVHWLMRENGWTFADGPGVVGDTEHHAQYLYEVYLKADPHYSGRVTVPVLWDRERKTVVSNESADIIRMFNSAFDEIGAADGDFYPQPLREQIDAVNARVYDTVNNGVYKAGFATTQAAYEEAVVPLFESLDWLEARLSAQRYLCGDRLTEADWRLFTTLVRFDAVYVGHFKCNLRRIADYPQLSGFLRELYQMPGIADTVNFQHIKRHYYQSHDTINPTGIVPMGPLLDLDAPHGRGG

SEQ ID NO: 38082 - protein, 227 aa, Haemophilus influenzae Rd KW20
MELVFIRHGFSEWNAKNLFTGWRDVNLTERGVEEAKTAGKKLLDKGYEFDIAFTSVLTRAIKTCNIVLEESHQLWIPQVKNWRLNERHYGALQGLDKKATAEQYGDEQVHIWRRSYDISPPDLDPQDPNSAHNDRRYANIPSDVVPNAENLKLTLERALPFWEDQIAPAMLSGKRVLVVAHGNSLRALAKHIIGISDAEIMDFEIPTGQPLVLKLDDKLNYVEHYYL

SEQ ID NO: 38083 - protein, 317 aa, Zea mays
SGAARDTFSPPFGDFAAQRSSFTPEAYPVKWSGKRYFSPPFGDFATQRSSFTSEAYPVKWNGKRYPISPPQAYVAETTLAPGHDDLHVENGMLFTRNRLFPGAILPEGTKFAGNGFPDPRRFFFREDVDTIPFSYRQVDTILRTFGIPRGSKKADQVAATLRTCEAKSPEPHTCATSMQAEVDFAASSLATRISDLRAIATVVHGKKDAARYTVAPNGVARIGKAGDAMVPCHLMAYPYMVHYCHRSVDVEALRVELMGLGDDHAAAASHAIAIAMCHANTTSWDARYFQMLNATRGEEICHFMPHNYVLWLPAAAL

SEQ ID NO: 38084 - protein, 600 aa, Saccharomyces cerevisiae
MLCSVIQRQTREVSNTMSLDSYYLGFDLSTQQLKCLAINQDLKIVHSETVEFEKDLPHYHTKKGVYIHGDTIECPVAMWLEALDLVLSKYREAKFPLNKVMAVSGSCQQHGSVYWSSQAESLLEQLNKKPEKDLLHYVSSVAFARQTAPNWQDHSTAKQCQEFEECIGGPEKMAQLTGSRAHFRFTGPQILKIAQLEPEAYEKTKTISLVSNFLTSILVGHLVELEEADACGMNLYDIRERKFSDELLHLIDSSSKDKTIRQKLMRAPMKNLIAGTICKYFIEKYGFNTNCKVSPMTGDNLATICSLPLRKNDVLVSLGTSTTVLLVTDKYHPSPNYHLFIHPTLPNHYMGMICYCNGSLARERIRDELNKERENNYEKTNDWTLFNQAVLDDSESSENELGVYFPLGEIVPSVKAINKRVIFNPKTGMIEREVAKFKDKRHDAKNIVESQALSCRVRISPLLSDSNASSQQRLNEDTIVKFDYDESPLRDYLNKRPERTFFVGGASKNDAIVKKFAQVIGATKGNFRLETPNSCALGGCYKAMWSLLYDSNKIAVPFDKFLNDNFPWHVMESISDVDNENWDRYNSKIVPLSELEKTLI

SEQ ID NO: 38085 - protein, 170 aa, Arabidopsis thaliana
  misc_feature (10)..(10): Xaa can be any naturally occurring amino acid
  misc_feature (22)..(22): Xaa can be any naturally occurring amino acid
  misc_feature (24)..(25): Xaa can be any naturally occurring amino acid
  unsure (1)..(170): unsure at all Xaa locations
SGLAITFFAXGLCFSLFAPAFXLXXTNDQWNRLKQGVPKLVVYTAFFYFSVSCFIIALILNVVFLYYPVLGLPKSSFKAYLNDWNGRYWAFLAGFLCGFGNGLQFMGGQAAGYAAADSVQALPLVSTFWGVVLFGEYRRSSRKTYLLLFCMLFMFISAVAVLMASSGHRK

SEQ ID NO: 38086 - protein, 549 aa, Staphylococcus xylosus
MNKQWWKEAVAYQVYPRSFNDSNNDGIGDLPGVIEKLDYLNELGIDVIWLSPMYKSPNDDNGYDISDYTDIMDEFGTMDDFNLLLESVHQRGMKLILDLVVNHTSDEHPWFIESKSSKDNPKRDWYIWQEPKPDGSEPNNWESIFNGSTWEYDDTTGEYYFHLFSKKQPDLNWGNKEVRHAIFEMMNWWFEKGIDGFRVDAITHIKKSFEAGDLPVPEGKTYAPAFDVDMNQPGIQSWLQEMKEKSLSQYDIMTVGEANGVNPENAVEWVGENEGKFNMIFQFEHLGLWNTGDSKFDVKAYKDVLNRWQKQLENIGWNALFIENHDQPRRVSTWGDDQNYWYESATSHAIVYFLQQGTPFIYQGQEIGMTNYPFESVETFNDVAVVNEYNIVKSQNGDVSALLEKHKMENRDNSRTPMQWNNQTNSGFSEHSPWFPVNPNYKTINVADQQQDPNSILNFYKSLITLKKSDDIYTYGTFDLVDKNNEQVFAYTRTLNNKKVLIVANLTNQTATFKYDNSINQDNILLHNYKNEAIDINAMKPFEAFVLST

SEQ ID NO: 38087 - protein, 399 aa, Burkholderia fungorum LB400
MSLFSAVELAPRDPILGLNEAFNADTRTTKVNLGVGVYFNEEGKIPLLRAVRDAEKARVDAALPRGYLPIEGIAAYDAAVQKLLLGNDSPLIAAGRVVTAQALGGTGALKIGADFLKRLNPNAKVAISDPSWENHRALFEGAGFEVVSYPYYDAHTHGVNFDAMLSALNSYAAGTIVVLHACCHNPTGVDLNIEQWKQVVEVVKARNLVPFLDIAYQGFGDNIEADAAAVRLFAAAELNVFVSSSFSKSFSLYGERVGALSIITASKEEAARVLSQLKRVIRTNYSNPPTHGGSVVAAVLASPELRATWETELAEMRDRIRAMRNGLVERLKASGVDRDFSFVNAQRGMFSYSGLTAPQVDRLREEFGIYAVSTGRICVAALNTRNLDAVANAIAHVLK

SEQ ID NO: 38088 - protein, 250 aa, Zea mays
MAKNYPTVSAEYSEAVEKARRKLRALIAEKSCAPLMLRLAWHSAGTFDVSSRTGGPFGTMKHQSELAHGANAGLDIAVRLLEPIKEEFPILSYADFYQLAGVVAVEVTGGPEIPFHPGREDKPQPPPEGRLPDATKGSDHLRQVFGKQMGLSDQDIVALSGGHTLGRCHKERSGFEGAWTTNPLVFDNSYFKELLSGDKEGLLQLPSDKALLSDPVFRPLVEKYAVDEKAFFDDYKEAHLKLSELGFADA

SEQ ID NO: 38089 - protein, 472 aa, Neurospora crassa
MSYPGYPPASPYGQPPPQGGGYYQQPPPQQHHQQPPYGGPPPHAHYNTYQQPQQGYGQPPPGPPPGQYGAPPPQPYGAPAHSPPPGTYGAAPPPSPSYYPLGPPPAGYGAPPPHGYGQPPGPPPQQSYGAVPPTPTAYTPQPYAVQYPPTPPSPGYGPAMNIPWNPDPDADRLRKAMKGWGTDEKELIRVLADKDPFQINMLRDAFQRRHRRDLIADIKSETSSWFEEGLVMLARGPLLNDVHMLFNAMDGAGTNEDILNDILLRRSNADLKAIKAEFSRVCHRPLEEMVRGELSMKTERHFMIVLGATRAEDSAPVVKADIDRDVDDLYNATEGKIGTDEMRVCSILSLRNDNQIRAISYEYRQKYARDLDTVIQKEFSGHMKDALLIQLRHGTDKYMLQARLLEDAMAGMGTKDRLLTSRLVRAHWDRNNMRNVRNAYEQRYKKKVAKRVQGETSGDYQRLLMAICGEPI

SEQ ID NO: 38090 - protein, 429 aa, Vibrio vulnificus YJ016
MADKKATLHVEGKAPIELPIMEGSLGTPVIDVRKLGANGYFTFDPGFLATASCESQITYIDGGKGILLHRGYPIDQLANNADYLEVCYILLYGEAPTREQYEKFKTTVTRHTMVHEQIASFFHGFRRDAHPMAVMCGVVGALAAFYHDSLDINNDLHREITAYRLLSKMPTLAAMCYKYSTGQPFIYPRNDLSYAENFLHMMFATPCEEYEVNPVVARAMDKIFTLHADHEQNASTSTVRLAGSSGANPFACIAAGIASLWGPAHGGANEACLKMLEEIGSVDNIPEYVDRAKDKDDPFRLMGFGHRVYKNYDPRATVMRETCHEVLKELNIQDPLLDVAMELERIALSDEYFVSKKLYPNVDFYSGIILKAIGIPVSMFTVIFAISRTIGWIAHWNEMHSDPLNRIGRPRQLYTGEVQRDFQPMHERE

SEQ ID NO: 38091 - protein, 588 aa, Vibrio vulnificus YJ016
MSIPVREFDAVVIGAGGAGMRAALQISEQGLSCALLSKVFPTRSHTVSAQGGITVALGNSHKDDWQWHMYDTVKGSDYIGDQNAIEYMCKNGPESVIELEKMGLPFSRFDNGSIYQRPFGGQSKEFGGEQAARTAAAADRTGHALLHTLYQQNVKHKTMIFSEWYALDLVKNQDGAVVGCTAVCMETGEICYFKSKATILATGGAGRIYASTTNAHINTGDGVGMALRAGVPMQDMEMWQFHPTGIAGAGVLVTEGCRGEGGYLLNKDGERFMERYAPNAKDLAGRDVVARSMMIEIREGRGCDGPWGPHIKLKLDHLGKDVLESRLPGICELSRTFAHVDPVKEPIPVIPTCHYMMGGVPTQVSGQAIKQTADGKDVEVQGLFACGEIASVSVHGANRLGGNSLLDLVVFGRATGLHLGETLAAQAEARDASASDIEASLSRYMRWENSKGGEDPVQIRKDLQRCMQNSFSVFREGDAMATGLEELKVIRERLKDAHLSDKSTEFNTQRIECLELDNLMETAFSTAVAANYRTESRGAHARFDFPDRDDENWLCHSIYNPETEQMSKRDVNMTPVHRDAFPPKVRTY

SEQ ID NO: 38092 - protein, 397 aa, Arabidopsis thaliana
MSLTKSSESVFTEEEEEDSFSGRYTLWIKEALEELPHNFTITDPFISGHPIVFASLGFLKMTGYSREEVIGRNGKVFQGPKTNRRSIMEIREAIREERSVQVSLLNYRKSGSPFWMLFHMCPVFGKDDGKVTNFVAVQVPISGREHHRKKLRNVGDLSSDTSPTFGSCRREVCFGNFVCQDRALPVECDDDEQGLEDWEQCEASESEKLKATEAINNVLSILVHYSELSGRLVCGKRYCLRGVDCLSSSLVISLGRIKQSFVLTNPCLPDMPIIYASDAFLTLTGYKRQEVLGQNCRFLSGVDTDSSVLYEMKECILKGQSCTVQILNYRKDKSSFWNLLHISPVRNASGKTAYFVGVQVEASCRNTEIKELRPETRQLSVVGAVRVAVRSSLMVTC

SEQ ID NO: 38093 - protein, 192 aa, Arabidopsis thaliana
MTSSSGSLKLEIHTDDKTPGKWSVPLGDDVFRRFLSGGGGSEKAVFGEGSLFSPFLFGKYFDPSDAFPLWEFEAEVLLASLRSLGQCRVDWSHTDQAYVLKSDIPVVGKNNVQVYVDINGRVMEISGQWNSNKKAATNSDWRSGRWWEHGYVRRLELPSDADAKYSEAFLSNNDDYSFLEIRIPKINSKNKF

SEQ ID NO: 38094 - protein, 180 aa, Pseudomonas aeruginosa UCBPP-PA14
MLLSALALAGLPLSGWAADCPELLQGQLTKLRSKESIDLCQRYAGKPLVVVNTASHCGFTPQFKGLEALYQRYKGQGLEVLGVPSDDFKQEAADTAETAKICYGNYGVTFAMTQPQHVRGDEAIPLFRQLAEQSGQAPRWNFYKYVVDRQGRVVAQFSSKTTPDDPQLQAAIEKAIASQP

SEQ ID NO: 38095 - protein, 398 aa, Vibrio parahaemolyticus RIMD 2210633
MTFMFSNLPTPVLDPILSLSVAYRNDERPNKVDLGIGVYKNSAGETPIMKAIQMAQDVVVETQKTKSYVGLAGCEEFNQSMIDLLLTGTSAMDRVAAIQTPGASGALRMLGDLMKVAQPDTTVWISNPSYVNHKPVMEAAGLKVKFYHYFSPETKQVDTAKMLDDLAKAGPTDVVLLHGCCHNPTGADIDFSAWQAITELSQKNGFTPFVDIAYQGFGDGLEADAKGLRYMADNVEEMLITTSCSKNFGLYRERTGAAIVVGKNTQDITNAKGKLLTLARSTYTMPPDHGAALVKTILQDANLTSVWKQELSEMQQRLVSLRQSLCNELRNNHNTDQFDFIESHKGMFTVLGFSENQMAQLREDYGIYGVGDGRINIAGLTETHIPYVADAIKKISQP

SEQ ID NO: 38096 - protein, 598 aa, Glycine max
HDTAHWEELYNTRERARQLLANGSSEIPEETTFTNVEQFLEPLELCYRSLCACGDQPIADGSLLDFLRQVSTFGLSLVRLDIRQESDRHTDVMDAITNHLEIGSYREWSEERRQEWLLSELSGKRPLFGPDLPKTEEIADVLETFHVIAELPSDSFGAYIISMATAPSDVLSVELLQRECHVKQPLRVVPLFEKLADLEAAPAAVARLFSIDWYRDRINGKQEVMIGYSDSGKDAGRFSAAWALYKAQEELIKVAKEFGVKLTMFHGRGGTVGRGGGPTHLAILSQPPDTIHGSLRVTVQGEVIEQSFGEEHLCFRTLQRFTAATLEHGMHPPVAPKPEWRALMDEMAVIATEEYRSIVFQEPRFVEYFRCATPELEYGRMNIGSRPSKRKPSGGIESLRAIPWIFAWTQTRFHLPVWLGFGAAFSHVIKKDPKNLQMLQDMYNQWPFFRVSLDLVEMVFAKGDPGIAALYDKLLVSEELWPFGERLRSMFEETKSLLLQVAGHKDLLEGDPYLKQRLRLRDSYITTLNVLQAYTLKRIRDPDYHVKLRPHLSKDYMESNKPAAELVKLNPTSDYAPGLEDTLILTMKGIAAGMQNTG

SEQ ID NO: 38097 - protein, 51 aa, Kluyveromyces lactis NRRL Y-1140
MAAKKSFIIKQKLAKAKNQNRPLPQWYRLKTNNKIRYNAKRRHWRRTKLGL

SEQ ID NO: 38098 - protein, 270 aa, Secale cereale
ERIPERVVHARGASAKGFFEVPHDVSQLTCADFLGAPGVQTPVIVRFSTVVHDRGSPETLRDPRGFAVKFYTREGNFDLVGNNMPVFFIRDGMKFPDMVHAFKPSPKTNMQENWRIVDFSSHHPESLHMFTFLFDDVRIPLNYRHMDGFGVNTYTFISSDGKAHLVKFHWKPTCGVKCLLDDDAVTVGGTCHTHATKDLTDSIAAGNYPVWKVFIQTVDADHEDKFDFDPLDVTKTWPEDIIQLQPVGRMVLNKNIDNFFAENEQLAFCS

SEQ ID NO: 38099 - protein, 500 aa, Ashbya gossypii ATCC 10895
MDDEPVTIHCHGLFFENQAYNDGAAHINQCPIPPGGGKYTYRIKVSEKQWGTYWYHSHFAAQQADGLFGPLVIHSSEEDMLLEEYDEDMVVMVNDYYHDMAATYMADYLAPGNENVEPTPDNGFIQGSGPFKYDSATYIVPHGSARNVSYVGDVAVPTLHLAPERKYRVRLINAGFFAPFNFAVDQHRLEVVEADGTVVDPVELESITMSVGQRYSFFLKREDHSSRDYLVRARFNPFCFEENTDNFDTDVHAILSYENDPGVPAPTGHGWPYDGGNTHCADTNQTMFRTRGAKVPRRSDGLNRPDIFLTLDVSFLIKERQLDRGYFNKHTYKPLGNSCTMHELAFEPDANPIRKLHTESDLETVNQGQYLINLDKRGSIVDIVINNYDDGAHPFHMHGHKFWVLRDSLNGYFHDNYYEDSASLNFENPVLRDTINVSGYGYAVIRFVVDNPGIWPFHCHIGWHMAAGLLLQINALQAEYTEWTDYPATWSSHCRLPGNA

SEQ ID NO: 38100 - protein, 316 aa, Pseudomonas aeruginosa UCBPP-PA14
MPGTPTTQPLRHSHRFDQGNPLAERNTRWAVLLTACMMVAEIAGGWLFNSMALLADGWHMSSHALALGLAILAYGAARRYADDPRFSFGTWKIEVLGSYTSALLLLLVAGLMLYQSVERLLDPSPIHYQQAMLVAALGLLVNLACAWLLRDGHVHHGHGHSHHDHDHHAHRHDLNLRAAYLHVLADAATSLLAIVALAGGLLWNAAWLDPLMGIVGAVLVSVWACGLIRQSSRVLLDAQMDAPVAAEIRAAIASSPLPAELLDLHLWQVGQGKYACLLSLLTTEEGSADYFKRRLAEHEELVHITVEVNPLLPLAA

SEQ ID NO: 38101 - protein, 137 aa, Kluyveromyces lactis NRRL Y-1140
MANVVQAKDNSQVFGVARIFASFNDTFVHVTDLSGRETIARVTGGMKVKADRDESSPYAAMLAAQDVAAKCKEVGITAVHIKIRATGGTRSKTPGPGGQAALRALARSGLRIGRIEDVTPVPSDSTRKKGGRRGRRL

SEQ ID NO: 38102 - protein, 265 aa, Burkholderia pseudomallei K96243
MHTFNDKVALITGGGTGIGAAVARKFVEAGGGVVLLGRRREPLDAVAKSLGAAAIAVAGDAADAHDVRRALDDARAAFGRVDVLVANAGGHGVGSALDTDDASWAQSTRVNLDTAFVCARELLPELIERRGSIVILSSLAGHFAGPNVIGYVTTKHALIGLTRSLARDYGRASVRVNAVCPGWVRTAMADEQMDALRDAHGLATREDAYRLVTRDVPLGRPAQPDEVADTVLYLASPYASMITGTSLLVDGGASAVDLPTIEFAR

SEQ ID NO: 38103 - protein, 176 aa, Bacillus halodurans C-125
MEKRLERAMFAGGCFWCMVQPFDKQPGIESVVSGYAGGTVENPTYEQVKTGTTGHYEVVHITYVPELFPFEKLLSLYWPQIDPTDPDGQFHDRGPQYRTAIFYENEEQRALAERSREALEKSGKFKKPIVTSILPMATFYPAEEEHQQFYKKNPMAYKEDREKSGRDEFIYKHWGK

SEQ ID NO: 38104 - protein, 149 aa, Staphylococcus aureus subsp. aureus MSSA476
MERTFLMIKPDAVQRNLIGEVISRIERKGLKLVGGKLMQVPMELAETHYGEHQGKPFYNDLISFITSAPVFAMVVEGEDAVNVSRHIIGSTNPSEASPGSIRGDLGLTVGRNIIHGSDSLDSAEREINLWFNENEITSYASPRDAWLYE

SEQ ID NO: 38105 - protein, 269 aa, Zea mays
  misc_feature (262)..(262): Xaa can be any naturally occurring amino acid
  unsure (1)..(269): unsure at all Xaa locations
MAAATSSSTYLAIGRKTLNPAPSVATAATSVSFPATQHPCLVAASADRRRAVAAKVSSPSVIGTAMPSLDFETSVFKKERVSLAGHEEYIVRGGRDLFPLLPEAFKGIKQIGVIGWGSQGPAQAQNLRDSLVEAKSDIVVKIGLRKGSKSFEEARAAGFTEESGTLGDIWETVSNSDLVLLLISDSAQADNYEKIFSHMKPNSILGLSHGFLLGHLQSLGFDFPKSISVIAVCPKGMGPSVRRLYVQGKEINGAGIMASFVXHQDGDGR

SEQ ID NO: 38106 - protein, 365 aa, Glycine max
  misc_feature (43)..(43): Xaa can be any naturally occurring amino acid
  misc_feature (333)..(333): Xaa can be any naturally occurring amino acid
  unsure (1)..(365): unsure at all Xaa locations
MQIFVKTLTGKTITLEVESSDTIDNVKSKIQDKEGIPPDQQRXIFAGKQLEDGRTLADYNIQKESTLHLVLRLRGGMQIFVKTLTGKTITLEVESSDTIDNVKAKIQDKEGIPPDQQRLIFAGKQLEDGRTLADYNIQKESTLHLVLRLRGGMQIFVKTLTGKTITLEVESSDTIDNVKAKIQDKEGIPPDQQRLIFAGKQLEDGRTLADYNIQKESTLHLVLRLRGGMQIFVKTLTGKTITLEVESSDTIDNVKAKIQDKEGIPPDQQRLIFAGKQLEDGRTLADYNIQKESTLHLVLRLRGGMQIFVKTLTGKTITLEVESSDTIDNVKAXIQDKEGIPPDQQRLIFAGKQLEDGRTLADYNI

SEQ ID NO: 38107 - protein, 211 aa, Oryza sativa
MDSDHWISRLMAAKRQYALQRAQNHHHATATATATAASHSHLDRYGYDDVEPEDEVRPDFPCPYCYEDHDITSLCAHLEDEHPFESKVVRHHRLRRVAVPSNHALSLGGRDLQETYLKVLLGNSSRSSGTNAASSVTDSLLSSLVLNLSSSEAEDTAKFSALAVVENNWFKRTLPSKTWKASSSNRRLVPDPFDIDDEPMWLASYLSWKQF

SEQ ID NO: 38108 - protein, 346 aa, Arabidopsis thaliana
MTAAPQTNGHQIFPEIDMSAGDSSSIVRATVVQASTVFYDTPATLDKAERLLSEAAENGSQLVVFPEAFIGGYPRGSTFELAIGSRTAKGRDDFRKYHASAIDVPGPEVERLALMAKKYKVYLVMGVIEREGYTLYCTVLFFDSQGLFLGKHRKLMPTALERCIWGFGDGSTIPVFDTPIGKIGAAICWENRMPSLRTAMYAKGIEIYCAPTADSRETWLASMTHIALEGGCFVLSANQFCRRKDYPSPPEYMFSGSEESLTPDSVVCAGGSSIISPLGIVLAGPNYRGEALITADLDLGDIARAKFDFDVVGHYSRPEVFSLNIREHPRKAVSFKTSKVMEDESV

SEQ ID NO: 38109 - protein, 517 aa, Zea mays
MAAIASASPRTLIPPRPRHHGAAPSPSTSDVSSLRLLRAHPRHVRRSRGVSISMPVARSRSFVFSPRAVADSKSSQTCLDPDASTSVLGIILGGGAGTRLYPLTKKRAKPAVPLGANYRLIDIPVSNCLNSNISKIYVLTQFNSASLNRHLSRAYGSNIGGYKNEGFVEVLAAQQSPDNPNWFQGTADAVRQYLWLFEEHNVMEFLILAGDHLYRMDYEKFIQAHRETNADITVAALPMDEKRATAFGLMKIDEEGRIIEFAEKPKGEQLKAMMVDTTILGLDDVRAKEMPYIASMGIYVFSKDVMLQLLREQFPEANDFGSEVIPGATSIGKRVQAYLYDGYWEDIGTIAAFYNANLGITKKPIPDFSFYDRFAPIYTQPRHLPPSKVLDADVTDSVIGEGCVIKNCKINHSVVGLRSCISEGAIIEDSLLMGADYYETEADKKLLAEKGGIPIGIGKNSCIRRAIIDKNARIGDNVKILNADNVQEAAMETDGYFIKGGIVTVIKDALLPSGTVI

SEQ ID NO: 38110 - protein, 553 aa, Lolium perenne
KFASKFVHSSINKNRCSINCVVWTPTGRRLITGSQSGEFTLWNGQSFNFEMILQAHDQAVRSMIWSHNENWMVTGDDGGAIKYWQSNMNNVKVNKTAHRESVRDLSFCRTDLKFCSCSDDTTVKVWDFARCQEERSLTGHGWDVKSVDWHPTKSLLVSGGKDYLVELWDAKSGRELRSFHGHKNIVQCVKWNQNGNWVLTASKDQVIKLYDIRSMKELESFRGHNKDVTALAWHPFHEEYFVSGSYDGGIFHWLVGHETPQIEISGAHDNSVWDLAWHPVGYLLSSGGNDHATRFWCRNRPGDTSRDKFNGGQFQGNDQRSGFVVHGPGGFQMPEPTPGPFGGAIPGIDAQSIPGLPGLPPGPPPLPPGPHPSLLSTGQQQHYQQMPQQQHQFRPPPPNMPQLQPPAHMLPHQQGPRPSLPQLPSMPGQSPVNPPLPPMPHPMAMQGSSNQMMPQMPQHLIGMNQTHPGSGPPNNMPPMGGFPNGMGNIQGAPDSSGMQNFPMGGMYNRPQGQMAPQGQMSIPGLGSYQPGMGNVGLPPPPPQHPPPRGAAPQ

SEQ ID NO: 38111 - protein, 524 aa, Spinacia oleracea
MVSAPSIDTPSATTFDFDSSVFKKEKVTLSGHDEYIVRGGRNLFPLLPDAFKGIKQIGVIGWGSQAPAQAQNLKDSLTEAKSDVVVKIGLRKGSNSFAEARAAGFSEENGTLGDMWETISGSDLVLLLISDSAQADNYEKVFSHMKPNSILGLSHGFLLGHLQSLGQDFPKNISVIAVCPKGMGPSVRRLYVQGKEVNGAGINSSFAVHQDVDGRATDVALGWSIALGSPFTFATTLEQEYKSDIFGERGILLGAVHGIVECLFRRYTESGMSEDLAYKNTVECITGVISKTISTKGMLALYNSLSEEGKKDFQAAYSASYYPSMDILYECYEDVASGSEIRSVVLAGRRFYEKEGLPAFPMGKIDQTRMWKVGEKVRSVRPAGDLGPLYPFTAGVYVALMMAQIEILRKKGHSYSEIINESVIEAVDSLNPFMHARGVSFMVDNCSTTARLGSRKWAPRFDYILSQQALVAVDNGAPINQDLISNFLSDPVHEAIGVCAQLRPSVDISVTADADFVRPELRQA

SEQ ID NO: 38112 - protein, 517 aa, Zea mays
MAAIASASPRTLIPPRPRHHGAAPSPSTSDVSSLRLLRAHPRHVRRSRGVSISMPVARSRSFVFSPRAVADSKSSQTCLDPDASTSVLGIILGGGAGTRLYPLTKKRAKPAVPLGANYRLIDIPVSNCLNSNISKIYVLTQFNSASLNRHLSRAYGSNIGGYKNEGFVEVLAAQQSPDNPNWFQGTADAVRQYLWLFEEHNVMEFLILAGDHLYRMDYEKFIQAHRETNADITVAALPMDEKRATAFGLMKIDEEGRIIEFAEKPKGEQLKAMMVDTTILGLDDVRAKEMPYIASMGIYVFSKDVMLQLLREQFPEANDFGSEVIPGATSIGKRVQAYLYDGYWEDIGTIAAFYNANLGITKKPMPDFSFYDRFAPIYTQPRHLPPSKVLDADVTDSVIGEGCVIKNCKINHSVVGLRSCISEGAIIEDSLLMGADYYETEADKKLLAEKGGIPIGIGKNSCIRRAIIDKNARIGDNVKILNADNVQEAARETDGYFIKGGIVTVIKDALLPSGTVI

SEQ ID NO: 38113 - protein, 466 aa, Arabidopsis thaliana
MQDSGSPPLSYLTQREAAEIDETLMGPLGFSIDQLMELAGLSVAASIAEVYKPEEYSRVLAICGPGNNGGDGLVAARHLHHFGYKPFICYPKRTAKPLYTGLVTQLDSLSVPFVSVEDLPDDLSKDFDVIVDAMFGFSFHGAPRPPFDDLIRRLVSLQNYEQTLQKHPVIVSVDIPYGWHVEEGDHEDGGIKPDMLVSLTAPKLCAKRFRGPHHFLGGRFVPPSVAEKYKLELPSYPGTSMCVRIGKPPKVDISAMRVNYVSPELLEEQVETDPTVQFRKWFDEAVAAGLRETNAMALSTANKDKKPSSRMVLLKGFDENGFVWFTNYESKKGSDLSENPSAALLFYWEILNRQVRIEGPVERIPESESENYFHSRPRGSQIGAIVSKQSSVVPGRHVLYDEYEELTKQYSDGSVIPKPKNWGGFRLKPNLFEFWQGQPSRLHDRLQYSLQDVNGNPAWKIHRLAP

SEQ ID NO: 38114 - protein, 197 aa, Solanum tuberosum
MRVISKLTLLIISIGCIFQVSSLGADASSLLPLILDQMIGSNPANTFLDPFKVLEQIPFGLENREETTLPLSIARVDWKETAEGHVISIDVPGLKKDDIKIEIEENRVLRVSGERKKEEEKNDEQNHWHCVERSYGKFWRQFRLPENADIDTMKAKLENGVLTISFAKLSADRIKGPKVVSIESKQEGKESSVREEL

SEQ ID NO: 38115 - protein, 395 aa, Arabidopsis thaliana
MNSFSHVPPGFRFHPTDEELVDYYLRKKVASKRIEIDFIKDIDLYKIEPWDLQELCKIGHEEQSDWYFFSHKDKKYPTGTRTNRATKAGFWKATGRDKAIYLRHSLIGMRKTLVFYKGRAPNGQKSDWIMHEYRLETDENGTPQEEGWVVCRVFKKRLAAVRRMGDYDSSPSHWYDDQLSFMASELETNGQRRILPNHHQQQQHEHQQHMPYGLNASAYALNNPNLQCKQELELHYNHLVQRNHLLDESHLSFLQLPQLESPKIQQDNSNCNSLPYGTSNIDNNSSHNANLQQSNIAHEEQLNQGNQNFSSLYMNSGNEQVMDQVTDWRVLDKFVASQLSNEEAATASASIQNNAKDTSNAEYQVDEEKDPKRASDMGEEYTASTSSSCQIDLWK

SEQ ID NO: 38116 - protein, 280 aa, Triticum aestivum
MDQYEKVEKIGEGTYGVVYKAKDRYTNETIALKKIRLEQEDEGVPSTAIREISLLKEMQHRNIVRLQDVVHNEKCIYLVFEYLDLDLKKHMDSSADFKNHHIVKSFLYQILHGIAYCHSHRVLHRDLKPQNLLIDRRTNSLKLADFGLARAFGIPVRTFTHEVVTLWYRAPEILLGARQYSTPVDVWSVGCIFAEMVNQKPLFPGDSEIDELFKIFRIMGTPNEETWPGVSSLPDYKSAFPKWPSVDLATVVPTLEPLGLDLLSKMLCLDPTRRINARTA

SEQ ID NO: 38117 - protein, 551 aa, Prochlorococcus marinus subsp. marinus str. CCMP1375
MAKFVFVTGGVVSSIGKGIVAASLGRLLKSRGYSVSILKLDPYLNVDPGTMSPFQHGEVFVTEDGAETDLDLGHYERFTDTAMSRLNSVTTGSIYQSVINKERRGDYNGGTVQVIPHITKEIRERIHRVSANSNADIIITEIGGTVGDIESLPFLEAIREFKGDVGRNDIAYIHVTLLPFINTSGEIKTKPTQHSVKELRSIGIQPDVLVCRSDRNINKELKTKISGFCGVHAEAVIPALDADSIYSVPLSLKKEGLCREILKILELEDHQCDLEEWEALIHQLRNPGPSVTVAVVGKYVRLNDAYLSVVEALRHACIAQNASLNITWVSAEKIETEGPENLLEGIDAIVVPGGFGNRGVNGKITAIQWAREKRIPFLGLCLGMQCAVIEWARNIAGLKEATSSELDPNASHPVIHLLPEQQDVIDLGGTMRLGVYPCRLTPETMGHKLYGEEVVYERHRHRYEFNNSYRNLFVESGYSISGTSPDGRLVELIELKSHPFFTACQYHPEFLSRPGKPHPLFQGLIEAAQLRLPATPQEVFKNTLPNFQKNK

SEQ ID NO: 38118 - protein, 116 aa, Pinus pinaster
TVFTVILYGSPLSVIRLVIHTKSVEFMPSFYFSLFAFLGSVLWMVYGALSGDILIMAPNFVGIPLGLSQMALYCIYWNNSPVRVEATKLEAGGELKSIEQNIKEDIELYTEDIEKA

SEQ ID NO: 38119 - protein, 429 aa, Sinorhizobium meliloti
MSEKSATVTFGGKSADLPVRSGSIGPDVVDIGSLYKQTTMFTYDPGFTSTASCESKITYIDGDEGVLLHRGFPIEQLAEHGDFLEVCYLLLYGELPTKAQKADFDYRVTHHTMVHEQMSRFFTGFRRDAHPMAVMCGCVGALSAFYHDSTDITDPHQRMVASLRMIAKMPTIAAMAYKYHIGQPFVYPKNDLDYASNFLRMCFAVPCEDYVVNPVLARAMDRIFILHANHEQNASTSTVRLAGSSGANPFACIAAGIACLWGPAHGGANEAALNMLAEIGTADRIPEYIAKAKDKNDPFRLMGFGHRVYKNYDPRAKIMQKTTHEVLAELGHKDDPLLEVAMELERIALTDEYFVEKKLYPNIDFYSGITLKALGFPTTMFTVLFALARTVGWIAQWNEMIEDPEQRIGRPRQLYVGAPLRDYVPITKR

SEQ ID NO: 38120 - protein, 232 aa, Hordeum vulgare subsp. vulgare
VPMFENMDEQLLDAMCDRLKPMLYTEDSCIIREGDPVNEMLFVMRGYLESMTTNGGQSGFFNSNVLKGGDFCGEELLTWALDPAAVSNLPSSTRTVKTLSEVEAFVLRADDLKFVATQFRKLHSKQLQHTFRFYSQQWRTWAACFIQAAWHRYCRKKLEDSLFEKEKRLQAAIVSDDSTKLSLGAALYASRFAGNMMRILRRNATRKARLQERVPARLLQKPAEPNFFAVGE

SEQ ID NO: 38121 - protein, 392 aa, Arabidopsis thaliana
MAIRLPLICLLGSFMVVAIAADLTPERYWSTALPNTPIPNSLHNLLTFDFTDEKSTNVQVGKGGVNVNTHKGKTGSGTAVNVGKGGVRVDTGKGKPGGGTHVSVGSGKGHGGGVAVHTGKPGKRTDVGVGKGGVTVHTRHKGRPIYVGVKPGANPFVYNYAAKETQLHDDPNAALFFLEKDLVRGKEMNVRFNAEDGYGGKTAFLPRGEAETVPFGSEKFSETLKRFSVEAGSEEAEMMKKTIEECEARKVSGEEKYCATSLESMVDFSVSKLGKYHVRAVSTEVAKKNAPMQKYKIAAAGVKKLSDDKSVVCHKQKYPFAVFYCHKAMMTTVYAVPLEGENGMRAKAVAVCHKNTSAWNPNHLAFKVLKVKPGTVPVCHFLPETHVVWFSY

SEQ ID NO: 38122 - protein, 552 aa, Cryptococcus neoformans var. neoformans JEC21
MGQTLSEPMTEKHTTDVVRGKQFWVGLSDMQGWRISMEDAHSVHLYLPPSSDDSKPHSPASDVPAQPEGSTVTNHNEPEVANAMFGVFDGHGGQTVAKFAGTTLHSRLSALDAYKSGDYITALTQAFIKTDEDLRADPSFLNDPSGCTAVVGLITTDGRIIVANSGDSRSVLGYQGQAKALSNDHKPTNEEETARITAAGGFVEFGRVNGNLALSRAMGDFEFKQNFSLAPEKQIVTVVPEIITHELDGEEEFLVLACDGIWDCLTSQQVIDFTRRAIANGDPLGKICENMMVKCLAKDSSTGGIGCDNMTVVIVALLNGRTPEEWQAWVKERVEQKVGHDTPESIPDVFPQNSGPSNSGFAGSGFRVAGGAGGLANIASILGASGITFRPAYDSDDDDDGIQLMGDGPVSPDKLSSPGLIDNEAVEGGTKPKDVTGQLEKEEEETMFGGEGKKGSVRLLDEDGDSSMDSDDSDSTTTGNDPAPQPIPSSSHQATHSPIPPNFSSIGSPTVPTPQELQGLQASNRSEPQGDAYSDAVKVEGLMDKSESPLNL

SEQ ID NO: 38123 - protein, 57 aa, Cryptococcus neoformans var. neoformans JEC21
MAFTCSDIFKIILAIILPPLGVFLERGCGADLLINILLTILGYIPGIIHALYIILKY

SEQ ID NO: 38124 - protein, 435 aa, Burkholderia vietnamiensis G4
MSDSYFPRWRVQPAGAASRMVGPDERLAWPQMVAMGVQHVVAMFGSTVLAPLLMGFDPNLCIFMSGIGTLLFFVLVGGRVPSYLGSSFAFIGLVIAVTGYGGSGPNPNIPVALGGIVACGVVYVALGALVQAIGTRWIETLMPPVVTGAVVAVIGLNLAPIAVRGVSASTFDSVMALVTVLCVGGVAVFARGMVQRLLILVGLVIAYAIYAVATNGMGLGKPIDFSIVAHAAWFGVPRFRAPVFDPHAMLMLAPIAVILVAENLGHIKAVSAMTGTNLDRYVGRAFIGDGLATIVSGSVGGTGVTTYAENIGVMAVTRIYSTLVFALAALIAIGLGFSPKFGAVIQTIPGPVLGGVSIVVFGLIAVTGARIWVVNKVDFSDNRNLIVAAVTLVLGAGDFSLKFGGFALGGIGTATFGAIILYAILRKEKEPGPVV

SEQ ID NO: 38125 - protein, 332 aa, Aeropyrum pernix K1
MSHSYSVPKKFPTTVVGSYPKIGPASEAIKKRRAGEISEEEFHRIARESIRMVVEDYIWAGVDIISDGEQTREDMVVYFAERLEGYREGDWVRVFDNVYFRKPIVAGRVRWVRPMIIEDWEYARSISAGRPVKFIITGPYTMLEWSFDLHYGDRRELIFDLARAIRREIDEALARGAEYIQVDEPALSTRPFKEEAELLKEALDIIFKGVGAKRIVHICYGELERILPYILDYPVDQFDLEMKNSNFRLLPYLKEYGYDKEIGYGVIDVHSFQVESVGEVKEAIDRLMKMDIVGPEKVYVDPDCGLKRLPRDVARAKLKNMVEAARLAREEW

SEQ ID NO: 38126 - protein, 404 aa, Prunus persica
YQGVYPVKCNQDRFVVEDIVRFGSPFRFGLEAGSKPELLLAMSCLCKGNPEALLICNGFKDFEYISLALFARKLALNTVIVLEQEEELDVVIDLSKKLGVRPVIGARAKLKTKHSGHFGSTSGEKGKFGLTTTQILRVVKKLDQLGLLDCFQLLHFHIGSQIPSTALLADGVSEAAQIYCELVRLGAHMKFIDIGGGLGIDYDGSKSSDSEISVSYSLEEYAAAVVRAVLNVCDRKSVKHPVICSESGRALVSHHSVMIFEAISSSACDDVPPMSAFALQYFIEGLTEEARADYRNLSAAAIRGEYEACLTYADQLKQRCIDQFKEGSLGIEQLATVDGLCDMVSKAIGASDPVRTYHVNLSVFTSIPDFWGIGQTFPIVPIHRLDQRPAVRGILSDLTCDSDG

SEQ ID NO: 38127 - protein, 377 aa, Kluyveromyces lactis NRRL Y-1140
MGIMTTRKGPMQRFNVESTLVVPIVCLCWYSISSFGSQVTKRILTECPMPLFLGEFQFIFIGLSAFITCFVGYYVPPIRRLFPEGIFPNYSDTGTKIILRPSKDVLYTVFPLGLFQFIGKYYGHRATSLVPVSTVASVKTLSPIFIILAQKLLKRNELKLNKAIYLSLMCVMLGVWVIVYTDTKNLAPKINSAESDDNTGSSSYYGILFAILSMLIFVGQNMYAKNIFTYRTNELPTTNKYDATWQKTSPKKYDKLTLMMYISTVGFLLSIGWFVTLELPTLCSNFFNEPHDIEIPWRLIMLNGVLHFLQSMITFYLIGEISTLSYSIANIMKRIAIISFSWMYTSHHITSVQLLGMVLNVTGLFFYKRLMKFKNTE

SEQ ID NO: 38128 - protein, 553 aa, Listeria monocytogenes str. 4b F2365
MKEKDWWKKSVVYQIYPKSFNDSNGDGVGDIQGIIEKLDYLKELGVDVIWLSPVYDSPQDDNGYDIRDYQKIYEEYGDMATFDQLLQGLHDREMKLVMDLVVNHTSDEHKWFEESRKSKDNPYRDYYFWREENEINNWGSIFSGPAWELDEKTGEYYLHLFSKKQPDLNWENPKLRQDVYNMMKFWLDKGIDGFRMDVINFISKNTDFPDGPVPDGQIYGDAGNDFCNGPRIHEFLQEMNQEVTSKYDVMTVGEMPGASTTDAQIYTNPANNEVDMIFTFEHMNLDSDGDNKWDLKPIYLPDLKENMSEWQVALQENGWNSLYWNNHDQPRIVSRFGNDNRFRVRSAKMLATCLHMMKGTPYIYQGEEIGMTNVHFETLDDYRDIETLNMYKERKEQGHSHESIMQSIYTKGRDNARTPYQWDNSENAGFTTGTPWLKVNPRYTEINNEEALKNPDSIFYYYQNLIKLRKTTEIITTGNYRLLLPKDEAIFAYERYTENEKLVVLCNFTEEEQVISDENILNEIQKGSVLVNNVPNIIEGTLRPYEAIVYQIK

SEQ ID NO: 38129 - protein, 311 aa, Colwellia psychrerythraea 34H
MKPILVMTRPLPFPELKANGESIETRLFEGDFSVFAQAQVICSTSLDALDHNFITQLPESIKLIANIGVGYDNIDLAAATAKGIAVTNTPVVTEDTADLAFSLILAASRQLTANEKFLRNGQWSATNPIGCLGKTVHGAKLGIIGFGEIGQAVARRAKAFNMEIFYHGPRRKIDAEVSLEAVYFENLTDMLAASDIISINCPLNENTHHLINADTIATMRPDAILVNTGRGPLIDESALVGAMKKGHLFAAGLDVFEHEPEIHDQLLTLPNVTLTPHIGSATSQCRGAMAACAIGNILAQMEGRILLTSVN

SEQ ID NO: 38130 - protein, 625 aa, Ashbya gossypii ATCC 10895
MSIATTPSIPIPNPTSQLTGPTQDTSKKTLHRSQVPRSPRTSSVTPPLMVEQPSRGTMHDAGISGAERRVSLPSLNNLLNYSHTHSNVRGSLDDLRNVENESHDILNTGANGNIKPEGASVPGSKSIPRALPNPVHANQVVLVDPTYYDQRRESLEFLADTALNSSKSSSISGISPEAPKVAANDDTTAPISTNENPQYLELIAQILVLKNSMFRNMIRWPIGETGSSALIDSIPKSELQQLLAESRKLTTVTRDLLHLKTKREPQGSEQQDENGQKREVRSPEEKKNLQTVLPGLSQVTKLEAKGSALPPIQRLPMPPPSSTARVAPQWDGDFRQFRFPSVAQMDDASKTPSQAGPGPSYGTMQAGFSAQDGHKRNSSGHLRGGTYSVSLKPYPPQPSLVEQKIPAQLQHTEGRGQFPPLAQPTFHGNRAYGEIPGRRQTVEGLRPSHALPPPPVFHRMSIAQPNPQFREQMQGVLHVSGTHRHVLSEPTLPTIVMAPDASVSAATPKTPNRRKRQRRTASTSGGGIGGASAGVCLHCQERDTPEWRRGPYGNRTLCNACGLFYNKLIKKFGTKEANMVMHYRRRVFPDDRRVPDVVEVPETFIKLLDQRHDLDDKYAVLQPSG

SEQ ID NO: 38131 - protein, 535 aa, Bacillus cereus ATCC 14579
MTKYIFVTGGVVSSLGKGITAASLGRLLKNRGLNVTIQKFDPYINVDPGTMSPYQHGEVFVTDDGAETDLDLGHYERFIDINLNKYSNVTTGKIYSSVLQKERRGEYLGGTVQVIPHITNEIKERVYRSGRETNADVVITEIGGTVGDIESLPFLEAIRQIKSDIGRDNVMYIHCTLIPYLKAAGEMKTKPTQHSVKELRSLGIQPNIIVVRTEMPVSQDMKDKLALFCDIDTKAVIEARDADTLYAVPLSLQEQNMDQIVCDHLKLDNPAADMTEWTALVNKVRNLSKKTKIALVGKYVELQDAYISVVEALRHAGYSFDTDVEVKWVNAEHVTAENVKELVGDTDGILVPGGFGDRGVEGKIVAIQYARENKVPFLGICLGMQLASIEFARNVLGLEGANSSEINPDTPYAIIDLLPEQKDVEDLGGTLRLGLYPCKLAEETNAYNAYNEPVVYERHRHRYEFNNQFRPDMEKEGFVFSGTSPDGRLVEIIELKDHPWFVAAQFHPELVSRPNRPQPLFHDFVRASITNKESK

SEQ ID NO: 38132 - protein, 441 aa, Escherichia coli K12
MTHDNIDILVVDDDISHCTILQALLRGWGYNVALANSGRQALEQVREQVFDLVLCDVRMAEMDGIATLKEIKALNPAIPVLIMTAYSSVETAVEALKTGALDYLIKPLDFDNLQATLEKALAHTHSIDAETPAVTASQFGMVGKSPAMQHLLSEIALVAPSEATVLIHGDSGTGKELVARAIHASSARSEKPLVTLNCAALNESLLESELFGHEKGAFTGADKRREGRFVEADGGTLFLDEIGDISPMMQVRLLRAIQEREVQRVGSNQIISVDVRLIAATHRDLAAEVNAGRFRQDLYYRLNVVAIEVPSLRQRREDIPLLAGHFLQRFAERNRKAVKGFTPQAMDLLIHYDWPGNIRELENAVERAVVLLTGEYISERELPLAIASTPIPLGQSQDIQPLVEVEKEVILAALEKTGGNKTEAARQLGITRKTLLAKLSR

SEQ ID NO: 38133 - protein, 619 aa, Flavobacterium sp. 92
MRRSFATLFLPTWPAPLPAAPTAIEHMEPPFWWAGMQHKGLQLMVHGRDIGRMEAALDYPGVRLVSTTRVPNANYLFVDLEIGPEAQPGSFDIVFKGDGRSERYRYRLLAREQGSAQRQGFGPGDAIYQIMPDRFANGDPSNDNVAGMREQADRRHGGGRHGGDIRGTIDHLDYIAGLGFTQLWPTPLVENDAAAYSYHGYAATDHYRIDPRYGSNEDFVRLSTEARKRGMGLIQDVVLSHIGKHHWWMKDLPTPDWINYGGKFVPTQHHRVAVQDPYAAQADSENFTKGWFVEGMPDLNQTNPLVANYLIQNNIWWIEYAGLSGLRIDTYGYSDGAFLTEYTRRLMAEYPRLNMVGEEWSTRVPVVARWQRGKANFDGYTSHLPSLMDFPLVDAMRNALSKTGEENGLNEVYETLSLDYLYPEPQNLVLFGGNHDMARMFSAAGEDFDRWRMNLVFLMTMPRIPQFYSGDEILMTSTVKGRDDASYRRDFPGGWAGDKANAFSGAGLTSQQRAAQDLVRKLANWRKNQPVIHNGRLMHFGPEENTWVYFRYNKDKRIMVAMNNNDKPMTLPTARFQEMLKGAPSGVDFLSGKTVGLGRELRLAPKSVVVIELPGLPEA

SEQ ID NO: 38134 - protein, 120 aa, Glycine max
MAKNSFKLSNPLEIRMAESTRIREKYQDRVPVIVEKAEQSDVPDIDKKKYLVPADLTVGQFVYVVRKRIKLGAEKAIFVFVKNTLPPTAALMSAIYEEHKDEDGFLYMTYSGENTFGSAC

SEQ ID NO: 38135 - protein, 405 aa, Vibrio sp. Ex25
MAGVLGMILAGGEGSRLRPLTESRSKPSVPFGGSYRLIDFALNNFVNADLMRIYVLTQFKSQSLFHHLKKGWNINGITDRFIDPIPAQMRTGKRWYEGTADAIYQNLRFMELEEPEQVCIFGSDHIYKMDIKQMLNFHSEKQASLTVSALRMPLKEASQFGVIEVDSEGRMIGFEEKPANPKSIPGDPDYALVSMGNYVFEAQVLFSELVEDADNEASSHDFGKDIIPKMFPRGDVFVYDFSTNKISGEREEVYWRDVGTIDAYWEAHMDLLEKDAPFSLYNRKWPLHTYYPPLPPATFTDSDNGRVQIIDSLVCNGSYVRGSRIEKSVLGFRSNIASACDISECILLGDVKIGEGCVLRRVIVDKDADIAPGTQIGVNLQEDKKHFHVSEEGIVVIPKGARVGY

SEQ ID NO: 38136 - protein, 445 aa, Bacillus halodurans C-125
MAKDESYLIKPLLDRNYPCVSYGKGAALYDMDGKRYLDACSGAVTASIGHGVDEVVQAMYEQARKVSFVYRSQFTNEPAERLAMKLAEQLPGQLNHSFFVNSGSEATETAIKISIQYWQERGRPEKTLILSRWMSYHGITQGALSLSGHYERRQRFEGMLDRLPFLSPPYPYRQVREMSGVDYAEELDHLIEQIGPHRIAAFIAEPIVGAAGTALVPGEWYYEALKQVLDQHDILFICDEVMTGMGRTGKDLAIEHWDATPDIVTLGKGLSAGYAPLAATVVADHVLEPIQAGSNLIMSGHTFSANPLSCAAGLAVLHYVKKHDLVKRAATIGEKLIEDLQEIQTASAIVGDVRGKGLLIGLEFVKNKATKAPFPKDAQVAAVIVNEAQRQGLLLYPSAAGLKGEGAGCLIAPPFTLTKEERCELLGKLARTLERVEKQLLGAEK

SEQ ID NO: 38137 - protein, 317 aa, Glycine max
MQVPLIDIDRINDLQVGLNSLQNPSFPIPSQITTSLAYNFCKWGAVILALVATFGSIINRVTIFIIRFRAKAPSLPSLTLNDDNFYTSSSSDDDDDDDNDDDLTYSSSEPEDEPSASSSFIRLDDYFRLRGTDNNNNNNLDDEFQTQNGTHKRCRSIGDIFSLSELANSKSVVKLWDTIGFGLGLDFDDYDGYYVGNAAVPTSSTASPSVVVSAGEGACGNLALEIWDTRLRRRKPTVVAEWGPTVGKTLRVESGGVQKVYVIDDGRYGVTVGDMRKVSTPLESVTESDADTWWDADAIVVSDESFGEQQSMLQQPT

SEQ ID NO: 38138 - protein, 224 aa, Lycopersicon esculentum
MASTTVEPKLEKKEEEVEAEVEENPTGDDEDTGAQVAPIVRLQEVAVSTGEENEHVLLDLKSKLYRFDKEGSQWKERGVGTVKLLKHKETGKVRLVMRQSKTLKICANHLVLPTMSIQEHAGNEKSCVWHAADFADGELKDETFCIRFASVENCKAFKEKVEEIAESQQTKSGQSEEAGAAATELIEKLSVESKDKNDKPEDKEAPAATEEKEDKKEEKAEEKN

SEQ ID NO: 38139 - protein, 405 aa, Gossypium hirsutum
MATEMALVKPISKFSTSSPIFSNSRYGKFTTVRMSSTSQSTTKAAAKGGKKAAKTAIKETLLTPRFYTTDFDEMEALFNTEINKNLNQSEFESLLQEFKTDYNQTHFVRNKEFKEAADKIDGPLRQIFVEFSERSCTAEFSGFLLYKELGRRLKKTNPVVAEIFSLMSRDEARHAGFLNKGLSDFNLALDLGFLTKARKYTFFKPKFIFYATYLSEKIGYWRYITIYRHLKENPEYQCYPIFKYFENWCQDENRHGDFFSALLKAQPQFLNDWKAKLWSRFFCLSVYVTMYLNDCQRTAFYEGIGLDTKEFDMHVIIETNRTTARIFPAVLDVENPEFKRRLDKMVEINEQLLAVGETSDIPLVKNLKRIPLIAALASELLATYLMPPIESGSVDFAEFEPQLVY

SEQ ID NO: 38140 - protein, 455 aa, Kluyveromyces lactis
MMMKWTHHRPNTGVSMSQPKIFRKKRQESRYHGGSQSRYQPNRPNNHHNTAGNVNVNRSLGKRNPRGKFNRPSNGPETSGSRFEGHGSIPRGPRAMGSSAESAGDSHSRNIFGKKPLALISFQDVKSSFQPLAQVGEGTYGKVYKAENVHTGKLIALKRLRLEQERDGFPITSIREIKLLQQLNHPNISLIHEIIVSDKNTISMGFQYMENDLSGMLMDKSIQFSDSNIKHLMKQLFVGLQYLHQQQIVHRDIKGSNLLIDNRGNLKITDFGLAKKLTDVSSPASNTNRVITHWYRPPELLLGATDYKYEVDCWGCGCLLVELFAGAAIFPGSNEVDQFQRILSIMGSPTLEQWPKMLDMPWWFMLVPQISKTYKNVFFDEFSKVPQDALDLASKLLRYDQDTRFTTTEALQHHYFTNEPKPQPLLLGPEFKGSHEYEVKKIRRKERERQKETTV

SEQ ID NO: 38141 - protein, 291 aa, Blumeria graminis f. sp. hordei
MPTDGIPPMLGQSSPLKLRKYEGRLSDDNFRNHVIAAIGEFLGTTLFLFYGFLAAQIINSKPDNLSDAPSLLQLIFVASAFGVSGAVNVWLFYRVSGGHLNPAITIGLTLIGAVPVTRALLLVSVQLLGGILAASLVLAVTPGSLNVQTALGNATSVKQGFFLKMILTATLVLTVFMLAVEKHRTTPLAPLGIGLILFLDVLLAAQFSGGSLNPARSFGPAVVELNFATYHWIYWFGPIAGAVLAAAIFKVLKFLAYETAVAGQDHDGLDVYRLIDDAGGHEVDREIQLEV

SEQ ID NO: 38142 - protein, 409 aa, Magnaporthe grisea 70-15
MTPSATNGDAAAASSRFHASSTKSAIAAENEYAAHNYHPIPVVFARAQGVNVWDPEGKHYLDLLSAYSAVNQGHCHPELIKALAEQAGRLTLSSRAFYNDVFPVWAAKVRDLFGYDMVLPMNTGAEAVETAIKIARKWAYKVKGVPQGKAHVFSVADNFHGRTIRYNNISDLEIVLEAHGAETAAFIVEPIQGEAGVVVPDDDYLAKVHALCKKHNVLFICDEIQTGIARTGKMLCCNWAGIKPDIVTLGKAISGGMYPVSCVLADKDVMMVVEPGTHGSTYGGNPLGCAVSIRALELVEEGKLADQADHLGRIFREGVEAFKSPIVQQVRGKGLLNAVVIDESAAGGRTAWDLCMLLKSKGLLAKPTHGNIIRFAPPLIITEEELKKALSIIGEALTELPTAEKGDGH

SEQ ID NO: 38143 - protein, 339 aa, Prochlorococcus marinus subsp. marinus str. CCMP1375
MGIPLESVKGDSSSPSEKISLPKTSKEERQNKITTSSAGRGRPAGRVGTDSIGFYLSSIGRVPLLTPAEEIELAHHVQKMKGLLDIPKENINTRQRHQIRMGKRARDRMMAANLRLVVSVAKKYQNQGLELLDLVQEGAIGLERAVDKFDPAMGYKFSTYAYWWIRQGMTRAIDNSARTIRLPIHISEKLSKMRRISRELSHNLGRQPNRVELANELGMEPKDLEDLMAQSAPCASLDSHARGEEDRSTLGELIPDPNYDEPMECMDRNMQKEHLSGWLSQLNEREQKIMRLRFGLDGEEPLTLAEIGRQINVSRERVRQLEAKAILKLRGMTTHQQAA

SEQ ID NO: 38144 - protein, 148 aa, Pinus pinaster
PKFETLSYLPQLTEEQLVKEVEYLLRNKWVPCLEFDLVSFYFFKIDLWRFELSYYVENKIGTNFYYELCVCMCAQEGSISRKYNRSPGYYDGRYWVMWKLPMFGCTEASQVINEVNECAKAYPKAFIRVIGFDNVRQVQCISFIVHKP

SEQ ID NO: 38145 - protein, 491 aa, uncultured bacterium 106
MQKYYKLFTLIMIMGFFWVTPAFTQTSDDLEQMIRASKTRAALVQNVQKAVVHIKVEKIMRSPDGRALNNPRDLYNDEFFRRFFPELQPPDNQQPKKREQPNREFRQKGMGSGSIIDAEGYILTNHHVVGEADEILVVLYNGDERKAKLVGTDPESDIAVVKIEGNGLPVLPMGDSDKILVGEDVIAVGNPFGLIQTVTYGIVSAKGRSNVGINEYENFIQTDAAINPGNSGGPLVSLRGEIIGVNSAIFSQSGGYQGIGFAVPINMARKIMRDLIDKGIVSRGWLGVGIQDVSHDLAKAFKLKSTKGSLITGIMQDTPAQKAGMRKGDVVIRINDKLIQNSNHLRNEIANAGAFAEIEMELIRDGKTVLLKLKLDERPKKIGRMKTLPEPTQTLEQVELLGMTVEELSEENANQLGIEPGIGVVIRNVKSGSPAEKSGLLPGMIVQEAERKAVSNLDTFKEIINGIDSEQGVLLLIRSSNGSRYIFIQEN

SEQ ID NO: 38146 - protein, 704 aa, Saccharophagus degradans 2-40
MTPKKIGVLLVVALCVCAFFYFDLDRYIAVGLMRDWVAQSPVMASTIFALLYFMVAALSLPGTGAMTLLAGAVFGLWWGFLLVSFASTIGATVNMLVSRLLLRDWVTRRFRTSLERVNEGVEREGSFYLFSIRLIPLVPFFVVNPVFGLTNMRATTFYWVSQVGMVPGTLLYVNAGVALGALDSISMGAIFTPQIIGSLVLLALFPWVAKAIVEAVKRKRTLAKYKKPKHFDANLIVIGAGSGGLVAAYIAAAVKAKVILVEKDLMGGDCLNTGCVPSKALIKAAKVAHQTRNAQHLGINAQPEIDFAKVMQHVKGAVKQIEPHDSVERYTSLGVDCVQGEAEIISPYEVRVNGKVLAAKNIIVATGAAPSVRPIEGLDTINYLTTDTVWNLTQLPNRLVIAGGGPIGCEMAQAFARLGSQVTVVQRGDQLLPKEDADVAEFALNTLRNEGVEVLLNAELTAVAAGEGKSVLTISQNENTQHLECDQLLLALGRTPRLQGFGLENIGVAISEQGKLLVDRFLRTSIPTVYACGDVIGPYQFTHAASHQAWYASVNALFGGFKSFSVDYSALPWVTFTDPEIARVGASEMDLKKRGVHYEVTRYSLVELDRAIAEGEAHGFVKVLTEEGKDRILGAVIVGSHGGEMITEFVSAIKHGKGLNAILGTVHSYPTWSEANKAAAGKWKQAHAPQRLLQWVEKFHRWQR

SEQ ID NO: 38147 - protein, 457 aa, Pisum sativum
MQIFVKTLTGKTITLEVESSDTIDNVKAKIQDKEGIPPDQQRLIFAGKQLEDGRTLADYNIQKESTLHLVLRLRGGMQIFVKTLTGKTITLEVESSDTIDNVKAKIQDKEGIPPDQQRLIFAGKQLEDGRTLADYNIQKESTLHLVLRLRGGMQIFVKTLTGKTITLEVESSDTIDNVKAKIQDKEGIPPDQQRLIFAGKQLEDGRTLADYNIQKESTLHLVLRLRGGMQIFVKTLTGKTITLEVESSDTIDNVKAKIQDKEGIPPDQQRLIFAGKQLEDGRTLADYNIQKESTLHLVLRLRGGMQIFVKTLTGKTITLEVESSDTIDNVKAKIQDKEGIPPDQQRLIFAGKQLEDGRTLADYNIQKESTLHLVLRLRGGMQIFVKTLTGKTITLEVESSDTIDNVKAKIQDKEGIPPDQQRLIFAGKQLEDGRTLADYNIQKESTLHLVLRLRGGI

SEQ ID NO: 38148 - protein, 411 aa, Oryza sativa (japonica cultivar-group)
MAAAAARLLERATRTAASCSSALLRSPLDSFSGRFPSFRSPLLRPAPAPSTVFPRGLSDTAFDAQALDTRVPATVITGFLGSGKTTLLNHILTSQHGKRIAVIENEFGEVDIDSSLVASHSSVAEDIVMVNNGCLCCTVRGDLVKMLLKLVKQKGDKFDHIVIETTGLAKPGPVIETFCSDELVSRYVKLDGVVTMVDCKHAMKHLNEVKARWVVNEAVEQVAYADRIILNKTDLVDNAELEVLINKIKLINGMAQMRKTKFGDVDMDFVLGIGGYDLDRIESEVQLHERKETGHCHAGEEHGHQHHHGHVHDSAVSSVSIVSEGVLDLDEVNDWLERLVEEKGEDLYRLKGVISVNESTGRFVFQGVHSMLEGCPAKPWEPDEKRFNKLVFIGRNLDEAALRKAFKGCLL

SEQ ID NO: 38149 - protein, 541 aa, Lactobacillus plantarum
MAKELKFSEDARSAMLKGVDQLADTVKSTLGPKGRNVVLEQSYGSPTITNDGVTIAKAIELDDHFENMGAKLVSEVASKTNDIAGDGTTTATVLTQSIVNEGMKNVTAGANPVGIRRGIEEATKTAVDSLHAMAHEVKTQEDIAQIASVSSASEETGKLIAEAMEKVGHDGVITIEESRGVDTSLDVVEGMQFDRGYLSQYMVTDNDKMEADLDNPYILITDKKISNIQDILPLLQSIVEQGKPLLIIADDISGEALPTLVLNKMRGTFNVVAVKAPGFGDRRKEQLQDIAILTGGTVITDDLGLELKDTTIDQLGQANKVTVTKDNTTIVEGAGSKDAISERVEFIRNQIGETTSDFDKEKLQERLAKLAGGVAVVRVGAATETELKERKYRIEDALNATRAAVEEGFVAGGGTALINVIKDVAALKETGDVQTGINIVKRALEEPVRQIAENAGLEGSVIVEKMKEQKPGVGFNAATDEWVDMIKAGIVDPTKVTRSALQNAASVSALLLTTEAVVAEKPEENAPAAPAAPNPGMGGMM

SEQ ID NO: 38150 - protein, 380 aa, Ashbya gossypii ATCC 10895
MDINHITNPTVTKQVYKGHGAPGAEEVVEITYPATEVVGHGSFGVVFTTVIEQTGEKVAIKKVLQDRRFKNRELEIMKLLQHPNVVDLRYHFYESEPQTNEVYLNLILEYMPQSLYQRLRHFVTGRLLMPRDEIKVYMFQLFKSLNYLHRVARVCHRDIKPQNLLVDAGTLQLKLCDFGSAKQLRPTEPNVSYICSRYYRAPELIFGATNYTTQIDIWSTGCVMAELLLGQPMFPGEFVIVQLAEIIKILGTPTRQEICAMNENYSDHKFPQIKPIPLSKVFKREDAHTVQLLSDVLQYDPTRRFNALMAMCSSYFDEITGHNTEPETVAPGASISELWQGVVHSLQLLHFKPEEFNDLNDLERSLIQNKLIAKQPPNVP

SEQ ID NO: 38151 - protein, 231 aa, Bacillus halodurans C-125
MERRVLVVDDEKKMQVLITVCVSEAGYLVQTAASGLAAMDRLKAEPFDLVLLDIMLPDVDGFSLIAQLRHLQEDVAIIMLTALGETEHIVRGLNEGADDYIVKPFEPDELNARILSVLRRKGGLASRKGEEKQLKVNEKAHDISFAGQSLGLTKTEYRVLHRLLSNPGRTYTREQLLDLAWDRQVEIYDRNVDAHIKNIRDKLEKVGADSTVIQTVWGVGYKYVEHEGINQ

SEQ ID NO: 38152 - protein, 457 aa, Saccharomyces cerevisiae
MTSEPEFQQAYDEIVSSVEDSKIFEKFPQYKKVLPIVSVPERIIQFRVTWENDNGEQEVAQGYRVQFNSAKGPYKGGLRFHPSVNLSILKFLGFEQIFKNALTGLDMGGGKGGLCVDLKGKSDNEIRRICYAFMRELSRHIGKDTDVPAGDIGVGGREIGYLFGAYRSYKNSWEGVLTGKGLNWGGSLIRPEATGFGLVYYTQAMIDYATNGKESFEGKRVTISGSGNVAQYAALKVIELGGIVVSLSDSKGCIISETGITSEQIHDIASAKIRFKSLEEIVDEYSTFSESKMKYVAGARPWTHVSNVDIALPCATQNEVSGDEAKALVASGVKFVAEGANMGSTPEAISVFETARSTATNAKDAVWFGPPKAANLGGVAVSGLEMAQNSQKVTWTAERVDQELKKIMINCFNDCIQAAQEYSTEKNTNTLPSLVKGANIASFVMVADAMLDQGDVF

SEQ ID NO: 38153 - protein, 326 aa, Trichodesmium erythraeum IMS101
MKALVLEKPGIPDSLYITEIPLPQPAAGEIRVQVHAVGLNPVDYKLAAGGFSTWSYPFILGLDVAGVVDAVGTDVTEWQVGEQVYYHGNLSKPGAYAEYTNANALAVAPLPEGISFTKAAAIPCAGFTAYHALHHRLHIQSKQTILIHGGAGGVGSFALQLASLAGLEVITTCSQSNFDYVQKLGAKHLIDYKNQDVVIRVKEITNDRGVDAILDTVGSETATTGLKMLAFNGGIACIAALPDFSNFKSFSLAASIHQIALGGAYLSGDKKAIQDLGKMGREMGELVREKKVSPMLTEVISLEEIPKALNRLKGRHVRGKIVAEIR

SEQ ID NO: 38154 - protein, 82 aa, Triticum aestivum
KILGLEAMIRVQCHKRNHPAAKLMTALRELDLDVYHASVSVVKDIMIQQVAVKMATRVYSQDQLNAALYGRLAEPGTAMQIR

SEQ ID NO: 38155 - protein, 212 aa, Triticum aestivum
  misc_feature (107)..(107): Xaa can be any naturally occurring amino acid
  misc_feature (124)..(124): Xaa can be any naturally occurring amino acid
  unsure (1)..(212): unsure at all Xaa locations
MAPTVMASSATSVAPFQGLKSTAGLPVSRRSNGASLGSVSNGGRIRCMQVWPIEGIKKFETLSYLPPLSTEALLKQVDYLIRSKWVPCLEFSKVGFIFREHNASPGXYYDGRYWTMWKLPMFGXATDATQVINEVEEVKKEYPDAYVRIIGFDNMRQGQCVSFIAFKPRGCEESGKALNSSLTTGQYIKCHGQFWQPLNIAFGFSLPPFNLS

SEQ ID NO: 38156 - protein, 492 aa, Neurospora crassa
MKGYTSSALLLGPALLSQLALAQQAPNGVVHWGIQKRHAPNAPNRLLRRAGPTHQAILQNEQARGGYFATCAMGTPGQKVTLQLDTGSSDVWVPDSTASICNKGACDLGSWQGEFDISYVDGSSSKGDYFTDVFNIGGTTVTNLTMGLGAQTDIAYGLVGIGYAINEAIVGNSHSLSSQYPNLPVAMVDDGLINTIAYSLWLNDLDAGEGSILFGGIDTKKYKGDLTRIRIYPSSNGYYFSFIVALTSLQAISPSGNDTLTSQEFPIPVVLDSGTTLSYLPQDIVDQIWQEVGAEYSDRLELAVIPCSKKSSNGYFSFGFAGPDGPRITVRMDELVLDLTSGDPPKYTSGPNKGQDVCEFGIQNSTSAPYLLGDTFLRSAYVVYDLVNNEIGLAETDFNSTESNIVAFASMSATIPSATQAPNQAAVTNRPVATMPSFAASSGFSDTGGSGNDGKDENASAGMPSAFGVAQMSVMGIAMVFAMVGSGVFVLL

SEQ ID NO: 38157 - protein, 382 aa, Saccharomyces cerevisiae
MRALAYFKKGDIHFTNDIPRPEIQTDDEVIIDVSWCGICGSDLHEYLDGPIFMPKDGECHKLSNAALPLAMGHEMSGIVSKVGPKVTKVKVGDHVVVDAASSCADLHCWPHSKFYNSKPCDACQRGSENLCTHAGFVGLGVISGGFAEQVVVSQHHIIPVPKEIPLDVAALVEPLSVTWHAVKISGFKKGSSALVLGAGPIGLCTILVLKGMGASKIVVSEIAERRIEMAKKLGVEVFNPSKHGHKSIEILRGLTKSHDGFDYSYDCSGIQVTFETSLKALTFKGTATNIAVWGPKPVPFQPMDVTLQEKVMTGSIGYVVEAFEEVVRAIHNGDIAMEDCKQLITGKQRIEDGWEKGFQELMDHKESNVKILLTPNNHGEMK

SEQ ID NO: 38158 - protein, 152 aa, Brassica napus
MSGRRLEGKVVIITGGASGIGAESVRLFTKHGARVVIVDVQDELGQELSVSIGEDKASYYHCDVTNETEVENAVKYTVDKHGRLDVLFSNAGVIEPFVSILDLNLDALDRTIAVNLRGAAAFFKHAARAMVEKGTRGSIICTTSVAAEIAGT

SEQ ID NO: 38159 - protein, 189 aa, Saccharomyces cerevisiae
RANLRTQKRLAASVVGVGKRKVWLDPNETSEIAQANSRNAIRKLVKNGTIVKKAVTVHSKSRTRAHAQSKREGRHSGYGKRKGTREARLPSQVVWIRRLRVLRRLLAKYRDAGKIDKHLYHVLYKESKGNAFKHKRALVEHIIQAKADAQREKALNEEAEARRLKNRAARDRRAQRVAEKRDALLKEDA

SEQ ID NO: 38160 - protein, 588 aa, Staphylococcus aureus subsp. aureus MSSA476
MRLNLMMSRLNSVVIKLWLTIILIVTTVLILLSIALITFMQYYFTQETENAIREDARRISSLVEQSHNKEEAIKYSQTLIENPGGLMIINNKHRQSTASLSNIKKQMLNEVVNNDHFDDVFDKGKSVTRNVTIKEKGSSQTYILLGYPTKAQKNSHSKYSGVFIYKDLKSIEDTNNAITIITIITAVIFLTITTVFAFFLSSRITKPLRRLRDQATRVSEGDYSYKPSVTTKDEIGQLSQAFNQMSTEIEEHVDALSTSKNIRDSLINSMVEGVLGINESRQIILSNKMANDIMDNIDEDAKAFLLRQIEDTFKSKQTEMRDLEMNARFFVVTTSYIDKIEQGGKSGVVVTVRDMTNEHNLDQMKKDFIANVSHELRTPISLLQGYTESIVDGIVTEPDEIKESLAIVLDESKRLNRLVNELLNVARMDAEGLSVNKEVQPIAALLDKMKIKYRQQADDLGLNMTFNYCKKRVWSYDMDRMDQVLTNLIDNASRYTKPGDEIAITCDENESEDILYIKDTGTGIAPEHLQQVFDRFYKVDAARTRGKQGTGLGLFICKMIIEEHGGSIDVKSELGKGTTFIIKLPKPE

SEQ ID NO: 38161 - protein, 210 aa, Zea mays
MADPAEHRPAEEDEEAAAAGEDEDTGAQVAPIVKLEEVAVTTGEEDEDVLVDMKAKLYRFDKEANQWKERGTGTVKLLKHKETAKVRLVMRQAKTLKICANHLVVATTKMQEHAGSDKSCVWHALDFADGELKEEMFAIRFGSVENCKKFKDTVEEIAEEQGKTEVKENEEVSIAAADLVQKLTVTEASKEGDAEEEEAPASDHKKDAKG

SEQ ID NO: 38162 - protein, 647 aa, Arabidopsis thaliana
  misc_feature (575)..(575): Xaa can be any naturally occurring amino acid
  unsure (1)..(647): unsure at all Xaa locations
MEELDRSRAFARDVKRIVVKVGTAVVTGKGGRLALGRLGALCEQLAELNSDGFEVILVSSGAVGLGRQRLRYRQLVNSSFADLQKPQTELDGKACAGVGQSSLMAYYETMFDQLDVTAAQLLVNDSSFRDKDFRKQLNETVKSMLDLRVIPIFNENDAISTRRAPYQDSSGIFWDNDSLAALLALELKADLLILLSDVEGLYTGPPSDPNSKLIHTFVKEKHQDEITFGDKSRLGRGGMTAKVKAAVNAAYAGIPVIITSGYSAENIDKVLRGLRVGTLFHQDARLWAPITDSNARDMAVAARESSRKLQALSSEDRKKILLDIADALEANVTTIKAENELDVASAQEAGLEESMVARLVMTPGKISSLAASVRKLADMEDPIGRVLKKTEVADGLVLEKTSSPLGVLLIVFESRPDALVQIASLAIRSGNGLLLKGGKEARRSNAILHKVITDAIPETVGGKLIGLVTSREEIPDLLKLDDVIDLVIPRGSNKLVTQIKNTTKIPVLGHADGICHVYVDKACDTDMAKRIVSDAKLDYPAACNAMETLLVHKDLEQNAVLNELIFALQSNGVTXRFSDGFRFGLGAEVGISTSRIHARGPVGVEGLLTTRWIMRGKGQVVDGDNGIVYTHKDLPVLQRTEAVENGI

SEQ ID NO: 38163 - protein, 582 aa, Magnaporthe grisea 70-15
MASYALPTSIPHSQHAPGHMHSHSGSPPSFGHISQHTTRKRSSLCEQPLTHSDDDDYHGYNPTHDHNHDHNHDHNHAHDHGGHGHSHSHSRSHSHSHSHDHAHAHTNSCSHSHSNSHSHMHDNHHHSSPEQANGREKSSMSISTNQGFVSSSTRGGKHVLTPSQASFDIKYDAPAQGVTHVHDHGSSAERSRFTNLILPFTAKWPLLHAIVTEKDSRRIFYFMSINFSFMMVQAFYGYATDSLGLLSDSIHMLFDCVALAVGLFASVASKWAPNERFPYGFGKIETLSGFANGVFLILISVEIIFESFERIMEGRATKRLAELFVVSSAGLAVNLIGMWAFGHHHHHGGDDHGHHSHGHSHDHAHDHDHGHDHGHSHSHDHGHGHGHGHSHGGCGGHSHDNENMMGIYLHVMADTLGSAAVIVSTALTYYWPWSGWDPLASFLIAVLILGSAMPLVSSSARRLLLTVPDRVEYGLRDTLSGITGLRGVANYAVPKFWMDDRSGGDNHTAPGDHLLGVMHVTAVRGADMEDVGKRVRSYLAAKGIDITVQVEREGDPSCWCGLNRTMPGQGPAGGHKPSYSVL

SEQ ID NO: 38164 - protein, 637 aa, Pseudomonas fluorescens PfO-1
MSVRRTRKDDGSQWTVADSRSVYGIRHWGAGYFAINDAGRVEVRPNGPSSSPIDLFEQVDQLRKSGLSLPLLVRFPDILQDRVRQLTGAFDANIERLEYQSKYTALYPIKVNQQEAVIENIIATQNVSIGLEAGSKPELLAVLALAPKGGTIVCNGYKDREFIRLALMGQKLGHNVFIVIEKESEVGLVIEEAASLKVKPQVGLRVRLSSLASSKWADTGGEKSKFGLSAAQLLSVVERFRAAGLDQGIRLLHFHMGSQIANLADYQHGFKEAIRYYGELRNLGLPVDHIDVGGGLGVDYDGTHSRNASSINYDMDDYAGVVVGMLKEFCDAQALPHPHIFSESGRSLTAHHAMLVVQVTDVEKHNDDVPQIENKEALPETVQWLVDLLGPTDIEMVTETYWRATHYMSDVAAQYADGKLTLAEKALAEQCYFAVCRRLHNSLKARQRSHRQVLDELNDKLADKYICNFSVFQSLPDTWAIDQVLPIIPLHRLDEEPLRRAVLQDLTCDSDGKINQYVDEQSIETSLPVHALNEGEDYLLGVFLVGAYQEILGDMHNLFGDTDSVNIYQNADGSVYHAGIETHDTIEDMLRYVHLSPEELMTHYRDKCASARISASERTQFLDALRLGLTRSSYLSS

SEQ ID NO: 38165 - protein, 478 aa, Arabidopsis thaliana
RPWDCWKMESVKPLDVVSSGKGKLRRTFAKVINMKKLTGVVPEGNNKVERVKKSQEKVKLDKDLAKNAANLSESFDKLEEEYEKRLAMEALLAKLFATISSIKSGYAQLQYAQSPYDPNGIQKADNLVVAELKTLSELKQSFLKKQLDPNPDRTLVLAEIQELRSVLKTYEIMGKKLECQLKLKDSEIIFLKEKFQESMTQNKLMEKRLNQSGQLCNPLDHNLHLSAVSSTHFVTYLHHTVKSIRGFVKLMVEQMKLAAWDIDMAAELIQPDVLYYKQDHKCFALEHYVCKIMLEAFQLPYFSNESSKKTSREDKAMFFERFTELRSMKPREYLASRPKSRLAKFCRTKYLQLIHPKMEQAFFGHLHQRNQVTAGEFPETSLCTAFLEMAKRVWLLHCLAFSFDPEASIFQVSRGCRFSEVYMKSVSEEAFFSPEQEESSSETEPGVAFTVVPGFRIGKTTIQCEVYLSRSCQRRQSR

SEQ ID NO: 38166 - protein, 593 aa, Francisella tularensis subsp. novicida
MTNHQKVGTLYKRLLLQVKHLMAFSAFGCYRKYIFLSADASMIYLINPILNYGFGPGGGITKQSATILMLMGVGMVGFIALRSVGSFVSQYFIGSLGQKVVYKFRKDIYKRLMDLPASFFDKHSTGQIISRLLYNVDQVTEATSTAIITVVQDGTFVIGLIVVMFVSSWQLSLFLIVVGPFLGLFISIINKKFRNLSRNTQSSMGNVTHTAEETIRNYKEIRIFGAQQKQQNKFFKNLDYTYSQQIRTIALDALTSPVIQIIASLVLAFSLFTIAIFGTNDGGGSSWLTAGSFASFFAAAAAILKPIKNLTKVNVVIQKAVAATEDIFYILDYPAEKETGSKELAKVDGNVTIKDLSFAFGEHKVLSGVSVDIKAGQTVAFVGKSGSGKTTLTSIISRFYTQHKGEILLDGVDTRELTLENLRSHLSIVSQNVHLFDDTVYNNIAFGLSREVSEDEVIDALKRANAYEFVQELSDGIHTNIGNNGSKLSGGQRQRISIARALLKNAPVLIFDEATSALDNESERVVQQALESLTESCTTIVIAHRLSTVENADKIVVMDGGKVVESGKHQELLEQGGLYTGSINRDFNSTYAR

SEQ ID NO: 38167 - protein, 857 aa, Thermus sp.
MSDPFEALKAEVDLLGRLLGEAIRKVSGERFFALVEEVRLLSKARRQGDGAAAEVLSQRVERMPVEEMEALVRAFTHYFHLVNLAEERHRVRVNRLRTEGETLENPRPEGFLALAKALKERGLSLEEAEAHLNRLALLLTFTAHPTETRRRTLRHHLERLQEELEGGDRERLLARVVLLYATEEVRKARPSVEDEIKGGLYYLPTTLWRAIPKVVEGLEAALERVYGKRPHLRSPVRFRSWMGGDRDGNPYVTPEVTAFAGRYAREVAKGRYLEELEALVRDLSLSEARIPVPKEVREGGEGVERFPGEPYRRYFAALYRALEGEALSTEGLARALKVAEKGLEGVGLAQVAQAFLRPLEARLSAFGLELAPLDLREESGKLLEAAAELLRLGGVHPDFLALSPEEKEALLTEELKTARPLLPVGEVPQGEALRVALGALRAWGDKGAHVVSMTHHPADLLAVFLLAREVGLYRPGKPLPFDVVPLFETLEDLERAPEVLRRLLANPVFRAHAQGRGGVEVMIGYSDSNKDAGFLMANLALYQAQEALHAVGEAQGIPVFFFHGRGTSTARGGGPAGRAIAGLPPKSVGHRLRLTEQGEALADRYAHPDLAVRHLEQLLYHFAQAALGDGVEPKAHWREALGEAGERSMARYRALLSQEGFFPFFEAFTPIREIGELPIASRPVYRHGRVRDIRDLRAIPWVMAWTQVRLLLPGWYGLSALEGLPMPLLREMYREWPFFATTLESAAMALAKADLGIAERYLKLVPEGLQGFYHHLAEEYRRTVALLEAIFEAPLLHNQKTLERQIALRNPYVDPINFVQVELLARYRAPGGREDEGVRRALLLSLLGVAAGLRNAG

SEQ ID NO: 38168 - protein, 155 aa, Staphylococcus aureus
GADWIVITAGWGLAVTMGVYAVGQFSGAHLNPAVSLALALDGSFDWSLVPGYIVAQMLGAIVGATIVWLMYLPHWKATEEAGAKLGVFSTAPAIKNYFANFLSEIIGTMALTLGILFIGVSKIADGLNPLIVGALIVAIGLSLGGATGYAINPAR

SEQ ID NO: 38169 - protein, 340 aa, Streptococcus mutans UA159
MAVEMLYEADVKVAALDGKKIAVIGYGSQGHAHAQNLRDSGHDVIIGVRHGKSFDKAKEDGFDTYEVGEATKLADIIMVLAPDEIQKDIYKDEIAPNLSAGKALGFAHGFNIHFGYIKAPEDVDVFMVAPKGPGHLVRRTYTEGFGVPSLYAVYQNPTGNAENIALDWAKGIGSARVGLLVTTFKEETEEDLFGEQAVLMGGLTHLIEAGFEVLTEAGYAPQLAYFEVLHEMKLIVDLIYEGGFKKMRQSCSNTAEFGDFVTGPRVIGPEVKENMKAALADIQSGKFAREFVEDHDAGFPRLKAFRKEAEGLEIEKIGAELRKAMPFVNQNDDDAFKIYN

SEQ ID NO: 38170 - protein, 155 aa, Staphylococcus aureus
GADWIVITAGWGLAVTMGVYAVGQFSGAHLNPAVSLALALDGSFDWSLVPGYIVAQMLGAIVGATIVWLMYLPHWKATEEAGAKLGVFSTAPAIKNYFANFLSEIIGTMALTLGILFIGVNKIADGLNPLIVGALIVAIGLSLGGATGYAINPAR

SEQ ID NO: 38171 - protein, 160 aa, Hordeum vulgare subsp. vulgare
MTGRRAVAHVFKADLPGVKKEEVKVEVEDGNVLVVSGERTKEKEDKNDKWHRVERSSGKFVRPFRLPEDAKVEEVKAGLENGVLTVTVPKTEVKKPEVKAIEISGCVFESEPFWLMCVRVLQPKYSCDLFLSSLVEASLYRVSFLGRLCTCVIAMNKCST

SEQ ID NO: 38172 - protein, 321 aa, Arabidopsis thaliana
  misc_feature (76)..(76): Xaa can be any naturally occurring amino acid
  unsure (1)..(321): unsure at all Xaa locations
LRSFPEDLDCGNFFDNMDDLMDFPGGDIDVGFGIGDSDSFPTIWTTHHDTWPAASDPLFSSNTNSDSSPELYVPFXEDIVKVERPPSFVEETLVEKKEDSFSTNTDSSSSHSQFRSSSPVSVLESSSSSSQTTNTTSLVLPGKHGRPRTKRPRPPVQDKDRVKDNVCGGDSRLIIRIPKQFLSDHNKMINKKKKKKAKITSSSSSSGIDLEVNGNNVDSYSSEQYPLRKCMHCEVTKTPQWRLGPMGPKTLCNACGVRYKSGRLFPEYRPAASPTFTPALHSNSHKKVAEMRNKRCSDGSYITEENDLQGLIPNNAYIGVD

SEQ ID NO: 38173 - protein, 458 aa, Erwinia carotovora subsp. atroseptica SCRI1043
MEQPSSKLKRGLSTRHIRFIALGSAIGTGLFYGSASAIQMAGPSVLLAYLIGGIVAYIIMRALGEMSVHNPQSSSFSRYAQDYLGPLAGYVTGWTYCFEMLIVAIADVTAFGIYMGVWFPAVPHWVWVLSVVLIIGAINLMNVKAFGELEFWLSFFKVATIIIMIAAGIGIIVWGIGNGGEPTGIHNLWSNGGFFSNGVMGTILSLQLVMFAYGGVEIIGITAGEAKDPHKSIPRAINSVPWRILVFYVGTLFVIMSIYPWNQVGTNGSPFVLTFQHMGITAAAGILNFVVITASLSAINSDVFGVGRMLHGMAEQGHAPKVFSRVSKRGIPWVTVVVMMMALLVAVYLNYIMPGKVFLVIASLATFATVWVWIMILFSQIAFRRRLSVDEVKALAFPLRGGIATSVFGIVFLFFIIGLIGYFPDTRISLYVGIIWILVLLVGYVWKKKHQNAVAAQN

SEQ ID NO: 38174 - protein, 375 aa, Lactobacillus sakei subsp. sakei 23K
MIRNRKEVSTMKTLQTSPKKDGYRMPGEFEAHKDVYLLWPERPDNWREGAKPAQATFAKVAETIAQFESVTVGVSDRQYTNARHMLADNIQVVEMSNNDSWIRDCGPTFVVNDKGDSRGVDWTFNAWGGLVDGLYFPWDKDDRVAQKVCEIEGRDRYRLDDLVLEGGSTHVDGEGTLLVTEECLLSDGRNPQLSKEQIESILKEYLNVEKIIWLKKGIYLDETNGHVDNIANFVKPGQVVLAWTDDQSDPQYAISKENYDMLINETDAKGRKLQVEKLYLPKPILITEAESQGVDTVDGTLPRLAGDRLAASYVNYYTANGGIVFPLFNDPMDEKAQEILQKLYPDRKIVGVPAREILLGGGNIHCITQQIPAGR

SEQ ID NO: 38175 - protein, 413 aa, Glycine max
  misc_feature (34)..(34): Xaa can be any naturally occurring amino acid
  unsure (1)..(413): unsure at all Xaa locations
SRSSFGADQFDDADEAEKEHKSSFFNWFYLSINXGALIAASVLVWVQTNVSWGWGFGIPAVAMAIAVVSFFSGTRLYRNQKPGGSPLTRMCQVIVASIRKSDVQVPNDKSGLYEIEEDSESAIEGSRKLDHTNGLRFLDKAAVLGDSDNVKDPVNPWRLCTVTQVEELKAIIRLLPIWATGIIFSTVYSQMGSYFILQGDTMNNRVGNIKLHISPATLSVFDTISVIFWVPVYDRIIVPVARKFTGRKNGITQLQRMGIGLFISIFAMVYSVILESMRLKMVRRHNYYDREQVPMSLYLQIPPYFIIGCAEVFTFIGQLEFFYEQAPDAMRSTCSALQLLTVSFGSYLSSLLITIVTKVTTRNGGPGWLPDKLNYGHLDYFFLLLTVLSVLNFVAFLQVSKLYSYKNPVGTLH

SEQ ID NO: 38176 - protein, 497 aa, Saccharomyces cerevisiae
MTLSKYSKPTLNDPNLFRESGYIDGKWVKGTDEVFEVVDPASGEIIARVPEQPVSVVEEAIDVAYETFKTYKNTTPRERAKWLRNMYNLMLENLDDLATIITLENGKALGEAKGEIKYAASYFEWYAEEAPRLYGATIQPLNPHNRVFTIRQPVGVCGIICPWNFPSAMITRKAAAALAVGCTVVIKPDSQTPLSALAMAYLAEKAGFPKGSFNVILSHANTPKLGKTLCESPKVKKVTFTGSTNVGKILMKQSSSTLKKLSFELGGNAPFIVFEDADLDQALEQAMACKFRGLGQTCVCANRLYVHSSIIDKFAKLLAERVKKFVIGHGLDPKTTHGCVINSSAIEKVERHKQDAIDKGAKVVLEGGRLTELGPNFYAPVILSHVPSTAIVSKEETFGPLCPIFSFDTMEEVVGYANDTEFGLAAYVFSKNVNTLYTVSEALETGMVSCNTGVFSDCSIPFGGVKESGFGREGSLYGIEDYTVLKTITIGNLPNSI

SEQ ID NO: 38177 - protein, 203 aa, Ustilago maydis 521
MATNITFHPGHVSYDERAELLSQQGLTIWLTGLSASGKSTIATALEQHLLSLKKSAYRLDGDNIRFGLNKDLGFSPQDREENIRRISEVSLLFASSTTITITSFISPYKADREIARKLHEAHVPKLPFVEVFVDASIETCESRDPKGLYKKAKAGEIKEFTGISAPYEKPEQPEIHIDADKTSIEDAVRIITEYLINKGYLKL

SEQ ID NO: 38178 - protein, 367 aa, Lactobacillus sakei subsp. sakei 23K
MKIVGTTPKEDQYYLPAETKRHRESIMMWPERSDNWRNGAKPAQKTFAEIAAIINRYEPVTMLVSKEQYQNARHALPAEIRVIEMSYNDAWIKDIGPTYLLNQKNQIRAVDWRFNAWGGLVDGLYFPWDMDDQVAQKLCELTGIDYYHLEKFILEGCAFHTDGEGTLIVTEESILSEGRNGMLTKTEVEAVLKAYLGIEKVIWLKLGYFMDETNGDVDNMLSFVRPGELLLTWTDDQSDPQYASSEEAYRILEAATDTKGRHFKIHKLQMPKPMFATQEESAGVDPINGLLPRYPGDRLTASYVNYYALNDAIILPIFDDPQDTVAIQTLTQLFPDRKIEPVYARELLLGGGDVHCVVAAVPAHTEA

SEQ ID NO: 38179 - protein, 293 aa, Cryptococcus neoformans var. neoformans JEC21
MSLSLDSTIKLASGNLIPRLGFGVYQARSKECEDAVKKAIDTGYRHVDTAQAYHNEENVGRAIRNSGVPRPSVFLTSKYMPSHTVYSPTEVLDVVRKSLKKVDRCGDDKPYIDLMLIHAPWGGEEGRKNNWEALTIAQKEGWVKDIGVSNFGIHHLKALPPPVPAVNQIELHPFCQQRDIVKYCEEHGIAIEAYSPLVRANKKHYDNEVLVKVAKKYGKEVAQVLLRWSLQKGYIPLPKSVTPSRIESNADLYDFKLDQEDMAEIDGLDKGSEGAISWNPVNHDGEIDQDALR

SEQ ID NO: 38180 - protein, 586 aa, Bacillus licheniformis ATCC 14580
MEYAAIHHQPFSSDAYSYNGRTLHIKIRTKKDDAEHVRLVWGDPYEYTGGTWKANELAMAKIAATSTHDYWFAEVAPPFRRLQYGFILTGADDRDTFYGSNGACPFAGKAADIGKHCFKFPFVHEADTFDAPDWVKSTVWYQIFPERFASGREDLSPENALPWGSKDPEAHDFFGGDLQGIMDKLDYLEDLGVGGIYLTPIFAAPSNHKYDTLDYCSIDPHFGDEELFRTLVSRIHERGMKIMLDAVFNHIGSASQEWQDVVKNGETSRYKDWFHIHSFPVKEGSYDTFAFTPEMPKLNTANPEVQAYLLDIALYWIREFDIDGWRLDVANEVDHAFWKKFRQAVTAEKPDIFILGEIWHQADPWLRGDEFHSVMNYPFTEPMIDYFADGSISASQMASRINSHLMSGMKQVNEVMFNLLDSHDTKRILTRCGGDDKKVRSLLAFMFAQTGSPCIYYGTEVGLDGGDDPLCRKCMVWEEEKQNQEMLAFMKRLIALRKQENDVLTYGALEWKLVDDQNDFVSFSRTHEGKELIYFFHQGSEVRRVRLRDLKIASDKRIYDAWTEEALQHDDVVDIQPGGFFILGAV

SEQ ID NO: 38181 - protein, 346 aa, Ashbya gossypii ATCC 10895
MRPIMLMGHERSLTQVKYNREGDLIFTSGKDNVASVWYAMNGERLGTLEGHNGSIWSIDVDQHTEYAVTGSADFSVKVWRVRDGSIAHSWDTRTPVRRVEFSPTGDRVLAVLDNVMNYAGAIVVFSVTRDANNQITGFNSGLSCEILTQEGCAPVLVASWSYDGKYIVAGHQDGKISKYNGVTGECLEIKDLHKQRVSDIQFSLDRTYFLTTSRDSYANLVDVETFEVLKTYETDCPLNSGCITPLKEFVILGGGQDARDVTTTSAREGKFEAKFYHKLFQVEIGRVDDHFGPVNYIAVSPQGTSYASGGEDGFVRLHHFDKSYFDFKFDVEKSADAQKKVDTADR

SEQ ID NO: 38182 - protein, 188 aa, Sorghum bicolor
MGRSPCCEKAHTNKGAWTKEEDQRLVAYIKAHGEGCWRSLPKAAGLLRCGKSCRLRWINYLRPDLKRGNFTQEEDELIIKLHQILGNKWSLIAGRLPGRTDNEIKNYWNTPIQSASSSPAASTHGRTSRRVQAPLLPPPAPPLSPPRQASHSPAWRRQGGGGWCGPTGCSLRDKQAVTMTARSGSFRA

SEQ ID NO: 38183 - protein, 223 aa, Arabidopsis lyrata
MRIRRREEKENQEYKKGLWTVEEDNILMDYVLNHGTGQWNRIVRKTGLKRCGKSCRLRWMNYLSPNVNKGNFTEQEEDLIIRLHKLLGNRWSLIAKRVPGRTDNQVKNYWNTHLSKKLVGDYSSAVKTTGEDDDSLPSLFITAATTSCHHQQENVYENIAKRFDGVVSASYEDKPKQELAQNDVLMATTNDPSHYYGNNALWVHDDDFELSSLFTRNDEFCFW

SEQ ID NO: 38184 - protein, 537 aa, Escherichia coli
MKQKITDYLDEIYGGTFTATHLQKLVTRLESAKRLITQRRKKHWDESDVVLITYADQFHSNDLKPLPTFNQFYHQWLQSIFSHVHLLPFYPWSSDDGFSVIDYHQVASEAGEWQDIQQLGECSHLMFDFVCNHMSAKSEWFKNYLQQHPGFEDFFIAVDPQTDLSAVTRPRALPLLTPFQMRDHSTRHLWTTFSDDQIDLNYRSPEVLLAMVDVLLCYLAKGAEYVRLDAVGFMWKEPGTSCIHLEKTHLIIKLLRSIIDNVAPGTVIITETNVPHKDNIAYFGAGDDEAHMVYQFSLPPLVLHAVQKQNVEALCAWAQNLTLPSSNTTWFNFLASHDGIGLNPLRGLLPESEILELVEALQQEGALVNWKNNPDGTRSPYEINVTYMDALSRRESSDEERCARFILAHAILLSFPGVPAIYIQSILGSRNDYAGVEKLGYNRAINRKKYHSKEITRELNDEATLRHAVYHELSRLITLRRSHNEFHPDNNFTIDTINSSVMRIPRSNADGNCLTGLFNVSKNIQHVNITNLHGRDL

SEQ ID NO: 38185 - protein, 472 aa, Mycobacterium tuberculosis H37Rv
MTRRGKIVCTLGPATQRDDLVRALVEAGMDVARMNFSHGDYDDHKVAYERVRVASDATGRAVGVLADLQGPKIRLGRFASGATHWAEGETVRITVGACEGSHDRVSTTYKRLAQDAVAGDRVLVDDGKVALVVDAVEGDDVVCTVVEGGPVSDNKGISLPGMNVTAPALSEKDIEDLTFALNLGVDMVALSFVRSPADVELVHEVMDRIGRRVPVIAKLEKPEAIDNLEAIVLAFDAVMVARGDLGVELPLEEVPLVQKRAIQMARENAKPVIVATQMLDSMIENSRPTRAEASDVANAVLDGADALMLSGETSVGKYPLAAVRTMSRIICAVEENSTAAPPLTHIPRTKRGVISYAARDIGERLDAKALVAFTQSGDTVRRLARLHTPLPLLAFTAWPEVRSQLAMTWGTETFIVPKMQSTDGMIRQVDKSLLELARYKRGDLVVIVAGAPPGTVGSTNLIHVHRIGEDDV

SEQ ID NO: 38186 - protein, 703 aa, Candida glabrata CBS138
MYSWKKFKFGKSKDEKEQKKDKLFHFHHKHTGSDVSDNFGNGNDKEKSVDSLPSSSEITPYPSDLPSQNTNGNNSSRNDTMVNSNSSNRISSASSAKGPGSSSSTIKDVPLGGENERSSSHIDQVSQKSATSTKKTSTPSTGVMTIKVYNGDGFRLPFPITSNKKILSRLLESGIASDNHDTSLEVEAILQRISRLELTNSNSNENLLPGDIATQSIPSTIKLPNSVPLNPLLYFTIEFDNTVATIEPESGTMAQPIFNKISTFDVTRKLPQLNIDVFVRIPSILLPPKQWQQEMGAQDEKLQALLDKINTNQDVHLDSFQLPVNLLIDSAATIRLYNHHWVELRDGLGKINISVDYKPSRNKPLSIDDFDLLKVIGKGSFGKVMQVRKKDTKKIYALKAIRKSYIVSKSEVTHTLAERTVLARIDCPFIVPLKFSFQSQEKLYLVLACINGGELFYHLQREGRFDLSRSRFYAAELLCALDTLHKMDVIYRDLKPENILLDYQGHIALCDFGLCKLNMKDEDKTDTFCGTPEYLAPELLLGQGYSKVVDWWTLGVLLYEMLTGLPPYYDENVPKMYKKILQDPLVFPDGFDRDAKDLLIGLLSRDPQRRLGYNGADEIKNHPFFSQLSWKRLLMKGYIPPYKPPVTSATDTSNFDQEFTREKPIDSVVDEYLSESVQKQFGGWTYVGSEQLGNSLVQGGSIR

SEQ ID NO: 38187 - protein, 215 aa, Arabidopsis thaliana
MGGGFRVLHLVRPFLAFLPEVQSADRKIPFREKVIYTVISLFIFLVCSQLPLYGIHSTTGADPFYWMRVILASNRGTVMELGITPIVTSGLVMQLLAGSKIIEVDNNVREDRALLNGAQKLLGILIAIGEAVAYVLSGMYGPVGQLGVGNAILIILQLFFAGIIVICLDELLQKGYGLGSGISPFSLPPTFVESIILERHFKPKLPLKTGRGAEF

SEQ ID NO: 38188 - protein, 173 aa, Arabidopsis thaliana
MANEGAKKRKEENAKHMAKLRRIIIASNAVYFVVRMLIFYSSFTWKHWIGLVITSLAYAFPYKQLDQMAKPSVTDDGELIDGGFDMTTGGICGYLHDVIYITCFVQLASIITGKFWYTYLVIPAFGVYKASGLIRGFMSQGSEGGVEDEKSRKKREKMERKASRGQVVKTRTR

SEQ ID NO: 38189 - protein, 197 aa, Carboxydothermus hydrogenoformans Z-2901
MANNLFWHEGKITAEDREKLLGQKGVVIWLTGLSGSGKSTIARELEAVLYRQGKLAYVLDGDNIRMGLNKDLGFSEKDRQENIRRIGEVAKLFVDAGIIVITAFISPFRADRDKVRSILPAGKFIEVFVDCPLEVCEARDVKGLYQKAREGKIPEFTGITSPYEPPVKPEITLKTAEQSLEECVDIILTYLRKNLYL

SEQ ID NO: 38190 - protein, 376 aa, Carboxydothermus hydrogenoformans Z-2901
MYQYRMDEPRGHRPSWFTVIVVAVIAGLIGSMAGIYAYPKLFPAKNTKIEYTLPQTPEVKTAEYSYTPVVAVAKKVSPAVVGISNIAPGGFFGLGGLEEKSSGSGFIISPDGYIVTNNHVVEGAYELYVSLADGRQMKAKIIGTDPRADLAVIKVNAKNLPVVTLGHSSTLQVGELAIAIGNPLGKEFARSVTVGVISALNRTLTYESGEKSLRLIQTDAAINPGNSGGPLCNAKGEVVGINSAKISIPGFEGMGFAIPIDEAKPIIEQLINKGYVTRPWLGIAGAEISEQEAQYYDIPQGIYIEGVVEGGPADKAGIQAKDIITAINGTKITTMAELTDELFKHKPGEKIKVEVYRLKEGKKYTLEVTLGEKPRE

SEQ ID NO: 38191 - protein, 549 aa, Staphylococcus aureus subsp. aureus MSSA476
MNKQWWKEAVAYQVYPRSFNDSNHDGIGDLPGMIDKLDYLKDLGIDVIWLSPMFKSPNDDNGYDISDYQEIMDEFGTMEDFDCLLKGVHDRGMKLILDLVVNHTSDEHPWFIESKSSKDNPKRDWYIWQDPKPDGSEPNNWESIFNGSTWEYDANTEQYYFHLFSKKQPDLNWGNPEVRDAVFEMMNWWFDKGIDGFRVDAITHIKKTFEAGDLPVPEGKTYAPAFDVDMNQPGIQTWLQEMKDRSLSKYDIMTVGEANGVSPDDADDWVGEENGKFNMIFQFEHLGLWNSGDSHFDVNSYKSVLNRWQKQLENKGWNALFIENHDQPRRVSTWGDDDKYWYESATSHAAVYFLQQGTPFIYQGQEIGMTNYPFESIETFNDVAVKNDYQIVKAQGGDVDALLAKYKDENRDNSRTPMQWDDTLNGGFTNGEPWFPVNPNYKTINVAQQLEDEHSVLQFYKDLIQLRKSNDVYVYGQFDLVDAENSQVFAYTRTLNEKQVLIVGNLTNHEAELTVPFDLSHGEVKLFNYDAKVNLKQLRPYEACVIELN

SEQ ID NO: 38192 - protein, 591 aa, Synechococcus elongatus PCC 7942
MPHPLVRLYRYSAPHQRQVLSAIACSILNKIFDLAPPVLIGMAVDVVVQRQDSWLAKWGVVPVEQQLGLLVLFSFVIWSLESLFEYLYAWQWRTLAQTLQHELRLDAYGHLQELELSFFEERSTGQLLSVLNDDINQLERFLDHGANEILQVTTTVLAVGGAMAYLSPTVAGLAILPIPVILWGSLRFQRRLAPRYARVREQAGLISARLANNLGGIATIKSFTAEAFEKGRVAEDSDAYRQANRRAIALSSAFVPLIRFAILFAFIAILYVGGMETINGRLDVGTYSFLVFITQRLLWPLTSLGRVLDDYQRAMASTQRVMDLLAIPVQIPSGRQSLPIGQVQGAVQFEGITFAYRDREPSVIDLNLNIPAGQTIAIVGATGSGKSTLVKLLLRFYEPQTGRILLDGIDLRDLKLKDLRQAIGFVSQDVFLFHGSVAENIAYGSFDATQTEIEQAAKLAEAHEFIMDLPQGYDTVVGERGQKLSGGQRQRLAIARAILKDPPILILDEATSAVDNETEAAIQRSLEQITRDRTTLAIAHRLSTIRHADCIYVMDQGRLVEAGHHDELLALDGLYANLWKVQTGERLSDRV

SEQ ID NO: 38193 - protein, 354 aa, Methanosarcina acetivorans C2A
MKVMIIGGFLGSGKTTAIQKISRQLSDAGKRIAIIVNEIGEIGLDGDTLKSPDIKTEELTSGCICCTLKISMQYTLQTLEEEFRPEIVIIEPTGIAFPGQIREEIEIMGLSELSFAPIVTIVDPGRFGTEAKEIPRFIETQVKEAEILGINKVDIAPAEIVMATEQMLTELNPEAKILKFSAKLGDEQFENLLAHLSVPGTAKPPQEKQNSIEISEVSAHSVLYTFKVCSLNPEKGRFLIEESLQTIRDRVEEMNPEFIGHIKLSLKLPDFMVKGSVTSSEETPQVEFIPRKNEKFELRLLSAITKVPKDRLRNIVESTLEAKLKESDISFEKKELHHGTLTKIDGLMKKKVSY

SEQ ID NO: 38194 - protein, 252 aa, Saccharomyces cerevisiae
MSLPATFDLTPEDAQLLLAANTHLGARNVQVHQEPYVFNARPDGVHVINVGKTWEKLVLAARIIAAIPNPEDVVAISSRTFGQRAVLKFAAHTGATPIAGRFTPGSFTNYITRSFKEPRLVIVTDPRSDAQAIKEASYVNIPVIALTDLDSPSEFVDVAIPCNNRGKHSIGLIWYLLAREVLRLRGALVDRTQPWSIMPDLYFYRDPEEVEQQVAEEATTEEAGEEEAKEEVTEEQAEATEWAEENADNVEW

SEQ ID NO: 38195 - protein, 1116 aa, Debaryomyces hansenii CBS767
MTIIIGTLFLPYTVKFDVGGRVDYDIDITQKDATVPNIQNDARNQQRKSVSAGMGTGISQSSILPSLSTSQQHTPRSGSPTFNDNASIMTGSDTDQVNSAQEFFHSHKRTPHDSQNILTDNLYDKLGSKLIQPRSRYSNVAFQSLVVDPKKKSEDAGLPGLKINRSSNNLTSLNNSSFSSYSNMIGLNPTTNSSTMSVPSTRQRTPISRQGFTLHSNSSSNSIPTRIKEVEEEEARESDYASDKSVDEDHIENFNDLVHGRTESKLTPFGGFSKPDLEDGILNQENIFEDAPWKVVLAGKGNVSLTKAVQIAVDAGGINDHKWVGTLAMPSDAVPNSVINGISDSLSENYDCEAVFPNDITFQGHYKSFCKQILWPTLHYQIPDDPKSKAFEDHSWGHYKLLNQLVADKIVDLYKKENGSSDPNDPNNMIWIHDYHLLLVPKMIREKLPEAKIGLFLHVSFPSSEVFRCFAQRKAILSGMLGANCITFQTDEYVRHFWQTCNRLLLADANEFGITYEGKFTMINTIPVGVDAKSLEGYLGSNEVNEWRNMIRERWSNKKLIVSRDKLEKLRGIKQKLLAYEKFLHSNPEYVDTTVLIQICPGTTQDSSYESEIMSIVGRINALTGDISFSQPVVLLQQDIGFEQYVALQCEAEVFVVASMREGLNLTCHEYIIATTEKKSPLMLSEFTGSSPLLNCNGEGAILINPWDLKRFAELFKVLLDMGQDEKVKRWTNCYKTICNHDSRNWVENCLQGINEGWDYDHSRNLNKLIPFTRDIFDSFYSRNDGGKRLFFLNLDTPSAIASTNDPSSKFHKLTSKSAVAAAGKNGAFSESSRFASLLNELLSDPLNHVYLTSYLKRSDLDTLYNRSPNLGLVAENGGYIKLTESDKWISIIDEVELEGWMPQVSQLIASKVERLPGSHMEVEDCTIRFHPGKSFENDRERSLSILGDCIQHVNELFLDQDGVHATLIRNVLIVQKNKLSMKALKFIISYYNQKKQGIKSESLIEEYQVKQVPGSAPSTPISETASLPPIKSPTSKIQKNLVTALFLSGGSTLIDEPGYEYANGLERSGEIPEVITVTVLGADSRTSATYCVSGKNELLGILSNPVSEPYKSHTA

SEQ ID NO: 38196 - protein, 615 aa, Prochlorococcus marinus subsp. marinus str. CCMP1375
MKEELGDFIEAAGLQSYDPNEISNIYKKNPSRLIKRLWETLIPICLFLIGVGWDKLIGLLNNETRARERAKEFTNLLVELGPAFIKAGQALSTRPDVVPRIVLEELAQLQDQLPGFASELAIACIKEDLGKTYEEVFKSFELDPISAASLGQVHQAILHSGEKVAVKIQRPGLREQITLDLYIVRNIAIWLKKYVGFIRSDLVALIDELGKRVFEEMDYINEANNAEKFETLHQKNKKITVPKMYKNLTSKRVLTMEWIDGIKLTNIDGVKKLGINPNELIEIGVNCSLQQLLEHGYFHADPHPGNILALNDGRLCYLDFGMMSEVTDKSRTGLIQAVVHLVNRNFDKLSKDFVELGFLNEDVNLEPIVPAFEKVFDGALTMGVSKMDFKTVTDDMSGLMYKFPFQLPPYYALIIRSLITLEGIALSVDPDFKILGAAYPYFARRLMEDPDPKLRKSLKEMLFDGGIFKWNRLENLVSNASKQKEINIENLLDQVIDFLFSENGGILREEIIETIAERFDLLNLYAIKNINKRLPNTLKLNNLNLDAGMINEIEPLQKLIGILSNIPELNTNLIFKKLNRIIKEPLTRVMSIKIAKKVTKKSVVRIIKLAAGVKQ

SEQ ID NO: 38197 - protein, 257 aa, Triticum aestivum
  misc_feature (189)..(189): Xaa can be any naturally occurring amino acid
  misc_feature (200)..(200): Xaa can be any naturally occurring amino acid
  misc_feature (211)..(211): Xaa can be any naturally occurring amino acid
  unsure (1)..(257): unsure at all Xaa locations
MQIFVKTLTGKTITLEVESSDTTDNVKAKIQDKEGIPPDQQRLIFAGKQLEDGRTLADYNIQKESTLHLVLRLRGGMQIFVKTLTGKTITLEVESSDTIDNVKAKIQDKEGIPPDQQRLIFAGKQLEDGRTLADYNIQKESTLHLVLRLRGGMQIFVKTLTGKTITLEVESSDTIDNVKAKIQDKEGIXPPDQQRLIFAXGKQLEDGRTLXADYNIQKGVHPFTWGLPFPGGGANWPWAFGPPLWGPASGGGGEALL

SEQ ID NO: 38198 - protein, 409 aa, Vibrio vulnificus YJ016
MNRRVVVTGMSGVTAFGNDWQSVEPKLRALENATQFMENYQQYEGLNTKLAAPVVDFELPSHYKRKQVRGMGRVSKLATVATEKALRQAGLIGEDVLTNGQTGIAYGSSTGSTDAIGAFGVMLNDKTTKAITATTYVQMMPHTTAVNVGLFFGLRGRVIPTSSACTSGSQAIGYAYEAIKHGYQTVMVAGGAEELCPTESAVFDTLFATSLKNDQPKTTPSPYDKDRDGLVIGEGAGTLVLEEYEHAKARGAKIYAEIIGFASNCDAAHVTQPQMETMQICMEMALQNADLHPKHIGYVSAHGTATDRGDIAESNATQNAIGKVPISSLKSYFGHTLGACGAIEAWLSIEMMNSGWFSPTLNLTNLDPDCGDLDYIAGAGREMDIDYMMSNNFAFGGINTSLIFKRVRD

SEQ ID NO: 38199 - protein, 340 aa, Zea mays
  misc_feature (173)..(173): Xaa can be any naturally occurring amino acid
  unsure (1)..(340): unsure at all Xaa locations
MASHHSEPLDSAAAADAPSDNNPELPCPPYHIVTKPGQLPVEFLEPSAAQKLVIGFDCEGVDLCRNGALCIMQLAFPDAVYLVDAIEGGKELIQACKPALESDHITKVIHDCKRDSEALYFQFGIKLHNVMDTQIAYSLIQEQEQEGKKKTSDDYNYISFVSLLADKRYCGIXYPEKEEVRTLLRQDPNFWTIRPLSDMMVRAATDDVRFLLSIYAKMMEKLSKVSLWRLAVRSELYCRCFCLSDNQFADWSPLPPVPDDIEADVYVPEADILSVLDVPPGKMGRVIGRKGSTIMAVKECCKVEIHIGGAKGPPDRVFIIGPEKEVRKAEAIFRGRMLEF

SEQ ID NO: 38200 - protein, 186 aa, Paenibacillus polymyxa
MFNCTWRANNVNFTNDGKLKLSLTSPANNKFDCGEYRSTNNYGYGLYEVSMKPAKNTGIVSSFFTYTGPSHGTQWDEIDIEFLGKDTTKVQFNYYTNGVGGHEKIINLGFDASTSFHTYAFDWQPGYIKWYVDGVLKHTATTNIPSTPGKIMMNLWNGTGVDSWLGSYNGANPLYAEYDWVKYTSN

SEQ ID NO: 38201 - protein, 395 aa, Vibrio vulnificus YJ016
MNSHLSQPIYIHGCGFHSALGATAEQIHHALQHNHSVQMQQAVDQLNTGTATIVGRVSDTLPELPSSLREYDSRNNRLALSALQQIEPAIQEAIRQYGANRIAVVIGTSTSGIADGENAFEQKLSQEHFPSDYHYHKQELGNVSDFIADYFQLTGPCYAISTACSSSGRVFISAKRLLLSGMADAVIVGGADTLCRLTLNGFNGLEALSNQHCQPFSADRSGINIGEGAAFMLLSKAPSEIALLGCGDSSDAHHISAPHPEGNGAEEAMAKALLDANLKPEQIGYVNAHGTATPLNDSMESKAIFRLFGQSVPVSSTKHLTGHTLGAASAVEAAIAWHILKYNLDLPQQGCQNKADDIEVTLVEQPMKLAHKAILSNSFAFGGNNISLIFGYPHE

SEQ ID NO: 38202 - protein, 91 aa, Candida albicans
NYSLYIYKVLKQTHPDTGISQKAMSIMNSFVNDIFERIATEASKLAAYNKKSTISAREIQTAVRLILPGELAKHAVSEGTRAVTKYSSASS

SEQ ID NO: 38203 - protein, 568 aa, Bacillus licheniformis ATCC 14580
MSQWWKEAVVYQIYPRSFYDSNGDGFGDLQGVIQKLDYIKSLGADVIWLCPVFDSPQDDNGYDISDYRSIYEKFGTNDDMFQLIDEVHKRGMKIIMDLVVNHTSDEHAWFAESRKSKDNPYRDYYFWKDPKADGSEPNNWGSIFSGPAWTLDERTGQYYLHYFSKKQPDLNWENEAVRREVYDLMTFWMDRGVDGWRMDVIGSISKFVDFPDYETDDSRPYVVGRYHSNGPRLHEFIQEMNREVLSRYDCMTVGEANGSDVEEAKKYTDPSRHELNMIFTFEHMDIDTKQHSPNGKWQMKPFDPIALKKTMTRWQTALMNVGWNTLYFENHDQPRVISRWGNDRELRKQCAKAFATVLHGMKGTPFIYQGEEIGMTNSEMPLEMYDDLEIKNAYRELVIENKTMTEEDFRKAVAKKGRDHARTPMQWDDGKYAGFTDGEPWLAVNPRYQEINVKESLADEDSIFYYYQKLIGLRKQNKVIVYGDYRLLLEEDPRIFAYIREYRGEKLLVAVNLSEEKALFHASPELLEDRWDVLLSNYARERLNISGSIDMEPYEAFMMISRAKDYTS

SEQ ID NO: 38204 - protein, 387 aa, Oryza sativa (japonica cultivar-group)
MAMPFASLSPAADHRPSFIFPFCRSSPLSAVGEEAQQHMMGARWAAAVARPPPFTAAQYEELEQQALIYKYLVAGVPVPADLLLPIRRGLDSLASRFYHHPVLGYGSYFGKKLDPEPGRCRRTDGKKWRCSKEAAPDSKYCERHMHRGRNRSRKPVEAQLVAPHSQPPATAPAAAVTSTAFQNHSLYPAIANGGGANGGGGGGGGGGSAPGSFALGSNTQLHMDNAASYSTVAAGAGNKDFRYSAYGVRPLADEHSPLITGAMDTSIDNSWCLLPSQTSTFSVSSYPMLGNLSELDQNTICSLPKVEREPLSFFGSDYVTVDSGKQENQTLRPFFDEWPKARDSWPDLADDNSLATFSATQLSISIPMATSDFSTTSSRSHNGIYSR

SEQ ID NO: 38205 - protein, 212 aa, Zea mays
MSDRGGPASPRSGKHPFYRGIRSRSGKWVSEIREPRKTRRIWLGTFPTAEMAAVAYDVAARALRGPDAALNLPHLAASRPAPASTSADDIRAAAAEAAASLQQPDHQPPAHGSAAGRGIAAAAAGATQQQHQHQQQAGGSSGAAQHEGGGGGAGNPYFLDEEALFETPQYLRNMAAGMMMSPPRFGRNSSDDSPDHPSSSDAGDSLWNYRDP

SEQ ID NO: 38206 - protein, 407 aa, Lactobacillus sakei subsp. sakei 23K
MNQNSGLMKTAIVVVISALIGGGAAYAGFSRLGNSANDVTTATQTPTKAGATKISNIKVNSSSQTTTAFQKVNTSVVSVVNLQKQQQSTGDLSSLFGSGSTDSNSSSSKSSSSDLEESSEGSGLIYEKKDGKAYIVTNNHVVAGSDKIEVILSDGTKLEASLVGTDAVSDLAVLKINGTKVKKTATFGDSDSIKAGESVLAIGSPLGSEYATSVTQGIISAKKRTIDVTDETTGQTTGQATVIQTDTAINPGNSGGPLVNMAGQVIGINSMKLASNGETSVEGMGFAIPSNEVVKIINQLVANGKVVRPALGISVIDLTNISSTQQSSVLKLPSSVNSGVVVASVTSNSVAKKAGISKYDVIVGLGGKTVSSVADLHTILYSYAMNSTTEIQYYHNGSLKKANVKLT

SEQ ID NO: 38207 - protein, 477 aa, Pseudomonas aeruginosa UCBPP-PA14
MNSPALPLSRGLRIRAELKELLTLAAPIMIAQLATTAMGFVDAVMAGRASPHDLAAVALGNSIWIPMFLLMTGTLLATTAKVAQRYGAGDQPGTGPLVRQALWLALLIGPLSGAVLWWLSEPILGLMKVRPELIGPSLLYLKGIALGFPAAALYHVLRCYTNGLGRTRPSMVLGIGGLLLNIPINYALIYGHFGMPKMGGPGCGWATGSVMWFMFLGMLFWVNKASIYRASQLFSRWEWPDRATIGPLVAVGLPIGIAVFAESSIFSVIALLIGGLDENVVAGHQIALNFSALVFMIPYSLGMAVTVRVGHNLGAGLPRDARFAAGVGMAAALGYACVSASLMLLLREQIAAMYSPDPAVIAIAASLIVFSALFQFSDALQVTAAGALRGYQDTRVTMIMTLFAYWGIGLPVGYSLGLTDWFQEPTGPRGLWQGLVVGLTGAAIMLCIRLARSARRFIRQHERLQREDAAAASVLGR

SEQ ID NO: 38208 - protein, 390 aa, Phlebia radiata
MAFNFAAILAFVSLAAVTSAAPSKTTCSNGVVVPDAVCCDFVPLASALQSEVLMGDCGEDAHELVRLIFHDAIAISQSMGPSAGGGADGSMLIFPTVEPAFFPNLGIADSVNNLIPFLSQFPTISAGDLVHFAGAVAISNCPGAPQLEFLAGRPNATAPAIDGLIPEPQDDVTKILARFKDAGNFSPAEVVALLASHSIARADHVDPTLDAAPFDSTPFDFDTQVFLEVLLKGVGFPGLANNTGEVSSPLPVTDGTDVGELRLQSDFALARDERTACAWQSFVNEQEAMATAFKNAVKKLAVLGHNRNDLVDCSAVVPVPKPATGTPATFPASTGPQDLELTCTTEPFPTLSTAPGAQQTLIPHCSDGTMTCNSVQFDGPATNFGGADDS

SEQ ID NO: 38209 - protein, 500 aa, Saccharomyces cerevisiae
MSRLERLTSLNVVAGSDLRRTSIIGTIGPKTNNPETLVALRKAGLNIVRMNFSHGSYEYHKSVIDNARKSEELYPGRPLAIALDTKGPEIRTGTTTNDVDYPIPPNHEMIFTTDDKYAKACDDKIMYVDYKNITKVISAGRIIYVDDGVLSFQVLEVVDDKTLKVKALNAGKICSHKGVNLPGTDVDLPALSEKDKEDLRFGVKNGVHMVFASFIRTANDVLTIREVLGEQGKDVKIIVKIENQQGVNNFDEILKVTDGVMVARGDLGIEIPAPEVLAVQKKLIAKSNLAGKPVICATQMLESMTYNPRPTRAEVSDVGNAILDGADCVMLSGETAKGNYPINAVTTMAETAVIAEQAIAYLPNYDDMRNCTPKPTSTTETVAASAVAAVFEQKAKAIIVLSTSGTTPRLVSKYRPNCPIILVTRCPRAARFSHLYRGVFPFVFEKEPVSDWTDDVEARINFGIEKAKEFGILKKGDTYVSIQGFKAGAGHSNTLQVSTV

SEQ ID NO: 38210 - protein, 301 aa, Glycine max
MVIRRNHVVGGITYRPYASQRFGEIAFCAITADEQVKGYGTRLMNHLKQFARDMDGLTHFLTYADNNAVGYFIKQGFTKEIHLEKDRWQGYIKDYDGGILMECKIDPKLPYTDLSTMIRRQRQAIDEKIRELSNCHIVYAGIDFQKKEAGIPKKIIDDIPGLREAGWTPDQWGHSRFRTLNVSSDNATNQKHLNGFMRSLLKSMFDHADAWPFKEPVDARDVPDYYDIIKDPMDLKTMSKRVDSEQYYVTFEMFVADARRMFANARTYNSPETIYYKCSTRLEAHFQSKVQAGLQPGTKIQ

SEQ ID NO: 38211 - protein, 502 aa, Lactobacillus brevis
MGKYVLGVDLGTSAVKVSALDHSGQIVAQESFDYDLIQKQPGYNEQNPEDWVSGTTVAIVRLILNDHLDASNIEGLSYSGQMHGLVLLDENKKVLRPAILWNDTRSTPQREEIEAKLGDEFVHITRNQPLEGFTLTKLLWVKQNEPDIWAKAKYFVLPKDYVRYRMTGNLAMDYSDATGTVLLDVAKGEWSQKICAALDIPMSMCPPLIKSIDLAGTVTPAYAEFSGLTTDTKVFGGAADNAAGAVGAGILHPNMVLSSIGTSGVVLKYEDNADVNYHGVLQFEDHAIPDKFYSMGVTLAAGYSFTWFKKTFAPAEDFTDVVASAAKSTVGANGLLYTPYIVGERAPYADADIRGSFTGVDGTHQRYDFVRAVLEGIIFSFRDLFDIYEENGGDFDTVVSIGGGAKSPLWLQIQADIFNRKVVSLTNEQGPGMGAAMIAATGLGWFDSLQDCAETFVHFGKAYEPNPDNVKKYEKMHAIYKQVYQQTKTISEQLLDYRRAEL

SEQ ID NO: 38212 - protein, 330 aa, Staphylococcus aureus subsp. aureus MSSA476
MIDYKSLGLSEEDLKVIYKWMDLGRKIDERLWLLNRAGKIPFVVSGQGQEATQIGMAYALEEGDITAPYYRDLAFVTYMGISAYDTFLSAFGKKDDVNSGGKQMPSHFSSRAKNILSQSSPVATQIPHAVGAALALKMDGKKKIATATVGEGSSNQGDFHEGLNFAGVHKLPFVCVIINNKYAISVPDSLQYAAEKLSDRALGYGIHGEQVDGNDPLAMYKAMKEARDRAISGQGSTLIEAVTSRMTAHSSDDDDQYRTKEEREALKKADCNEKFKKELLSAGIIDDAWLAEIEAEHKDIINKATKAAEDAPYPSVEEAYAFVYEEGSLN

SEQ ID NO: 38213 - protein, 473 aa, Staphylococcus aureus subsp. aureus MSSA476
MSEKQYDLVVLGGGTAGYVAAIRASQLGKKVAIVERQLLGGTCLHKGCIPTKSLLKSAEVFQTVKQAAMFGVDVKDANVNFENMLARKEDIINQMYQGVKHLMQHNHIDIYNGTGRILGTSIFSPQSGTISVEYEDGESDLLPNQFVLIATGSSPAELPFLSFDHDKILSSDDILSLKTLPSSIGIIGGGVIGMEFASLMIDLGVDVTVIEAGERILPTESKQASQLLKKSLSARGVKFYEGIKLSENDINVNEDGVTFEISSDIIKVDKVLLSIGRKPNTSDIGLNNTKIKLSTSGHILTNEFQQTEDKHIYAAGDCIGKLQLAHVGSKEGVVAVDHMFEGNPIPVNYNMMPKCIYSQPEIASIGLNIEQAKAEGMKVKSFKVPFKAIGKAVIDSHDTNEGYSEMVIDQSTEEIVGINMIGPHVTELINEASLLQFMNGSALELGLTTHAHPSISEVLMELGLKAESRAIHV

SEQ ID NO: 38214 - protein, 326 aa, Ralstonia eutropha JMP134
MAKVVRIHETGGPEVLRFEDTTVGEPGPGEVRVRHVAVGLNFADTYFRSGMYQVPLPNGIGNEAAGLIEAVGPGVTHLSVGDRVTYTGFTNTLGAYSTERLIAAAPLIKLPPEISCEVAAAMTMRGLSASYLMRRIWPFKAGDTILLHAAAGGAGLIISQWAKLLGLNVIGTVSTDAKAEVARAHGCDHTINYSHEDVAKRVRELTDGVGVSVVFDSVGKDTFMASLDSLKRRGLLVCVGFASGPVTGFDPAILARKGSAYLTRPGLADYIADPAEKAELVNELFGHVAAGRIRIEINQRYALEDAVQAHRDLEARKTTGSSIFVI

SEQ ID NO: 38215 - protein, 321 aa, Thermobifida fusca YX
MITVVGEALIDLISSESGTYRSVPGGAPANTAVALARLGVPSSLLARMSTDRFGQQLRAYVGSRGVSTRDIVVSDEPTTLAIATLDETGRATYDFYVKGTVDWQWRPEELPDPLADDVTAIHVGSLAMAMPPGAAVVEEWVARQRGRAVISYDPNIRPALAGTPASARERVERQVALADLVKVSDEDVYWLYEQDPATGSADLLVEVGRSWLRRGPSLITITCGGDQTLVLVRGREDRPLSVAPEPVDVVDSIGAGDAFCAGLLDALGQAGALGADGRERLAALTDAQLTVCVAHAHRVAAHTCRRVGADPGELDFPPLEF

SEQ ID NO: 38216 - protein, 286 aa, Arabidopsis thaliana
MQLKVPEHQVAGHIAKDGKPGPLVDDKGRFFKPLQGDSRGEIEVKFYESFSSNTEVPEHIHRYFPVYHGTQAVEGSDGAAMMVLENLLAEYTKPSVMDVKMGSRTWYPDASEEYIQKCLKKDTGTTTVSSGFRISGFEVYDHKESSFWKPERKLLRGLYVDGARLTLRKFVSSNSLSDTGSKPDSAFASSVYGGSHGILTQLLELKTWFENQTLYHFNSCSILMVYENESILKGNDDDARPQVKLVDLAHVLDGNGVIDHNFLGGLCSFINFIREILQSPDESADS

SEQ ID NO: 38217 - protein, 494 aa, Zea mays
MDPTKFRPSSSHDTTVTTTNAGAPVWNDNEALTVGPRGPILLEDYHLIEKVAHFARERIPERVVHARGASAKGFFECTHDVTSLTCADFLRAPGVRTPVIVRFSTVIHERGSPETIRDPRGFAVKFYTREGNWDLLGNNFPVFFIRDGIKFPDVIHAFKPNPRSHVQEYWRVFDFLSHLPESLHTFFFLFDDVGVPSDYRHMEGFGVNTYTFVSAAGKAQYVKFHWKPTCGVRCILTDEEAALVGGRNHSHATQDLYDSIAAGSFPEWTLYVQVMDPDTEEQYDFDPLDDTKTWPEDLLPLRPVGRLVLDRNVDNFFNENEQLAFGPGLVVPGIYYSDDKMLQCRVFAYADTQRYRLGPNYLMLPVNAPRCAHHNNHYDGAMNFMHRDEEVDYYPSRHAPLRQAAPPTPLPPRPVAGRREKATIRKPNDFKQPGERYRSWDADRQDRFVRRFADSLGHPKVSQELRSIWIDLLAKCDASLGMKIATRLNMKPNM

SEQ ID NO: 38218 - protein, 79 aa, Helianthus tuberosus
MSCCNGKCGCGSSCSCGSSCNGCGMYPDVEVSATTVMIVDGVAPKQMFAEGSEGSFVAEGGNCNCKCGDNCKCGNNCSC

SEQ ID NO: 38219 - protein, 335 aa, Pseudomonas putida
MALNKEAPEFDIDDDVLLMETGIVLETDVVSDEPAVPSVRTRAKSGSSLKQHKYIDYTRALDATQLYLNEIGFSPLLSPEEEVHFARLSQKGDPAGRKRMIESNLRLVVKIARRYVNRGLSLLDLIEEGNLGLIRAVEKFDPERGFRFSTYATWWIRQTIERAIMNQTRTIRLPIHVVKELNVYLRAARELTQKLDHEPSPEEIATLLEKPVAEVKRMLGLNERVSSVDVSLGPDSDKTLLDTLTDDRPTDPCELLQDDDLSQSIDQWLGELTDKQREVVVRRFGLRGHESSTLEDVGLEIGLTRERVRQIQVEGLKRLREILEKNGLSSESLFQ

SEQ ID NO: 38220 - protein, 172 aa, Oryza sativa (japonica cultivar-group)
MGQAWASLQDKLQGRQWKEKQVRKITDKVFDRLTEDTKKREQEALTFEEVYIAVLCVYNDINKYLPGPHYDPPSKEKLKAMMNEYDINLDGLLDREEFAEFIRKLTAESLCAISFKLLVTLVAAPALALATKRATEGVPGVGRVVRKVPNSIYASVITLGVVMAQKSTEGVE

SEQ ID NO: 38221 - protein, 149 aa, Glycine max
MSSICISNCINDARDPRVPVRASYVNLYKWPESDAEFVRSRSCNREKGSHILYGHPRVVDSISCRQMYLRSYTFSREEENELEKTHKCFGRAKMKKKKKHGSETKPDEAKKTKCLVWSKAKEVSCSALSRILRRVLSCSASVDVVDEKY

SEQ ID NO: 38222 - protein, 165 aa, Oryza sativa (japonica cultivar-group)
MAQFFCRMWDRAQGKLYVVRICDKVFTELSDKNTQLLDISSLHVATLMVYNSINKQLAGPHKDPPCMNVVAKQMEQYKKETPEGITLEEFRRLIMEWVRKDLRLVLANKAAVAIMAAPLLAVTTKSAGRQVPRVGPAVEKVPTPLLFTVFSVGLMFLQDIRAGKQ

SEQ ID NO: 38223 - protein, 375 aa, Candida albicans SC5314
MSIDPETRRKLLNLQKTGENKKCFDCSAPNPQWASPKFGIFICLECAGVHRGLGVHISFVRSITMDQFKPEETLRMEIGGNERLKKYFIDNGVDLNLSPKQKYDNYVAEDYKEMLTCEVEGKEFVAKDHSGEKLPDINNTASTTTDPVSRGRPTPVPLTNEQKQKNEAYFADLGAKNDQRPDHLPPSQGGKYGGFGNTPAPSNTTSNNNNNNNSNNNNNNSSLSSFTLDNFQNDPLGTFTKGWGLFSSTVVKSVQEVNNSVIKPSIDQIQSSKITGQAKTAMAQFGQKMQQTGKYGQETFQTFTKDINENGLNKTLDSTFGGIFGHNNNNNGSNQGNQVPNAFGFKKPDNGVKYESLSGGSKKNDDDDDDKWDDF

SEQ ID NO: 38224 - protein, 481 aa, Populus euphratica
MVFKLNSHLLSRIASSDGHGEDSPYFDGWKAYDSDPHHPTDNPNGVIQMGLAENQLCFDLIQDWLKKNPKASICSPEGLNEFREIAIFQDYHGLPEFRNAVANFMEKVRGNRVTFDPDRIVMSGGATGAHETIAFCLADPGEAFLVPTPYYPGFDRDLRWRTGVKLIPVDSDSSNNFMVTREALENAYEKAQLDNIKVKGLLITNPSNPLGTILDRETLRSIVRFINEKNIHLVCDEIYAATVFSQPDFISVRRILQEDIECNLDLVHIVYSLSKDMGFPGLRVGIIYSYNDAVVSCARKMSSFGLVSTQTQYLIASMLSDNEFVEMFIRESKRRLAARYRVFTRGLDQVGIECLKTSNAGLFLWMDLSRLLKQQTFKAEMELWRVIIHEVKLNVSPGCSFHCLKPGWFRVCFANMDDETMQVALSRIKTFVNKEADTKKSRKNLRWQGSLKLLNSPRIYDDFINSPHSPIPQSPLVRARN

SEQ ID NO: 38225 - protein, 189 aa, Haemophilus somnus 129PT
LGDGCLMEGISHEACSLAGTLGLGKLIAFYDDNNISIDGHVDGWFTDDTQKRFEAYGWHVIPAVDGHNAEQIVGAIKQAQAEKNKPTLIMCKTIIGYGSPNKQNTHDSHGAPLGDEEIALTRQALNWNYAPFEIPADIYAKWNAHEKGQVAENAWNEKFAAYEKAYPELAVEFKRRLNGELPANWATES

SEQ ID NO: 38226 - protein, 486 aa, Populus x canadensis
MERQHQLLSKIATNDRHGENSPYFDGWKAYDKNPFHPTDNPDGVIQMGLAENQLSADSIIDWIKKHPKASICNPEGVHMFKDIANFQDYHGLPEFRQAIAKFMGRVRGGRVTFDPDRIVMSGGATGANELIMFCLADPGDAFLVPSPYYPAFYRDLGWRTGVQIVPVDCDSSNNFQITKVALEAAYDKAQQDGINVKGLIITNPSNPLGTTLDRETLKCLLSFINEKNIHIVCDEIYAATIFSSQNFVSVSEVIEEVMDCNRDLIHIVYSLSKDMGLPGFRVGIVYSYNDAVVNCGRKMSSFGLVSSQTQYLLASMLSDEEFVEDFLAESSKRLKKRHGIFTKGLEQIGISCLESKAGLFVWMNLRHLLKEQTNDGEMELWRVIVNDVKLNVSPGSSFHCVEPGWFRVCFANMDDETLEVALKRIHAFVGEQKERETLSTKTKDMPSKTKCWKKNLRLSFSSRIFEEGIGSPIAMSPHSPLVRART

SEQ ID NO: 38227 - protein, 194 aa, Ananas comosus
GAAASAWWATQGLLPLFPPTPLGFAFPPPPATTGLPIVGDTRTSEKESGDGIYQGPSKDQEAPNLDQSEGLKQYPSSKPSLSSLSDSDESGREEEKRSLCAELKASRTSKSKPSSANEGTNNADSLRNNKKQDRSSCGSNTPSSSDVETDMPENDEQINDNSKQDYFGNSSAGDTNYRRFRSSGSTIRFVERSI

SEQ ID NO: 38228 - protein, 482 aa, Burkholderia pseudomallei K96243
MKVSARELRYEQGIDRLLELAGARDDTEYADVADEFASAPSSAFAHDLGEPDSLDHQASDESAGAGSFGDKPTRPAHGDTDVDTDWRDDDAPPSGSNDAAPVDTAASTDPLALFVRRMHAVPLLTHAQEIALAAEIEAGREQVLQALAEALDRLDLASLPADPALGRARAALQRARARGDEGARAFARARTAAYAALAAHGWPSAEVDAVRRAMRRLPTSPEKSDAGAQRAFADGEARISAATARMAEANLRLVLSIARKYASRGLDLADLLQEGNLGLLRAIEKFEHRRGFKFSTYATWWIRQAISRAIADRARTIRVPVHVGDEARRVRKAADRIERRSGVNASLAELSEATGLPAERLRAVLTLPREPRSLNAPLGDDDQAEFGDIVEDTSTPSLFDALAHGQMCDVVTSLLKTMSAQEADILRRRFGIGGDEPWSYEQIAARAGVSREQVRRIEKRALQTLRVTAEACNAHDFLDVQP

SEQ ID NO: 38229 - protein, 197 aa, Brassica napus
  misc_feature (183)..(183): Xaa can be any naturally occurring amino acid
  misc_feature (185)..(185): Xaa can be any naturally occurring amino acid
  unsure (1)..(197): unsure at all Xaa locations
VDPRVRKFLGQPDDIAELSGVVSVWVIPLHFAFALSFPLQRFLQCQLKNQVTAIASAIALVVHFLVCWLFVDGLKLGVVGTMATVSISWWVNVLITLGYSVCGGCPLTWTGFSSEAFTGLWEFLKLSASSGVMLCLENWYYRILIIMTGNLENARIAVDSLSICMSIKGWEMMIPIAFFAGTXGXRVANELRAGHGE

SEQ ID NO: 38230 - protein, 258 aa, Triticum aestivum
  misc_feature (56)..(56): Xaa can be any naturally occurring amino acid
  misc_feature (62)..(62): Xaa can be any naturally occurring amino acid
  misc_feature (227)..(227): Xaa can be any naturally occurring amino acid
  misc_feature (242)..(242): Xaa can be any naturally occurring amino acid
  misc_feature (252)..(252): Xaa can be any naturally occurring amino acid
  unsure (1)..(258): unsure at all Xaa locations
MSTAVANWCYATVAPRARSSTIVASLGTPAPSNSSSFRPKLIRNTPVQAAPVAPAXMDAAVXRLKTGFEKFKTEVYYKKPDFFEPLKAGQAPKYMVFACADSRVCPSVTLGLEPGEAFTIRNIANMDPSYCKNKYAGVGSAIEYAVCALKVEVIVVIGHSRCGGIKALLSLKDGAYDSFHFDEDCVRIGFPANKKVHTDCASMPYDDQCSVLEKEAVNVSLQKLLTXPFVKEGVSNGTLSLXGGHYNFVSGXFETWEQ

SEQ ID NO: 38231 - protein, 528 aa, Ustilago maydis 521
MVNITYGVLQAPDGSSATSSAIANGTDIIVSYGPNGESVASYSPGDISWVLTCTALVWLMIPGLGYLYSGLARRKNALHLLLLTLAALAVVSFQWFFWGYSLTFSQTSGAFLGNLRNFGYMGVLENPVPQAYNKVPEIVYAIYQCMFANLVPAIAIGAACERGRVWPFLVFTFVWTTLVYDVIACWVWNPTGWAFKWGVLDYAGGGPVEINSGITGLVISYYLGPRTGYGTERLLFKPHNVSYIFLGTAFLWFGWIGFNGGSVFAANLRAAMAISTTNLAASSAGLTWMFLDWRLERKWSVVGFCTGAIAGLVAITPAAGFVGMPAALLVGVVSSAVSNFATVLKGPMRVDDVMDIFSVHALAGIVGTLLTGIFAQASVANNDGNTVIAGGWLDSNWIQLAYQLAYCVAVTCWCGGVTFAIMFVIDHIPYIGPFRSSEMGEVVGMDEDQCGEWAYDYAFINRDLEGNYKPDHGQTLDINEKMPNVHQTDSLRSETHADSSQDNSNSQLAAAEHQSPSTAEPAVEMKQA

SEQ ID NO: 38232 - protein, 607 aa, Arabidopsis thaliana
MDTKIGSIDDCKPTNGDVCSPTNGTVATIHNSVPSSAITINYCDATLGRHLARRLVQAGVTDVFSVPGDFNLTLLDHLMAEPDLNLIGCCNELNAGYAADGYARSRGVGACVVTFTVGGLSVLNAIAGAYSENLPLICIVGGPNSNDYGTNRILHHTIGLPDFSQELRCFQTVTCYQAVVNNLDDAHEQIDKAISTALKESKPVYISVSCNLAAIPHHTFSRDPVPFSLAPRLSNKMGLEAAVEATLEFLNKAVKPVMVGGPKLRVAKACDAFVELADASGYALAMMPSAKGFVPEHHPHFIGTYWGAVSTPFCSEIVESADAYIFAGPIFNDYSSVGYSLLLKKEKAIVVQPDRITVANGPTFGCILMSDFFRELSKRVKRNETAYENYHRIFVPEGKPLKCESREPLRVNTMFQHIQKMLSSETAVIAETGDSWFNCQKLKLPKGCGYEFQMQYGSIGWSVGATLGYAQASPEKRVLAFIGDGSFQVTVQDISTMLRNGQKTIIFLINNGGYTIEVEIHDGPYNVIKNWNYTGLVDAIHNGEGNCWTAKVRYEEELVEAITTATTEKKDCLCFIEVILHKDDTSKELLEWGSRVSAANSRPPNPQ

SEQ ID NO: 38233 - protein, 327 aa, Escherichia coli K12
MATRIEFHKHGGPEVLQAVEFTPADPAENEIQVENKAIGINFIDTYIRSGLYPPPSLPSGLGTEAAGIVSKVGSGVKHIKAGDRVVYAQSALGAYSSVHNIIADKAAILPAAISFEQAAASFLKGLTVYYLLRKTYEIKPDEQFLFHAAAGGVGLIACQWAKALGAKLIGTVGTAQKAQSALKAGAWQVINYREEDLVERLKEITGGKKVRVVYDSVGRDTWERSLDCLQRRGLMVSFGNSSGAVTGVNLGILNQKGSLYVTRPSLQGYITTREELTEASNELFSLIASGVIKVDVAEQQKYPLKDAQRAHEILESRATQGSSLLIP

SEQ ID NO: 38234 - protein, 288 aa, Oryza sativa
MVSSSNPGRTPPLVAAIVCSVLLLAGGAAGNFYQDVDITWGDGRGKILGNGQLLTLSLDRSSGSGFQSKNQYLYGRFDMQIKLVPGNSAGTVATFYLSSQGSQHDEIDFEFLGNASGEPYTVHTNVYSQGKGGREQQFRMWFDPTKDFHTYSVLWNPSHILFYVDGTPIREYRNTEATTGVAFPRAQAMRVYATLWDAEEWATQGGRVRTDWSRAPFTASYRGLAASGCTSQDATACANPGSPWMYQQQLDSASQDRLRQVQRDYMIYNYCADTYRFPQGFPPECPAK

SEQ ID NO: 38235 - protein, 282 aa, Bifidobacterium longum DJO10A
MLEPPVTPIRKANDGLELPATGFGTYKVNGLAGVDAIKSAIHQGYRLIDSAFNYENEGVVGRAIRESGVPREDIIVTSKLPGRHHAHDEALLTIEESVCRMGLDYIDLYLIHWPNPSQGQFVEAWEALVEARERGLVKHIGVSNFLPGHIDLLIRDTGVTPAVNQVELHPYFQQREQLAYDNAHGIITEAWSPLGRANQMLRDPDLKRIAAKHGISVVQAILRWHLQYGDVAIPKSLNPERQRQNLDLTAFELDDQDMADIAAMDNPEGHTFGQNPHWHEEA

SEQ ID NO: 38236 - protein, 374 aa, Vibrio sp. Ex25
MGRSKGGAFRHTRAEDLSARLMKGILARNPQVNPSEIEDIYWGCVQQTLEQGFNVARNAALLAGLPIEIGAVTVNRLCGSSMQALHDGTRAIMTGDAEICLIGGVEHMGHVPMNHGVDFHPGMSKNVAKAAGMMGLTAEMLGKLHGISREQQDEFAARSHARAHAATVEGRFKNEILPIEGHAADGTLFTLDYDEVIRPETSVEGLSQLRPVFDPANGTVTAGTSSALSDGASAMLIMSEEKANELGLKIRARIKGMAIAGCDPSIMGYGPVPATKKALKRAGLSIEDMDVVELNEAFAAQSLPCAKDLGLLDVMDEKVNLNGGAIALGHPLGCSGSRISTTLINLMEAKDAKYGLATMCIGLGQGIATVFERP

SEQ ID NO: 38237 - protein, 169 aa, Glycine max
  misc_feature (20)..(20): Xaa can be any naturally occurring amino acid
  misc_feature (24)..(24): Xaa can be any naturally occurring amino acid
  misc_feature (73)..(73): Xaa can be any naturally occurring amino acid
  misc_feature (94)..(94): Xaa can be any naturally occurring amino acid
  unsure (1)..(169): unsure at all Xaa locations
RVSYVGPPPFDFIASKLAKXVSSXPEELHPPPGRQRELGFTFSFPVKQTSIASGTLIKWTKGFHIEDAVGEDXVGGLTKSLEKIGLDMRVAALXNDTVGTVARARFSNQDVIAGVILGTGTNAAYVECAHAIPKWQGLLPKSGEMVINMEWGNFCSSHLPLTEYDQALD

SEQ ID NO: 38238 - protein, 147 aa, Methanosarcina acetivorans C2A
MHKGGLQLAQNKIEKSEEEWKKILTPEQYHVLRQKGTEKPFSGNLYYNKEKGVYTCAACGQELFSSDTKFESGTGWPSFYDAISSDKVRLKEDNSYFMHRIEVVCSRCGSHLGHVFEDGPVPTGKRYCINSVSLGFEKEEEAEREEK

SEQ ID NO: 38239 - protein, 138 aa, Sulfolobus islandicus
LNNITVAKILLEMLKSSLGPKGLDKMLVEGQDVTITNDGATIVKNMEVQHPTAKLLIETAKTVDTEVGDGTTSVVVLAGLLLEKAEDLLNQKIHPTAIIEGYRKALNSSLDLLKSIADKISPEDRKIIHDLVYTTLSS

SEQ ID NO: 38240 - protein, 218 aa, Methanosarcina acetivorans C2A
MLKAIIFDVDGVLVDSMRFQAEAWVKTLKEVGVTVSREDIYELEGSNNLGLIKLVFEKAGKEPEPWHYEQLPVKKREVLEFDRIKPFEGMPSCLNQLKKHFRLAMVSGSNFDVVSTFANSFFPDCFEVIITGGDLARGKPCPDPYLKALEKLDLATNECIVVENAPLGITAAKRAGLYCVAVASMLAPEKVKHADLVFENHAALLDYLKSLIPGESHT

SEQ ID NO: 38241 - protein, 351 aa, Uncultured proteobacterium
MATTTAVNESTQQALENRLLAPKFYRTDYKAMNTLDVSPVRREWDVMMANFEEDKNRAHFKQSIEFDPESLDVDMDLKRDFLDFLVSSITSEYSGCVLYQEIEKNVDNPDVSKLMRYMARDESRHAGFINRALKQLGVAVDLSVLKQTKEYHYFRPKFIYYATYLSEKIGYARYITIYRHLQRNPQNQFHPIFNWFERWCNDEYAHGEAFALLMRSDPKLLRGHNKLWIRFFLLAVYSTMYVRDHSRPKLYQAFGMDPTKFDYQVFDITSEISQQVFPMTLNTDDPRFRRGMERLLFLSEKAEGLRAKGGLINKCLRLGVMAQSGLTFARLYCLPTKPNTLPDQVCMTPAW

SEQ ID NO: 38242 - protein, 432 aa, Bacillus anthracis str. Sterne
MNVTTDVQSTTEETKEKRYKTLFGSALGYAAEGLDMLLLSFVLVYILKEFHLSPVEGGNLTLATTIGMLIGSYLFGFIADLFGRIRTMAFTILLFSLATALIYFATDYWQLLILRFLVGMGVGGEFGIGMAIVTETWSKEMRAKATSVVALGWQFGVLIASLLPAFIVPHFGWRAVFLFGLIPALLAVYVRKSLSEPKIWEQKQRYKKELLQKEAEGNLTTTEAAQLKQMKKFPLRKLFANKKVTITTIGLIIMSFIQNFGYYGIFTWMPTILANKYNYTLAKASGWMFISTIGMLIGIATFGILADKIGRRKTFTIYYVGGTIYCLIYFFLFTDSTLLLWGSALLGFFANGMMGGFGAVLAENYPAEARSTAENFIFGTGRGLAGFGPVIIGLLAAGGNLMGALSLIFIIYPIGLVTMLLCVPETKDKVLE

SEQ ID NO: 38243 - protein, 173 aa, Triticum aestivum
MAMRALALSPSQSSSFGLHQSMPSFKPSSASPARPVRAYAKADEQEEEKKKVPKQSLFGNITEALDFSQVRSEKDAELLYEARDSIKDEGRMTREQYAALRRKIGGTYKDFFKSYVEVDGEYVEEGWVDKTCKVCKKDTRGEPRQVDNLGRYMHVACAENSKPTNFFSKLFSR

SEQ ID NO: 38244 - protein, 369 aa, Streptococcus mutans UA159
MAKRIKNTTPKQDGFRMPGEFEKQKQIWMLWPWRNDNWRLGAKPAQKAFLEVAEAISEFEPVSLCVPPLQYENALARVSELGSHNIRIIEMTNDDAWIRDCGPTFLVNDKGDLRAVDWEFNAWGGLVDGLYFPWDQDALVARKVCEIEGVDSYKTKDFVLEGGSIHVDGEGTVLVTEMCLLHPSRNPHLTKEDIEDKLKDYLNCVKVLWVKDGIDPYETNGHIDDVACFIRPGEVACIYTDDKEHPFYQEAKAAYDFLSQQTDAKGRPLKVHKMCVTKEPCYLQEAATIDYVEGSIPREEGEMAIASYLNFLIVNGGIILPQYGDENDQLAKQQVQEMFPDRKVVGVRTEEIAYGGGNIHCITQQQPAT

SEQ ID NO: 38245 - protein, 633 aa, Phalaenopsis hybrid cultivar
MEGCDCIEPQWPADELLVKYQYISDFFIALAYFSIPLELIYFVKKSSFFPYRWVLIQFGAFIVLCGATHLINLWTFTMHSRTLAIVMTVAKVSTAVVSCATALMLVHIIPDLLSVKTRELFLRNKAEELDKEMGLIRTQEETGRHVRMLTHEIRSTLDRHTILRTTLVELGRTLDLAECALWMPSRTGLNLQLSHTLNNQIPVGSVVSINLPVVNQVFNSSRAVRIPHTCQLARFQPHTGRYVPPEVVAVRVPLLHLSNFQINDWPELSAKNFAVMVLMLPSDSARKWHVYELELVEVVADQVAVALSHAAILEESMRARDQLMDQNVALDLARREAEMAIRARNDFLAVMNHEMRTPMHAIIALSSLLLETELTPEQRLMVETILKSSNLLATLINDVLDLSKLEDGSFELEVTVFNLHTVFREVVNLIKPIAAVKKLSLIVSLSPDLPSCAVGDEKRLMQTMLNVVGNAVKFTKEGSISITASIAKPDSLRDPRDPEFYPIPSDGHFYLRVQIKDTGCGISPQELPHLFTKFAHAQNGSDKGYNGSGLGLAICKRFVNLMKGHIWLESEVLGKGCTTIFIVKVGISEDPAHRYQHKLLPPIRAGQSEADAFGSKRTPTDLIPLKNRYQRSL

SEQ ID NO: 38246 - protein, 336 aa, Legionella pneumophila str. Paris
MSYEELSNTMEQMLHEGKGILAADESNSTIGKRFASINTENTEENRRDYRLLLATTPDLEQYINGVILFEETFTQTDEHGTPIPELFANKGIIPGIKVDKGLVDLANTEHEKVTQGLDGLTERLLHFKKLGAKFAKWRNVYSISEYTPSLTAIKTGAENLGRYAAACQSVGIVPIVEPEVLMDGNHSIEHCAEVCEMVLHELFHTLFIHQVELEHIILKPSMVTCGKEVTPFSDPEEVADYTISVFRNNVPASVPTINFLSGGQTPQQATANLNAINQIGHQPWLLSFSFGRALQEDCLKEWCGNKANITKAQEALIKRARLNSMACLGEYQNDME

SEQ ID NO: 38247 - protein, 267 aa, Triticum aestivum
  misc_feature (118)..(118): Xaa can be any naturally occurring amino acid
  misc_feature (136)..(136): Xaa can be any naturally occurring amino acid
  misc_feature (154)..(154): Xaa can be any naturally occurring amino acid
  unsure (1)..(267): unsure at all Xaa locations
VAAVAVAVGVAMEEHKPLAAMVVVQCIYAAMALWAKAMFSRGMNPMVFVVYRQAIATLVLVPITVLANRKRLKEILCIGTTGFALVFLASLVGATANQYMYYQGIYLGSSSMATAMTXTLIPAITFVLATSVGLEXVEIRKPRSMAKIFGTAVXCVGGAMVMTFLKGPKLLHDSLGVGGAGLDLDDLLLLNSPASRNWVMGALFLVGSSSCWSLWLIIQVPICKSYVDPLTLSAWMCFLSTAQIALLNSFVLPDLDAWKINSLFELM

SEQ ID NO: 38248 - protein, 381 aa, Arabidopsis thaliana
MTTMSDLSPDLVGEILTRVPMTSLISVRCTCKMWNALSKEGIFFKAARKQFMGFTMMDSRVCSMKFDLQGIRNNEHDFVDPCIKQIAKLDQIEVSKVLQCDGLLLCVGKDNSRLLVWNPYLGQTRFIKPRKRFNKLEWYALGYDNNHNYKILMNYDTGHLFGYEIYDFSSDSWRVLDVSPDCHIPFHQQSVSLNGNTYFLAQEKIIVEGEEEEVVDEIEKFLLCFDFTTERFGPRLPLPFHSDVLETVAISCVRDDQLAVLYQRFETWEIWVTTKIDPTAVSWSMFLSVDMEPPTGCQFDDEAGSFFIDEENKVAVFFNSDLFNPRVENRNRRYPTAYIIGQDGYFKSATLREAPDLVKPDPYVYCCPLVWSSYAPSLVQL

SEQ ID NO: 38249 - protein, 459 aa, Glycine max
MGSRSRTVNVNTKDTNKVLNGMPSYAPPLPSSNSIAMEATNVHPSRISEFGTLEQSLGFRVEDTINLSRNPMFNQMKSNSQALGADIQFGALNKSIATSDINLSAAIAGSQALVLQKDSQPTLASTSAGRENWGETNLADASPRTDTSTDDTEDKNQRPERGESSGSKDKSDQKTLRRLAQNREAARKSRLRKKAYVQQLESSRLKLTQLEQELQRARQQGIFISSTGDQAQSMSGNGAMAFDVEYARWLEEHNRQTNELRAAINSHAGDIELRTIVDNFMTQFDDILRLKGIAAKADVFHILSGMWKTPAERCFMWIGGFRSSELLKLLESQLEPLTEQQLMGIYNLQQSSQQAEDALSQGMDALQQSLSETLANGSPSTSGSSGNVASYMGQMAMAMGKLGTLDGFLRQADNLRQQTLQQMLRILTTRQSARALLAISDYFSRLRALSSLWLARPRE

SEQ ID NO: 38250 - protein, 966 aa, Oryza sativa
MARNAADKGTSIDAQLRILAPKKLSEDDKLVEYDALLLDRFLDILQDLHGEDIRETVQECYELAAEYESKVDPKQLDAIGNVLTRLDPGDSIVMTKSFSHMLILANLAEEVQIAYRRRIKLKKGDFADENSATTESNFEETLKRLVGELKKSPHEVFDALKNQTIDLVLTAHPTQSVRRSLLQKHGRIRSCLTKLYAKDITPDEKQELDEALKREIQAAFRTDEIRRAPPTPQDEMRAGMSYFHETIWKGVPKFLRRVDTALKNIGINERVPYNAPLIQFSSWMGGDRDGNPRVTPEVTRDVCLLARMMAANLYYAQIEDLMFELSMWRCSDELRVKADQLHRCAKKNTTKHYIEFWKQVPPSEPYRVILSNVRDKLYNTRERARHLLASGFSEIPDEATFTDVEQFLEPLELCYRSLCACGDNSIADGSLLDFLRQVSTFGLSLVRLDIRQESDRHTDVMDAITQYLGIGSYREWSEEKRQEWLLSELNGKRPLFGPDLPQTDEIADALDTFHVIAELPYDSFGAYVISMATAPSDVLAVELLQRECHVKKPLRVVPLFEKLADLEAAPAALARLFSVDWYRNRIDGKQEVMIGYSDSGKDAGRFSAAWELYKAQEELIKVAKQFGVKLTMFHGRGGTVGRGGGPTHLAILSQPPDTIHGSLRVTVQGEVIEQSFGEEHLCFRTLQRFTCATLEHGMHPPISPKPEWRALMDEMAAVATKEYRSIVFQEARFVEYFRLATPELEYGRMNIGSRPSKRKPSGGIESLRAIPWIFAWTQTRFHLPVWLGFGAAFKHVLQKDIRNLQILQEMYNEWPFFRVTIDLVEMVFAKGDPGIAALYDKLLVSEDLWPFGARLRANYEETKQLLLQVAGHKDLLEGDPYLRQRLRIRDSYITALNVCQACTAKAYQGPGFHVSPRAHLSKDIMDSGKPAAELVKLNTTSEYGPGLEDTLILTMKGIAAGMQNTG

SEQ ID NO: 38251 - protein, 235 aa, Lactobacillus sakei subsp. sakei 23K
MANLVIVRHGESVANQLKTYTGWSDVALTAKGRQQAHQVGRQIKDAGFQFSHVHTSLLKRAILTSYIVLEELDQLALPMTKSWRLNERHYGALRGLNKDTTRTIFGVHQVARWRRSYTALPPLLIRSSTARRYRLVPRKSRPRGESLAQATQRLLPYWQDQVVPGLLAGQDQLIVAHGSTLRALIKVIEQISDQAIDGVEVANGEALYYQFGTDLTVLKKGRLALGSETDEEKEN

SEQ ID NO: 38252 - protein, 672 aa, Zea mays
MITFADLTEPAAAGAERCVDRQLWLACAGSMCTVPLVGASVCYFPQGHAEHALGLDGAADLSAARVPALVPCRVTAVRYMADPDTDEVFARIRLVPLRGGEAHAGGLDDDVAAADEQEKPASFAKTLTQSDANNGGGFSVPRYCAETIFPRLDYAADPPVQNVVAKDVHGTAWKFRHIYRGTPRRHLLTTGWSTFVNQKKLVAGDSIVFLRGDSGDLHVGIRRAKRGFCGAGGGGGDDSPAAGWDHYAGLMRGNVSPCAAAKARGKVRPEDVAEAARLAAAGQSFEVVYYPRASTPEFCVRAAAVRVAMRVQWSPGMRFKMAFETEDSSRISWFMGTVAGVQVTDPIRWPQSPWRLLQVTWDEPDLLQNVKRVSPWLVELVSSMPAIHLASFSPPRKKPRIPAYPEFPFEGQLLNPAFPPSPLPHGQQHHHNFLHAHPPSFFPFPDGSAPAAIQGARHAQFVPSLSDLHLIHLQSSLLYPGLRRPDHVGPTIPIPSGISTDLTIGGAPARDGVPCALSVGASKQNPDAVKPAGLVLFGRTILTEHQMSLSSSGGATSPAATGNSSLCWTAEKGPNVSEGSGSGSGSGVIQNSPTGKNTQQASEPGLEPGQCKVFVESDTVGRNLDLSALGSFDELYGRLSEMFGVEGAEMRSRVLYRGATGEVRHAGDEPFR

SEQ ID NO: 38253 - protein, 507 aa, Arabidopsis thaliana
MRLVSRIMCSRMGEMIDLFLLALMAGFIAVAYVFRSKQKKNLPPNPVGFPVIGHLHLLKEPVHRSLRDLSRNLGIDVFILRLGSRRAVVVTSASAAEEFLSQQNDVVFANRPLATLTEYMGYNNTLVSTAPYGEHWRRLRRFCAVDILSTARLRDFSDIRRDEVRAMIRKINVELVTSGGSVRLKLQPFLYGLTYNILMSMVAGKREEDEETKEVRKLIREVFDFAGVNYVGDFLPTLKLFDLDGYRKRAKKLASKLDKFMQKLVDEHRKNRGKAELEKTMITRLLSLQESEPECYTDDIIKGLVQVMLLAGTDTTAVTLEWAMANLLNHPEVLRKLKTELNEVSKEGRVFEESDTGKCPYLNNVISETLRLFPAAPLLVPHASSTDCEVAGFDIPRRTWLFINAWAIQRDPNVWDDPETFKPERFESETHRGKFLPFGIGRRACPGMGLAQLVLSLALGSLIQCFDWERDNDVAVDMSEGKGLTMPKSVPLVAKCKSLPILDKLVL

SEQ ID NO: 38254 - protein, 397 aa, Escherichia coli K12
MFQKVDAYAGDPILTLMERFKEDPRSDKVNLSIGLYYNEDGIIPQLQAVAEAEARLNAQPHGASLYLPMEGLNCYRHAIAPLLFGADHPVLKQQRVATIQTLGGSGALKVGADFLKRYFPESGVWVSDPTWENHVAIFAGAGFEVSTYPWYDEATNGVRFNDLLATLKTLPARSIVLLHPCCHNPTGADLTNDQWDAVIEILKARELIPFLDIAYQGFGAGMEEDAYAIRAIASAGLPALVSNSFSKIFSLYGERVGGLSVMCEDAEAAGRVLGQLKATVRRNYSSPPNFGAQVVAAVLNDEALKASWLAEVEEMRTRILAMRQELVKVLSTEMPERNFDYLLNQRGMFSYTGLSAAQVDRLREEFGVYLIASGRMCVAGLNTANVQRVAKAFAAVM

SEQ ID NO: 38255 - protein, 554 aa, Oryza sativa
FNRVPDASYVLPGRTLAIDSRRQNLAVEEGRFFANNQGLEHPRLSETSVSPRKESYLHNLDLSNDRTAYCHGRKSTEIVFSTRVPISPPGSKGQIPCPTSPVQSRAFGQCPGSPTARQDDSRSSSSPHPLPRPPGSPCSSSRVVSSQWKKGKLLGSGTFGQVYQGFNSEGGQMCAIKEVKVISDDSNSKECLRQLHQEIVLLSQLSHPNIVQYYGSDLSSETLSVYLEYVSGGSIHKLLQEYGAFGEAVLRNYTAQILSGLAYLHGRNTVHRDIKGANILVDPNGDIKLADFGMAKHISAHTSIKSFKGSPYWMAPEVIMNTNGYSLSVDIWSLGCTIIEMATARPPWIQYEGVAAIFKIGNSKDIPDIPDHLSFEAKNFLKLCLQRDPAARPTAAQLMEHPFVKDLVANRSFRSGMTRDTFPTSFDGKGAMVQTSNRSLSPLRDPDLTMRNLQVPTSAIPSISTRRISAINPSNVRMNMSLPVSPCSSPLRQYRQSNRSCMPSPPHPAYSAGAANYSPINNALYPKRPSNHVPDPWLEISQLKAPPFDSPRRL

SEQ ID NO: 38256 - protein, 385 aa, Trichodesmium erythraeum IMS101
MDDKLMLMIPGPTPVPETALLAMAKHPIGHRSGDFSKIMAEVTENLKWLHQTKNDMLILASSGTGAMEAGIINFLSPGDRVLCGCNGKFGDRWAEVATAYGLQVEKITAEWGKALETEKFRQHLEADKDKQIKAVILTHSETSTGVLNDLETINGYVKAHGEALIIVDAVTSLGAVSIPVDELGLDVVASGSQKGYMIPPGLAFVAVGPKAWTAYETAKLPRYYLDLGKYRKDAAKNTTPFTPPVNLFFALQATLRIMQAEGLENIFARHDRLKSATRAAIKALGLPLLASDKVASPAVTAVAPPTEVEAEKVRAIMKKRFDIALAGGQDHLKGKIFRIGHLGFVCERDVTSAIAALEVTLRDLGYESFTPGEALAAASRVLVES

SEQ ID NO: 38257 - protein, 1614 aa, Arabidopsis thaliana
MEEFDYISEFPDCLLTQILLNLPTKDSVKTSVLSKRWRNLWLNVPGLRLRTFDFPVFPYPYEEGFVRFMDRFMEFKCRSRLQKFMITYFEHNGYRDRLMELIGTLVDRGIQHLYVYMHTCNRVDFIRQNIYKSKTLVSLKLYNVELKNPEFVVSLPCLKILKLENIFHGEDGPLVVEKLISGCPVLEDLELIRPFDDNVGYGSLTAPKYSRNRDIIGDFLTVISSVRHTIICYSTSKMLYSYSKQLGPIPQFHNLYHLQARFSSSSLQLLPTFLESCPACPNLKNLIMEFPFEPKNIDFHKVPQCLISTLEYVQIEELILKEKSGIKLVDYFLENSAVLKKLTLSFTYHSKKKQDPESYKKLLTSTKLSPTLMGRDRISELPDGLLNHILMYLHIEESIRTSVLSSRWRKLWLKVPGLDVNVHDFPADGNLFESLMDKFLEVNRGRLQNFKLNYESNLYYLMDRFVPWIATVVDRGIQHLDVTATDCPPWTIDFMPANICKSKTLVSLKLVNVGLDTPKFVVSLPCLKIMHLEDIFYSPLIAENLISGCPVLEDLTIVRNHEDFLNFLRVMSQTLKNFRLTFDWGMGSNDFSVEIDAPGLKYMSFRDSQSDRIVVKNLSSLVKIDLDTEFNLKFGLGSPLEPEDLTKRDIIRDFLTGISSVKHMIISHPTLEVLYRYSKIGQLPKFHNLYHLQAVFSSSLLQLLPAFLEICPNLKNLILDYSISAEPEQIDFTNLPRCLISTLEYVEIKQLTMREESGIKLVKYFLENSAVLKKLTLSFIDSPMTNQESEIYMQLLTSTKRSRGCHVSIRFRKPQGPFGPKPKNKINPLVGFLEPDRFKYLTIIFLIIKSNQIKSAVKSKPSRISPTPAIICCQIKSTETDLGMEECDYINELPDSLLTQILLDLRTKDSVKTSVSSKRWRNLWLNVPGLDLFSLQFTNPHHEEGLIKFMDRFMESNCRSRLQKFMIRYFECNGYRDRFMELIGTVVDCGIQHLYVYMHTCNRVDFIRQNIYKSKTLVSLKLYNVELKNPDFVVSLPCLKILKLMKICYGEDGPLVVEKLISGCPVLEDLELIKPFDILTQDVILFLRVSSQTLKSLRLYFATNGSEDPRKRAIICDFLTVISSVRHMIISGSILEELHSYSKLGWIPQFRNLYHLQASFFGTSLQLLPTFLESCPNLKNLIMDYGAFKEENIDFHEVPQCLISTLEWRNLWLEVPGLDLNSVDFPFPYRDIIKNYTERFLEFNSASGLQKFKMTNNHGNYNVCCDRLKEWIAAAVDRGIQHLDFETKNPSLFLKDSMPMNIYKSKTLVSLKLVCVELENPKFVVSLPCLKIMHLENNWYGYDAPLVVEKLIAGCLVLEDLTVVRIHDMVIPDLPLLHVKSLTLKILRLVFDLEMMTTIPISVEIDAPKLEYMSFINRHSDTIMVKNLSSLFKLNLDTEFGYSSLEPRDIIRDVLTGISSVRQMIISQRTLEVICRYSKLGPIPKFHHLSHLKAAFSSTSLQLLPAFLESCPNLKKLILDLYVSAEPEEIDLTNVPRCITSTLECIEINKLIRKEATGVKLVHYFLENSPILKKLKPSFTDSPMSTMTNLPLDHLYKMYLTARKRSRRCQVIIS

SEQ ID NO: 38258 - protein, 162 aa, Triticum aestivum
MSAAERAVVFSEEKDALVLKSWAIMKKDSANLGLRFFLKIFEIAPSARQMFPFLRDSDVPLETNPKLKTHAVSVFVMTCEAAAQLRKAGKITVRETTLKRLGGTHLKYGVADGHFEVTRFALLETIKEALPADMWGPEMRNAWGEAYDQLVAAIKQEMKPSE

SEQ ID NO: 38259 - protein, 319 aa, Sulfolobus solfataricus P2
MKIAVVGCDGFGKVHLRAMRNISGIEYYVFSRNEEKARECMKEFNAEGYFTRYEDVIKSNVDIVDLLVSHDQHYPMGVMAMKAGKHLMLEKPIARTIEEAMGLINTSKDTKRKFMVLEQFYFESSVRKAKELLPRLGNLSLIIVRSIHLYQPKGWRREKEKMGGGALIDGGVHFIDTLLNLGGEYESVRGVCGKYFSGIEGEDLTLATLRFRKGHLGLLMYSWTTPNPPKVPAFEIYGENGSIIEDPNTRVMGKAYGDLILNVDGKEERIEVEKVNPIEEEIRGFVKAVKNNTEVPMPPEIALRDLKAVLDIYKSCGYS

SEQ ID NO: 38260 - protein, 452 aa, Porphyromonas gingivalis W83
MINAVNILQEGSMMKSLTKLGIPIVIAMLIMAIYNVVDTFWVARLGTLPVAAVSVVFPLSLVFLGIGLMFGVGGGVYISRLLGAKQIVKAGQVASVSVITSVILAALIALVCNAFLPEILLFMGANEEMMSLAEAYGRLFIVSCVIGTLNVSMSNIIVSQGASKTSASAMIIGSVINVALDPLFIYAFGWGVKGAAWATILSRIITTIIYTCFFMKAEVKVSFALFVPTIRMYLDIIKIGISMLCLQLLQTLSISLLQRAAVKYGAEAVAAVGIVLKIVTLGTNVVFGFVKGLQPMAGYNYGAENFQRLKEAVRCSLILTTSFCVLWSTFILVFASPVISCFGKDETMQEIARIALRANTLMFFTFGFQFVYSTLYMAIGRARQSLLLNIGRQGLFFIPVILLLPSYWGLNGVLYAQPVADVFATLMTLFFAIQIHREIRHKSHLTTENLQC

SEQ ID NO: 38261 - protein, 686 aa, Bacillus circulans
APDTSVSNKQNFSTDVIYQIFTDRFSDGNPANNPTGAAFDGTCTNLRLYCGGDWQGIINKINDGYLTGMGVTAIWISQPVENIYSIINYSGVNNTAYHGYWARDFKKTNPAYGTIADFQNLIAAAHAKNIKVIIDFAPNHTSPASSDQPSFAENGRLYDNGTLLGGYTNDTQNLFHHNGGTDFSTTENGIYKNLYDLADLNHNNSTVDVYLKDAIKMWLDLGIDGIRMNAVKHMPFGWQKSFMAAVNNYKPVFTFGQWFLGVNEVSPENHKFANESGMSLLDFRFAQKVRQVFRDNTDNMYGLKAMLEGSAADYAQVDDQVTFIDNHDMERFHASNANRRKLEQALAFTLTSRGVPAIYYGTEQYMSGGTDPDNRARIPSFSTSTTAYQVIQKLAPLRKCNPAIAYGSTQERWINNDVLIYERKFGSNVAVVAVNRNLNAPASISGLVTSLPQGSYNDVLGGLLNGNTLSVGSGGAASNFTLAAGGTAVWQYTAATATPTIGHVGPMMAKPGVTITIDGRGFGSSKGTVYFGTTAVSGADITSWEDTQIKVKIPAVAGGNYNIKVANAAGTASNVYDNFEVLSGDQVSVRFVVNNATTALGQNVYLTGSVSELGNWDPAKAIGPMYNQVVYQYPNWYYDVSVPAGKTIEFKFLKKQGSTVTWEGGSNHTFTAPSSGTATINVNWQP

SEQ ID NO: 38262 - protein, 460 aa, Yarrowia lipolytica
MCVDSCVQRSSLPHLSRPPGNLHKIINSDIYIYIKPHAPTPLLVAFAPTPHPSTTTSPFGQGLHQAHRQRVASLPTYGKTTTFNLPDNRPIKTVHCPSCEHVCRPQTQDAEAQKLQEAVTQRRRRSGAPGNSFPSAITALHPRQTHAPRERPSARQPDKPNGNRWELGVEFKIDIRAQDLRTIQELGAGNGGSVSRVEHIPTGAVMAKKVIHIGGKEAVRRQILRELHIMHECDSPYIVSFYGAFINESSGDVVMCMEFMDCGHLDRIYKKAGPLTEEIVGHITVAVVEGLTYLYNEHRIVHRDVKPSNILVNSHGQIKLCDFGVSGELINSIADTFVGTSTYMSPERIQGGNYTVKSDVWSLGISLLELLLGKFPFDMANGAVGPMGILDLLQRIVNEPPPTLPAEDTRFSPVCRRFVDRCLVKEPERPSPQQLHPTMPFIITSRAKQVDMKAWAMSVQ

SEQ ID NO: 38263 - protein, 686 aa, Bacillus circulans
APDTSVSNKQNFSTDVIYQIFTDRFSDGNPANNPTGAAFDGTCTNLRLYCGGDWQGIINKINDGYLTGMGVTAIWISQPVENIYSIINYSGVNNTAYHGYWARDFKKTNPAYGTIADFQNLIAAAHAKNIKVIIDFAPNHTSPASSDQPSFAENGRLYDNGTLLGGYTNDTQNLFHHNGGTDFSTTENGIYKNLYDLADLNHNNSTVDVYLKDAIKMWLDLGIDGIRMDAVKHMPFGWQKSFMAAVNNYKPVFTFGQWFLGVNEVSPENHKFANESGMSLLDFRFAQKVRQVFRDNTDNMYGLKAMLEGSAADYAQVDDQVTFIDNHDMERFHASNANRRKLEQALAFTLTSRGVPAIYYGTEQYMSGGTDPDNRARIPSFSTSTTAYQVIQKLAPLRKSNPAIAYGSTQERWINNDVLIYERKFGSNVAVVAVNRNLNAPASISGLVTSLPQGSYNDVLGGLLNGNTLSVGSGGAASNFTLAAGGTAVWQYTAATATPTIGHVGPMMAKPGVTITIDGRGFGSSKGTVYFGTTAVSGADITSWEDTQIKVKIPAVAGGNYNIKVANAAGTASNVYDNFEVLSGDQVSVRFVVNNATTALGQNVYLTGSVSELGNWDPAKAIGPMYNQVVYQYPNWYYDVSVPAGKTIEFKFLKKQGSTVTWEGGSNHTFTAPSSGTATINVNWQP

SEQ ID NO: 38264 - protein, 620 aa, Zea mays
  misc_feature (206)..(206): Xaa can be any naturally occurring amino acid
  misc_feature (240)..(240): Xaa can be any naturally occurring amino acid
  unsure (1)..(620): unsure at all Xaa locations
SPCSLVILLQMQIFVKTLTGKTITLEVESSDTIDNVKAKIQDKEGIPPDQQRLIFAGKQLEDGRTLADYNIQKESTLHLVLRLRGGMQIFVKTLTGKTITLEVESSDTIDNVKAKIQDKEGIPPDQQRLIFAGKQLEDGRTLADYNIQKESTLHLVLRLRGGMQIFVKTLTGKTITLEVESSDTIDNVKAKIQDKEGIPPDQQRLXFAGKQLEDGRTLADYNIQKESTLHLVLRLRGWLXDFCEDHLTGKTITFEVESSDTIDNVKAKIQDKEGIPPDQQRLIFAGKQLEDGRTLADYNIQKESTLHLVLRLRGGMQIFVKTLTGKTITLEVESSDTIDNVKAKIQDKEGIPPDQQRLIFAGKQLEDGRTLADYNIQKESTLHLVLRLRGGMQIFVKTLTGKTITLEVESSDTIDNVKAKIQDKEGIPPDQQRLIFAGKQLEDGRTLADYNIQKESTLHLVLRLRGGMQIFVKTLTGKTITLEVESSDTIDNVKAKIQDKEGIPPDQQRLIFAGKQLEDGRTLADYNIQKESTLHLVLRLRGGMQIFVKTLTGKTITLEVESSDTIDNVKAKIQDKEGIPPDQQRLIFAGKQLEDGRTLADYNIQKESTLHLVLRLRGGQ

SEQ ID NO: 38265 - protein, 62 aa, Musa acuminata
QQIQDMGGSYNAFLQTSLPPELRIYDPSVETAESSGKAFATTFPRGFAVEILQVLSGPPVIV

SEQ ID NO: 38266 - protein, 417 aa, Oryza sativa
CPTPSPASRAAHAHDLESSLEAIVLLQRSMLEKQWELPFDDDNHAMAIGLAEDDDDTSKATVVVARSSVSARQRRMSGRRRGRTKNGAAHFAVSPELIQSRNRIYLRGTVSKELLTHKQVVHLSHKIKDGIWLQQQRSKLKEKLGNEPSYKQLAHSLKISPPELRSRMHESFLAREMLTMSNLRLVISIAQKYDNLGVELADLIQGGLIGLLRGIEKFDASRGFRISTYVYWWIRQGVSRALAENSKTFRLPTYLHERLIAIRGAKYELEDQGIAPTIENIAGSLNISEKKVLNATEAVNKVLSLDQQAFPSLNGLPGETLHSYIEDQNVANDPWHGFEEWYLKEEVNKLLNSTLNERERDIIRLYHGIGKQCHTWEDISRQFGLSRERVRQVGLIAMEKLKHAARRKNLEALLEDY

SEQ ID NO: 38267 - protein, 468 aa, Clostridium perfringens str. 13
MNKFSVVFKEGLCKYLIIYDNIKSLIENGKISEGEKLPTIRELADFLEVNKVTVINAYKKLVQEGYAYQAQGSGTYAKNKDVGKSFKHDYNDLFRKIASGDLKNWIDFTGETTSANFFQVEKLKKVLDNVLVRDGVEALMYSDPLGYLELRRSINEEFWNGKNNLDNILIISGAQQGIDIVGKSLVNINDNIVIERPTYGGALLVFKLRRANILEISMEKDGPNIEKFENLLKRNKIKCFYTMSYFQNPTGISCSLEKKKKIIELAHKYDFYILEDDYLSELVYSNDLEYIPYRSLDSERVIYIKSFSKIFLPGIRMGYLIAPDKFKEEFQALKFNSDIATSSLMQRALQDYIAKGYWKEHIERLNEEYSKRYNFIKELIDNKLGDMVSYREPKGGLNLFLNINKNIDITSKKLFYELKDRQTIITPGSIFFKNPNDGDKSFRIGFSQIDYSKIEKGIDNIYDVLKGR

SEQ ID NO: 38268 - protein, 361 aa, Triticum aestivum
  misc_feature (211)..(211): Xaa can be any naturally occurring amino acid
  misc_feature (244)..(244): Xaa can be any naturally occurring amino acid
  misc_feature (252)..(252): Xaa can be any naturally occurring amino acid
  misc_feature (280)..(281): Xaa can be any naturally occurring amino acid
  misc_feature (302)..(302): Xaa can be any naturally occurring amino acid
  unsure (1)..(361): unsure at all Xaa locations
MGSIAAGADEDACMYALQLVSSSILPMTLKNAIELGLLETLMSAGGKFLTPAEVAAKLPSAANPEAPDMVDRMLRLLASYNVVSCRTEEGKDGRLSRRYGAAPVCKYLTPNEDGVSMSALALMNQDKVLMESWYYLKDAVLDGGIPFNKAYGMSAFEYHGTDLRFNRVFNEGMKNHSIIITKKLLELYKGFEGLNTLVDVGRGPSAPPVGXAITAHYPAIKGINFDLPHVISEAPPFPGVTHVXGGDMFQKXVPSGDAILMKWILHDWSDEHCGKLLKDXXDALPAHGKVVLVECILPVNPXEATPKAQGVFHVDMIMLAHNPGGRERYEREFEALAKGAGFAAMKTTYIYANAWAIEFTK

SEQ ID NO: 38269 - protein, 856 aa, Cytophaga hutchinsonii
MNLSIRTLNIIFSISLLLLASAFIYSYLNIQGLRSANHWVNHTNKVIISLESIYSDIKNAESGVRGYALTKDASYLEQQDQSRTNIKNQLILLDSLLADNPEQHIYIDTLQKTVNDRFFLFNGLINLTNNNADQAEVLPLMQKGKASTEHIYNLVKKMKNNEGILLLQRNEKAEALDKTTPITIVFSGIFGFMVLVISYYFILADLKQRRKIANEVKIKNTLLEYAQQITQMGTFEYNVFTNTLFWSNEMYNIFELDRSVIPEINFIDSLIKEESEITHNRRKKNFQPGASYSDELKIRTVNGNEKVLISNGYVVNEENGLVVHGAIIDITPLKKAELTAREQQELMRVAKEKAESASQFKTRFLSNMSHEIRTPINAILGFTAILSKQELTEQQKKLLKNISISGELLLKLIGNILDISKIEEGKVIIESKSFHLKESIRSVLSPFQHSASEKGLQFHLIIDKSIPDYLLGDFPRISQVLVNLIGNALKFTSHGNITVSVLLTKKQDGLSFVEFVINDTGIGIQANKQDEIFESFTQANESISVKYGGSGLGLSIVQEVVHLMGGNIQVQSPAHYNERGKGYGSKFFFTLPFKLGEKGADPQAKKTAVQPFPRVLHILVADDNEMNRTLATYTLQSLGCTFEIVENGLQAIQKAAANTYDIILMDMQMPVCDGLQATRQIRLNKNTTPIVGLTANVFQEDINRCLDAGMDGHLGKPYTEEDLYHIIDKWVFKNEKNIAASVPSFSNYEFIEKLSKNDPVIFREMLEMFLNQNAQLLKIIHTAINAEDLETLSFNVHQYKSCARMLNIEKQISLIKQIEEKIEARVSLETIRTDIMQLIETGALVSKEIEQKLLIV

SEQ ID NO: 38270 - protein, 459 aa, Pseudomonas fluorescens PfO-1
MDTGNFSAADRLERLPVSGYHRIIFIIIALAFFFDSMDLAMMTFLLGSIKAEFGLSSAQAGLLASSSFFGMVLGASLSGLLADRFGRKPVFQWSIVLWGLASYLCSTAQTVESLTLFRILLGIGMGMEFPIAQSMLSELIPAQRRGRYIALMDGFWPLGFVAAGVLSYFLLPLIGWRDIFLVLAVPAVFVLAIRFFIPESPRWLEQAGKHDEADKVLRGIEARVQASLGGAALPEPVRLPRSVTPPGHFLSALKQIWSPLYRQRTTMIWSLWFFALLGFYGLTSWLSALLQQSGFAVTQSVYYTVLISLGGIPGFLMAAWLVERWGRKPVCIVTLLGGGVMAFLYGQSAVFGGNVALLIGTGLLMQFFLFGMWAVLYTYTPELYPTSARATGSGFASAIGRVGSLLGPLVTGLVFPITGQGGVFALGALCFTIAAGVVWLFGMETRGKTLEELTEAVVR

SEQ ID NO: 38271 - protein, 71 aa, Triticum aestivum
ETIDRALARAGGIGDQRQKIEQYRHILASGISSSPPDIPQAKRFLNHMVGDEVPLVVSRQLLQTFSHELGK

SEQ ID NO: 38272 - protein, 176 aa, Thermoplasma acidophilum DSM 1728
MVTKPARMYSRITGPAYTRKEFMGGVPYPKITTFVQGNQKKDFPIEMRLVAEEPCQIRHTALEAARVSVNRRMTEAAGLDYFYLKVVPYPHHVLREHKMATGAGADRISSGMRAAFGRPVGTAARVYPDDVIMIARTDEAHAKELKTALRKAAIKLPTPCKVVITKGKEIAGSLGI

SEQ ID NO: 38273 - protein, 480 aa, Burkholderia sp. 383
MTYRNESAWIQPAAPSATAAAPRATQARTTAEYRALDAAHHIHPFSDMGALNRAGSRVIVKADGVYLWDSDGNKVIDGMAGLWCVNVGYGRKELADAAYRQIQELPFYNTFFKTTHPPVIELSAMLAEVTPKGFNHFFYCNSGSEGNDTVLRLVHQYWRVQGQPQKKFVISRKNGYHGSTIAGGTLGGMGYMHEQMPSKVENIVHIDQPYFFGEAAAGETPEAFGLARAQQLEAKILELGAENVAAFIGEPFQGAGGVIFPPSTYWPEIQRICRKYDILLVADEVIGGFGRTGEWFAHQHFGFEPDLITMAKGLTSGYVPMGAVGIHERVARPIIDNGEFNHGLTYSGHPVAAAVAVANLKLLRDEGIVERVKNDTGPYFQALMRETFARHPIVGEVHGHGLVASLQLAESPAERRRFANGGDVGTICRDFCFNGNLIMRATGDRMLLSPPLVISRPEIDELVSKAKKAVDATAQQLGIS

SEQ ID NO: 38274 - protein, 328 aa, Triticum aestivum
  misc_feature (216)..(216): Xaa can be any naturally occurring amino acid
  misc_feature (229)..(229): Xaa can be any naturally occurring amino acid
  misc_feature (244)..(244): Xaa can be any naturally occurring amino acid
  misc_feature (258)..(258): Xaa can be any naturally occurring amino acid
  misc_feature (267)..(267): Xaa can be any naturally occurring amino acid
  misc_feature (306)..(306): Xaa can be any naturally occurring amino acid
  unsure (1)..(328): unsure at all Xaa locations
MASPSVFAEQMLIQNESRVKEYLPITGLADFNKLSAKLIFGADSPAIQENRVATVQCLSGTGSLRVGGEFLARHYHERTIYIPQPTWGNHPKVFTLAGLTARSYRYYDPATCGLDFQGLLEDLSSAPSGAIVLLHACAHNPTGVDPTLEQWEQIRQLMRSKALLPFFDSAYQGFASGKLDKDAQSVRMFVADGGELLMAQSYAKNMGLYGERVGAXLSIVCGSADIPGXVESQLKLVIRPMYSXPSLHGGSIVATILXDKAMVDEWXVELKAMADRIISMKEQLFDALKIRKTPGEWSHIIKQIGXVTFNWLNSEQVAFMRAGISQFT

SEQ ID NO: 38275 - protein, 110 aa, uncultured marine group II euryarchaeote DeepAnt-JyKC7
MRDIGVDIVAPEGDWDGDKNCPFYGSLRVRGQIIEGTVSMTGMTNSIVVKREVTRYMKKFERYEKRTRRYAAHLPSCIGEVSSGDRVRIMECRPLSKTVNFCVIEREVAE

SEQ ID NO: 38276 - protein, 186 aa, Bordetella pertussis Tohama I
MSSSQPAGAATEAAVLGGGCFWCVEAVFKDLRGVTGIEPGYAGGHVEHPTYEQVCGKDTGHIEVARVEFDPAVLSYGDLLRVFFATHDPTTPGRQGNDVGPQYESAIFWQDERQREQAQAVMDELRAQQVFDAPIVTRLLAPAKFWPAEDYHRDYYALHPEQGYCQFVIAPKVAKFRKQFQDRLAR

SEQ ID NO: 38277 - protein, 909 aa, Neurospora crassa
MTVFIASLFLPKTVHFNLPGARPRGASASQKPASKAKKLAPNTPPSLFQPAPSHITPPHTPTEDRKHHDPWANEDGLKVQIPQMPFSPDGSYRAPIDRSSPTWGGRPDQPMSRANSPPPPSLINSSRALNQKAREMGRQGITQPRSLVRSESHDRVFAHADWKIVSADQGNGGLRNAAEAAARDGKLGEYTWIGTLGMPTDALRGTQQLQDIDDRLATEHDMLAVFCSDKDFDGHYSHFCKQILWPVFHYQIPDNPKSKAYEDHSWKYYVNVNQAFADKIVKNWKKGDTVWIHDYHLLLVPGMIRKKIPEAKIGFFLHVAFPSSEVFRCLAVRKELLEGMLGANLIGFQIREYARHFLQTCSRILSVEATPDGLQLEDRFVDVINLPIGIDPVSLSRHRGESEVKRWLDIMRERYAGKKLIVARDKLDHVRGVRQKLLSYEMFLNMNPEWRDKVVLIQVALSTSEKSELDATVSDIVTRVNSSWANLAYQPVVYLKQDIDYAQYLALLSIADALMITSQREGMNLTSHEYLFCQDGKFSEKKHGSLILSEFTGTSSLFNGNELSVNPWDYRACADAIKKALEMEGEEKERRWKNLYEAVNVHTGSHWFSEFMLRLDKVYEEQHSRDQTAVPRLSMTTLLQQYERTNRRLFIIDFEGTLVSWGPVNQIIPVSPQRTLDVLNDLLLDERNTIYVMSGRRPEELDRIFRRVTNLGLIAESGCYLKDCGSNTWTEMADANKIRSWKSSLRDIMTYYLERTPGAAIEERRCSLVFHYKSADDYETAATQASDLASHINDACEDQRVHAIPMDGCVLVEPIDWTKSTAAQTIFDDLQQRMGPDEKHKSPVDFLMVVGDGRDDEKVFKWANQLGTDGTVQEVVTVSLGNRNTEAKATVTQGVSGVLAALQKLSQVV

SEQ ID NO: 38278 - protein, 394 aa, Aeropyrum pernix K1
MSWAKGSRIRDYRGREYIDFHMAFGAVALGHNDDDVAARVSEQLNRLVLHGAGVSDAEIEFAKMLIRKFPMYDKVLFTNSGSEAVMMAMRLARAYTGRDVVVKFDGNYHGWHDYSIYNIKNPASKGKTVESKGVPSATASTVEVLPYNDVDALEDYAERFGDRVAAYILEPVAHSMGVIPAEKGFVERLRKLCDTHGSLLIFDEIITFIRASDRGMQDYFGVRADLTTVGKAIANGMPVAAVLGGDNVMELLARGVVSSGTYSGHPLSMAAGVATLEKAEDVGLTRALRSRAEALAGILRDISEDLGVEAAVSQFGGSVSIYFGIDRRPKNLEEALRANGDAYRVFAREMRRRGILVTPNPLKRMHLAYSHSEEELEAFHRAAEEAVRVAKEYL

SEQ ID NO: 38279 - protein, 223 aa, Triticum aestivum
MAGDRCEGAIAGCELCGGVAAVHCAADSAFLCVPCDAKVHGANFLASRHLRRRLVHAAADEDAGSAGSGSGSESSSSSSCVSTADSCAAASAATRAAGRRRAGCKHRRARAEVVLEGWAKRMGLAAGSARRRAGKAVGALRALGRGVSCSGVPIRVGMARLLWSEDGGSGCVEAFLHRRLEASLYFPGKLDDPGCPLAWGPPGFGAPVPRAQQRQGWPLSLQI

SEQ ID NO: 38280 - protein, 118 aa, Zea mays
MGRRACCAKEGVKRGAWTAKEDDTLAAYVKAHGEGKWREVPQKAGLRRCGKSCRLRWLNYLRPNIKRGNISYDEEDLIVRLHKLLGNRWSLIAGRLPGRTDNEIKNYWDSTLGPEAAP

SEQ ID NO: 38281 - protein, 571 aa, Arabidopsis thaliana
MEAKIVKVLDSSRCEDGFGKKRKRAAASYAAYVTGVSCAKLQNVPPPNGQCQIPDKRRRLEGENKLSAYRNRSGKALVRYYTYFKKTGIAKRVMMYGNGEWNDAAIEFKLCGHSFILGFSHMQRLDMETGAKTPLAWIDNAGKCFFPEIYESDERTNYCHHKCVEDPKQNAPHDIKLRLEIDVNGGETPRLNLEECSDESGDNMMDDVPLDQRSSNEHYDEATEDSCSRKLEAAVSKWDETDAIVVSGAKLTGSEVLDKDAVKKMFAVGTASLGHVPVLDVGRFSSEIAEARLALFQKQVEITKKHRGDANVRYAWLPAKREVLSAVMMQGLGVGGAFIRKSIYGVGIHLTAADCPYFSARYCDVDENGVRYMVLCRVIMGNMELLRGDKAQFFSGGEEYDNGVDDIESQKNYIVWNINMNTHIFPEFVVRFKLSNLPNAEGNLIAKRDNSGVTLEGPKDLPPQLESNGARGSGSANSVGSSTTRPKSPWMPFPTLFAAISHKVAENDMLLINADYQQLRDKKMTRAEFVRKLRVIVGDDLLRSTITTLQNQPKSKEIPGSIRDHEGAGGL

SEQ ID NO: 38282 - protein, 289 aa, Zea mays
MGRPPCCDKAGVKKGPWTPEEDIVLVSYVQEHGPGNWRAVPVSTGLMRCSKSCRLRWTNYLRPGIRRGNFTPHEEGIIVHLQALLGNRWAAIASYLPQRTDNDIKNYWNTHLKKKLRKQQAIGAIFAPPRPSEPTAGHADCRRHDMTRSSKDSHAACPADSTPAADEVVTQLIAQQFAATDGDTSSSSSYSYASSTDNISKLLNGFMMKSASPARDDATDTIKTSSAIDIDPFDHKSGGAALPPPKKRQQQQHLSSIENWLFDDATEQLVVQLMEEISGGSCSVPMLLY

SEQ ID NO: 38283 - protein, 309 aa, Methanothermobacter thermautotrophicus str. Delta H
MSEDRDLLAVGHTAFDYIIHLDEFPEPNTSTAIKRMRNLHGGAAANVALVGSRLGLRTSLVSAVGGDFEGSEYRELLESSGIDIESMILVADESTPTAFVMTDSDHNQISYFYWGAARYFKDAETPADAIKSARAVHLATGDPSFNCRCGEFARSLGKIISFDPGQDLHMYSRSQLERAVGVCDILFGNHHEIDRICSKLSVDIHGLREMGPGVVVKTYGKEGSIIYSDDVIKIDAIPREAVDPTGAGDSYRAGFMRAYLRGADLKTCGRFASAVASFIVEDEGTQTNIPDTGEAVKRFTAQWGYEPPI

SEQ ID NO: 38284 - protein, 202 aa, Neurospora crassa
MSDSPQSNSKDVEQGAPSPGEEPQMNDPQDPHSSGLNQYEFEVKEQDRWLPIANVARIMKNALPENAKIAKEAKECMQECVSEFISFITSEASEKCQQEKRKTVNGEDILFAMTSLGFENYAEALKIYLSKYREQQNQTNRSENQQNRPSSQGYGAPQGQNQPGQGGFSSNDLGGQQESGDASGYNLYGAQTGHNGGGAEGY

SEQ ID NO: 38285 - protein, 526 aa, Oryza sativa (japonica cultivar-group)
MQPDPQPHGRGREKAAGAGPRLPPPVTAPSVGRPASVLPHKTANVRDHYRIGKKLGQGQFGTTYLCVGKPDGGEYACKSIPKRKLLCREDYEDVWREIQIMHHLSEHPNVVRIRGAYEDALFVHIVMELCAGGELFDRIVAKGHYTERAAALLIRTIVGVVEGCHSLGVMHRDLKPENFLFASTAEDAPLKATDFGLSVFYKPGDKFSDVVGSPYYVAPEVLQKIYGPEADVWSAGVILYILLCGVPPFWAETESGIFRQILRGKLDLESDPWPSISDSAKDLVRNMLIRDPTKRFTAHEVLCHPWIVDDAVAPDKPIDSAVLSRLKHFSAMNKLKKMALRVIAESLSEEEIGGLKELFKMIDTDNSGTITYDELKNGLKRVGSDLMEPEIQALMDAADIDNSGTIDYGEFLAATLHMNKLEREENLVSAFTFFDKDGSGFITIDELSQACEQFGLSDVHLEDMIKDVDQNNDGQIDYSEFAAMMRKGNAGGANAGGVTSTGGTGRRTMRNSLRVNLGDILKPNEN

SEQ ID NO: 38286 - protein, 307 aa, Salmonella typhimurium
MNAKVWVLGDAVVDLLPESEGRLLQCPGGAPANVAVGVARLGGNSGFIGAVGGDPFGRYMRHTLQQEQVDVSHMYLDDQHRTSTVVVDLDDQGERTFTFMVRPSADLFLVEEDLPQFAAGQWLHVCSIALSAEPSRSTTFAAMESIRSAGGRVSFDPNIRPDLWQDQALLLACLDRALHMANVVKLSEEELVFISSSNDLAYGIASVTERYQPELLLVTRGKAGVLAAFQQKFTHFNARPVASVDTTGAGDAFVAGLLASLAANGMPTDMTALEPTLTLAQTCGALATTAKGAMTALPYQRDLNRQF

SEQ ID NO: 38287 - protein, 873 aa, Uncultured proteobacterium
MTPSSTSNTAQLRQNVRHLGEILGQVIQSQGDAGLFEAVEAIRLQSKQSRDDDDQEALRALLTQLNEKQILDVARAFSHFLNLANIAEQHHTLADYSQSLFSATASLESAFQQLLNDHEHNRLNTVLKNLSIDLVLTAHPTEITRRTLIHKHGEINDCLTRLEILNDKAAASSKDHSRLKELISQIWHTEEFRSDRPTPIDEARWAFAVIENSLWDAVPQFLRVVDDICERYALPIPPPNWSPIRISSWIGGDRDGNPNVTAKVTREVLLLAQWQACTLLENDIATLYEELSVTTASTTLEGATEGALEPYRFLLKPLRDRLQGQRLNIEKALNDQSLAPVPLTLSEIVDPLEACYESLQAVNLDVLARGYLLDTLRRVHCFGPYLIQLDIRQESARHTQAIAELTEALALGDYRDWNEGQRCDWLRGELDNPRPLIPAGWKPTPETQEVIDTFLVIAETPQSALGSYVISMAAEASDVLAVQVLLKATGCTTNMLVAPLFETLDDLESAPRVVEELLSDNAYRDRCDHQIMVMIGYSDSAKDAGMLAAGWAQYRAQESLLSVCKKFAVKLQLFHGRGGSIGRGGAPAHDALLSQPPGSLENGLRVTEQGEMIRTKLGLTPLAVNTLGRYASAILQANLTPPPEPAGEWRVLMNRLAQHSCEDYRRWVRDEPNFVPYFRQATPEQELASLPLGSRPTRRRSDGGIASLRAIPWIFAWSQNRLMLPAWLGAGSALARAAADEHEVVLKSMAREWPFFGARLSMLEMVFAKSDLTIAELYDHLLVSPELADLGAALRQQLSNDRAALLAILETGSELERDNWGRESINLRDIYTAPLNLLQAELLRRQRANPEEATERALMVTIAGVAAGMRNTG

SEQ ID NO: 38288 - protein, 667 aa, Escherichia coli O157:H7
MSRKDLANAIRALSMDAVQKANSGHPGAPMGMADIAEVLWNDFLKHNPTDPTWYDRDRFILSNGHASMLLYSLLHLTGYDLPLEELKNFRQLHSKTPGHPEIGYTPGVETTTGPLGQGLANAVGLAIAERTLAAQFNQPDHEIVDHFTYVFMGDGCLMEGISHEVCSLAGTLGLGKLIGFYDHNGISIDGETEGWFTDDTAKRFEAYHWHVIHEIDGHDPQAVKEAILEAQSVKDKPSLIICRTVIGFGSPNKAGKEEAHGAPLGEEEVALARQKLGWHHPPFEIPKDIYHAWDAREKGEKAQQSWNEKFAAYKKAHPQLAEEFTRRMSGGLPKDWEKTTQKYINELQANPAKIATRKASQNTLNAYGPMLPELLGGSADLAPSNLTIWKGSVSLKEDPAGNYIHYGVREFGMTAIANGIAHHGGFVPYTATFLMFVEYARNAARMAALMKARQIMVYTHDSIGLGEDGPTHQAVEQLASLRLTPNFSTWRPCDQVEAAVGWKLAVERHNGPTALILSRQNLAQVERTPDQVKEIARGGYVLKDSGGKPDIILIATGSEMEITLQAAEKLAGEGRNVRVVSLPSTDIFDAQDEEYRESVLPSNVAARVAVEAGIADYWYKYVGLKGAIVGMTGYGESAPADKLFPFFGFTAENIVAKAHKVLGVKGA

SEQ ID NO: 38289 - protein, 132 aa, uncultured bacterium 159
MAKKITKSESEWATCLTPDEYSILREKGTEMAFTGKYYKHKDDGKYVCAACDYELFSSNTKYDSDTGWPSFYAALDKDRILEKRDNTLGMVRTEILCARCESHLGHLFPDGPRPSGLRYCVNSISLDFKKTE

SEQ ID NO: 38290 - protein, 452 aa, Burkholderia sp. 383
MDFDYDLFVIGAGSGGVRLARMSASYGARVGIAEEEQIGGTCVLRGCIPKKLLVYASHYPHEVEDAKGFGWRFGAGTLDWPALIAAKDREINRLSDIYINLLRQSGVEMHAGRATLVDAHTVAIGDRTIRARHIAIATGSRPSMPARPGIEHAITSREALSLAALPKRIAVVGGGYIAVEFAGIFNGFGSHVDLFYRGEKILRGFDDDVRQFLTDEMTKQGVTIHARSVVESIERADDGTLSVRVGDARHGPYDQVLYATGRVPNVDGLGLEQAGVALDARGAIAVDAYSATSVPSIHAIGDVTSRPQLTPVATRDGALLARTLFGGSRVAADHEWVPSAVFSQPEVATVGLTESTARDLYDGDVDIYRTSFKALRHTLSGRDERTLMKLVVARDSQRVVGAHMVGRDAGEIIQGIAIAIRAGATKAQFDDTIGIHPTAAEEFVTMRQKVAD

SEQ ID NO: 38291 - protein, 59 aa, Brassica napus
EKFARSLRLSLREVKLSEGYYVMDPEQAVEMVDENTICVAAILGSTLNGEFEDVKLLNE

SEQ ID NO: 38292 - protein, 158 aa, uncultured marine group II euryarchaeote DeepAnt-JyKC7
MMITNQKRLAAQIFSKREGRPVGVHRVWVDPQKLDDVSDAVQKEDVRRLIDEGVIKARPFVGTSRSRARKAAAQKAKGRRSGQGSRKGSANARNPRKSRWMRTIRAQRKELKGMREDDSISSSEYRYYYRKAKGGSYRSIAHMRSNMEIDGIELGGEQ

SEQ ID NO: 38293 - protein, 143 aa, Clostridium perfringens str. 13
MRLEKSLVLIKPDAVERNLIGKILEVYEGAGLKIKAMEMKQINKEFAEKHYEEHRDKQFFNSLIKYITRSPLVALILEGEDAINKIRSLNGATNPEKAEFGTIRRRFALSGTENSVHASDSIESAEKEIKLWFPKVFYEEICG

SEQ ID NO: 38294 - protein, 658 aa, Streptococcus mutans UA159
MSDLSVNAIRFLGVDAIEKSKSGHPGVVMGAAPMAYSLYTKHLRVNPSQPNWINRDRFVLSAGHGSMLLYALLHLSGFEDISIDEIKNFRQWGSKTPGHPEYGHTVGVDVTTGPLGQGISMAVGLAQAERFLAAKYNREGYPIFDHYTYVIAGDGDFMEGVSGEASSYAAKQNLDKLIVLYDSNDICLDGETNDAFTESVRARYDAYGWHTILVEDGNNIEAIGLAIEEAKAAGKPSLIEIKTVIGYGAPTKGGTNAVHGAPLGAEEAAATRKALNWGYAPFEVPQEVYDDFKENVADRGEAAYDAWSNLVGEYRQAYPKEAREVDAIIDGKDPVEIKEADFPVYENGFSQATRNSSQDAINAAADVLPNFLGGSADLAHSNMTYIKADGLQDADHPLNRNIQFGVREFAMGTVLNGMALHGGLRVYGGTFFVFSDYLKAAVRLSALQGVPVTYVFTHDSIAVGEDGPTHEPIEHLAGLRATPNLVVFRPADARETQAAWHYALTSQNTPTALVLTRQNLDVEAGSSFTSVAKGAYVTYETDSDFNTILLASGSEVNLAVKAAKELEAQGEKVRVVSVPSTELFDEQSAAYKEAILPNSVRRRVAIEMAASQPWYKYVGLDGAVIGIDKFGASAPAAQVIENYGFTVDNVVKVVKELK

SEQ ID NO: 38295 - protein, 183 aa, Zea mays
  misc_feature (106)..(106): Xaa can be any naturally occurring amino acid
  unsure (1)..(183): unsure at all Xaa locations
MRLTTENINQRVVAAKYAVRGELAVKSEEYRAKIAKGDTGDLPFNEIISANIGNPQQLDQKPITFFRQVASLLENPILLENEEALTKHFGYQTDVIERAKFLLSRXGSVGAYSASTGVPAIRESIAQFIERRDGFPADPEHIYLSAGASSGVNTLLNVICASPKTGILIPIPQYPLYTATLSL

SEQ ID NO: 38296 - protein, 435 aa, Burkholderia sp. 383
MSDSYFPRWRVQSTGAASRVVGPDERLAWPQMVAMGVQHVVAMFGSTVLAPLLMGFDPNLCIFMSGIGTLLFFVLVGGRVPSYLGSSFAFIGLVIAVTGYGGSGPNPNIPVALGGIIACGVVYVAIGALVQAIGTNWIETLMPPVVTGAVVAVIGLNLAPIAVKGVSGSTFESVMALVTVLCVGGVAVFSRGMVQRLLILVGLVIAYAIYAVVTNGMALGKPIDFSIVEHAAWFGVPSFRAPVFDPHAMLMLAPIAVILVAENLGHIKAVSAMTGTSLDRYVGRAFIGDGLATIVSGSVGGTGVTTYAENIGVMAVTRIYSTLVFAVAAVIAIVLGFSPKFGAVIQTIPGPVLGGVSIVVFGLIAVTGARIWVVNKVDFSDNRNLIVAAVTLVLGAGDFSLKIGGFGLGGIGTATFGAIILYAILRKEKEPGPVV

SEQ ID NO: 38297 - protein, 519 aa, uncultured marine group II euryarchaeote DeepAnt-JyKC7
MYGGSESSRLYALERLVDVYPSITKPEGHVRFNQKLWTTTLVLIIYFMMTNVMIYGMSDTTLDVFSSFRAIMAGASGSVMHLGIGPIVTASIIMQLFAGAKIIQLDLQDSADKRLYQGVQKILVLLMIPIESIPQVYGFLDPHETIILQYGIGWANALIVAQLFVGSYLVFLLDELVSKWGIGSGISLFIAAGVAQSTFVGTLSPLPTVQGSPLSLQNPPSGTLPMIFYTLRTATNTELVSQNGFETILLNHANPLAALVSSIAVFLVVAYAESSKLELPLTHGKVRGHRGQYPIRLVYASNIPVILMAALLANVNMFTLLFWSHPVLSSVPILGRNGLWSKAEWFGSYEIGATTPSGGFAWYSSMVNGVGDWLLPLLNQSSDAYGHSLGQIMVHVFTYVFFMTAGSTVFAKFWIETTNMGSKDVAKQIERTGMQIPGFRKNPVVLEKILERYIPPVTLFSGAFVGLLAAGADLLGTVGNASGTGLLLAVGIILRTYEQIQKEQAMEMHPMLREFFGTE

SEQ ID NO: 38298 - protein, 63 aa, Lithospermum erythrorhizon
EFGLLGLKHKEHIAAYGEGNERRLTGKHETADINTFKWGVANRGASIRVGRDTEKEGKGLVRI

SEQ ID NO: 38299 - protein, 233 aa, Psychrobacter arcticus 273-4
MHHSIHDEAHLSNRNHWLRAAVLGANDGLISTASLLVGVAAASISSQTLLLTGMAALTAGALSMAAGEYISVSSQADTEKADLDKELHELTHNAEHELNELTKIYETRGLDHVLAHQVAVALTQHDALEAHARDEIGLTDLSQAKPIHASVASGLSFIAGAILPIIGILLLPVQSLVWSLSSLTIVGLALLGIISARLGGAPVIPATARVVIWGVLAMVATSLIGRLFGVAAL

SEQ ID NO: 38300 - protein, 404 aa, Vibrio vulnificus YJ016
MQNIGMSSKLDNVCYDIRGPVLKHAKRMEEEGHKILKLNIGNPAPFGFDAPDEILVDVIRNLPTSQGYCDSKGIYSARKAVVQHYQRKGIRSLDVEDVYVGNGVSELIVMAMQALLNNGDEMLVPAPDYPLWTAAVALSGGKAVHYLCDEQADWYPDLDDMRKKITPKTRGIVLINPNNPTGAVYSRDFLLEVIEIARQHKLMIFADEIYDKVLYDGAVHTSVATLTDDVLVMTFNGLSKAYRVCGFRGGWMFMTGPKHLAQGYVNGLDMLASMRLCANVPMQHAIQTALGGYQSINELILPGGRLLEQRDRAWELINQIPGVSCVKPKGAMYLFPKIDTKKYSIKDDQKMVFDFLVQEKVLLVQGSGFNWPKPDHFRIVTLPHIEDLETAIGRFERFLHGYSQ

SEQ ID NO: 38301 - protein, 339 aa, Ustilago maydis 521
MAANIPSFTLNTGAKLPSVGMGCWQGQPGPGRDNELVDALVRAIKVGYRHLDTATGYRNEAEVGQAVRQSGVARSEIFVTTKLRPGGVHDVVQELENSLNELGIDYIDLWLLHWPQGFTKDDGGFGTGESFGLEHQKHLGPTFNETWAKMEDVFLNSHKGKVKAIGVSNFSIKNLEILAKTSKVTPAVNQIEAHPYLPEHELVKYCKHKSIHVTAYSPLGQYNASIHEDKDLNEIAKKHDVTAATVALSWAVQRGTSVAPKSTNEKRMKQNITLIKLTDEEMKQVDVISQDPTRSTRLNYFVVNKETGTVLGWTMDEMGWEVGFLEEPGKSTKRIAERK

SEQ ID NO: 38302 - protein, 843 aa, Trichodesmium erythraeum IMS101
MRGVLMAGGSGTRLRPLTCDLPKPMVPILNRPIAEHIINLLKKHQIREIIATLHYLPDVMREYFQDGSKFGVQMTYSVEEEQPLGTAGCVKNIAELLDGTFLVISGDTITDFDLSAAIEFHQKHKSKATLVLTRVNNPIEFGVVITDEEQRIKRFLEKPSTSEVFSDTVNTGTYILEPEILDYLPSNQECDFSKELFPLLLDKNEPIYGYIAEGYWCDVGHLDSYRKAQYDALQHTVKLELPYKERSPNLWIGENTYIDPTAKIETPTLIGDNCRIGPRVHIELGSVIGDNVTIGADANVKRPIVWNGTLVGEDTNLRGCVICRGSRIHRRAQILEGAVVGSLSTVGEEAQISPHVRVWPSKTVESGAILNINLIWGTTAQRNLFGQRGVQGLANIDITPDFAVKLGAAYGSTLKNGSTVSVSRDQRNISRMVSRSLIAGLMSVGINVINLQSTAIPIARTILPTMNLVGGLHVRLSPDRSDQILIEIFDYQGINISKVKEKNIEGAYFKEDFRRVQISEIGNMIDRHEVLNAYSKGFENLLNSEAIRYSKSKVVIDYCYGVSGAVLPQLLTKFGCDAVVLNASLKETSLGIEERENLLDQLGRVVEALQANVGVQVTANGEQLILVDEVGSAIRGETLTALMVNLMLTAHPRGTVVVPINASAAVEQIAHRHDSHVIRTKANPTALMKACQINHNVVLGGSGDMGFIFPKLHPGFDAMFCIAKVIEMLTIQERSLGQITADIPPITHRCYTIRCPWKVKGALMRYLVETNPPEKLELTDGVKIINHQDNYWVLVLPDAGKPLVHIYADSNDRDWVDKTLRDYRNMIHDFVNLFMTRNQLDNL

SEQ ID NO: 38303 - protein, 475 aa, Salmonella typhimurium
MKKTTLAMSALALSLGLALSPLSATAAETSSSAMTAQQMPSLAPMLEKVMPSVVSINVEGSTTVNTPRMPRNFQQFFGDDSPFCQDGSPFQNSPFCQGGGNGGNGGQQQKFMALGSGVIIDAAKGYVVTNNHVVDNASVIKVQLSDGRKFDAKVVGKDPRSDIALIQIQNPKNLTAIKLADSDALRVGDYTVAIGNPFGLGETVTSGIVSALGRSGLNVENYENFIQTDAAINRGNSGGALVNLNGELIGINTAILAPDGGNIGIGFAIPSNMVKNLTSQMVEYGQVKRGELGIMGTELNSELAKAMKVDAQRGAFVSQVMPNSSAAKAGIKAGDVITSLNGKPISSFAALRAQVGTMPVGSKISLGLLREGKAITVNLELQQSSQSQVDSSTIFSGIEGAEMSNKGQDKGVVVSSVKANSPAAQIGLKKGDVIIGANQQPVKNIAELRKILDSKPSVLALNIQRGDSSIYLLMQ

SEQ ID NO: 38304 - protein, 390 aa, Oryza sativa
SVSISRLLLLLLRPSHPPGEQRAGGLRHRRRRRRRRRPMGKPGKLALPSHESTIGKFLTQSGTFKDGDLLVNKDGLRIVSQSEEGEAPPIEPLDHNQLSLDDLDAIKVIGKGSSGIVQLVRHKWTGQFFALKVIQLNIQENIRRQIAQELKISLSTQCQYVVACCQCFYVNGVISIVLEYMDSGSLSDFLKTVKTIPEPYLAAICKQVLKGLMYLHHEKHIIHRDLKPSNILINHMGEVKISDFGVSAIIASSSAQRDTFTGTYNYMAPERISGQKHGYMSDIWSLGLVMLELATGEFPYPPRESFYELLEAVVDHPPPSAPSDQFSEEFCSFVSACIQKNASDRSSAQILLNHPFLSMYDDLNIDLASYFTTDGSPLATFNTSNRYDDR

SEQ ID NO: 38305 - protein, 1095 aa, Trichodesmium erythraeum IMS101
MKFSITEISTTIEQLRKLTQLDIQNKWRSCQEDIPITAVKNLDTWQLATTNEKKQIAWEKGKQILWLGQKLIIPPNLNGYLLTDLSLRLGLVWWAEYVEIYVNGKLVQTGDLFDYSSRILLSQKVVVGKTFIIAIKLVSPAHDRGALVKSWFVYENLNNYQLDPGFMADRLEILLEYLTKFESKIDLKLERIKKSISLIDLQAVGKKEKFERSLLNLHSEITKISESYINSLKLKLLGHAHLDLAWLWDVEETWEAAQRTFTSVLNLQQDFPELIFCHSTPALYEWIEQNRPDLFNKIKRQIELGKWEVTAGLWVEPELNTVGGESIIRQVLYGQRYVWEKFGKFSSVAWLPDTFGFCWQLPQILQGGNIKYFATQKLRWNDLTEFPFEIFWWEAPDKSRIFSFMLPPIGENIEPVKMAKYAYEWQLKTGEKNVFWLPGVGDHGGGPTRDMLEISRRWQKSGFFPVLEFSTAENFFAELVEKNSGIFPVWQDELYLEFHRGCYTTHADQKRRNRRCENLLYQAELFAVFASIMTGAFYRKNDLEMAWKLVLFNQFHDILPGSAIPEAYVNVNQNWSEAERLGKEILAEAMGKVAADVNVSPPFPLDTFADGMIYPIIVFNSLNWQRSELVSVPGKKNIEGAGNREKGEVFELTPNSQHLTFLQGREDDWQVYDDAGQILTSQISDNSLLFLASDIPGVGYRLFWLCSRFSDLNKKSYIGKYIAHHTGTIAKKIENVNTVSLEIEKWVLENNLLRVKVEATTGNLESIFDKINQREVLRKPEGNKLKVFRDEGQYWDAWNIDPNYQQHPLSSAKLIDIFWIEQGKLKSSLRIIRKIGNSQFCQDYILEIGSQLLKIKNWVNWQEKHTLVKAAFPINIEADFTTYEIPCGAIKRTTKPQTEREKAKWEVPALNWADISKDNYGVSLLNDCKYGYDAKPDELRLTLLRGSTWPDSKADVGIHEFTYAIYPHIGSWENAGTVQRGYELNMPLMVQIMPLIREEKSHGKLPQVYRFLGWEAENLILMMLKRSEDNQSWVFRCYECLGKEVKLNLESDAGLRIKKVVNLLEQDVSEPNVNLENNNYNILAWKIVSFSLDIL

SEQ ID NO: 38306 - protein, 622 aa, GIBBERELLA ZEAE PH-1
MRPKLLSVEAALFLALPELARAATRKFDFEIGWVRANPDNAFERPVIGINGQWPIPTIEVDIGDRVIINAHNNLGNQSTSLHFHGLYMNGSTHMDGPAGVSQCPIIPGTSFTYNFTVDQPGTYWYHSHTAAQYPDGLRGPFIVHDKDFPYAKKYDEEVVLTLSDWYHDEMRSLIPQFMAKSNPSGAEPVPKNALMNETTNFTMSVQPEKTYLFRVINVGAFAGQYLWFEGHKMQIVEVDGIYTEEAEAEMIYISAAQRVSFLLTTKKDTSKNFPIVASMDTTLFDVLPPDLKYNSTGWLVYDKKAEKPVPATVDSLNPFDDMTLVPYDKMEILGKPDKEVVLDVKMDNLKDGKNYAFFNDITYTEAKVPTLYTALSAGKDAEDPAVYGTYTHSMVLKKNEIVQLVVNNLDSGRHPFHLHGHAFQSVYRSEEEAGIWADANVTEKNLPKTPMRRDTLVIYPNGNIVMRFKADNPGVWLFHCHIEWHVISGLIATFVEDPLALQETIEIPKNHLDACAAANMPTKGNAAANTEDFLDLTGENKPANTLPPGFTPRGIVALVFSCICGILGVAVVAWYGFSAPVGSTSAGALSAGLVENDSGDVHSAQKGPQETVVSPTGDARSH

SEQ ID NO: 38307 - protein, 160 aa, Helianthus annuus
MDIDSLMGFDPLLRNLHYILEATDDNTTGNKSNNSGPSRAYVRDARAMAATPADVKECPNSYVFIVDMPGLKSGDIKVQVERDNVLVISGKRNREEEKEGVKYVRMERRMGKFMKKFALPEDANTDKISAICQDGVLTVTVEKLPPPEPKKPKTIQVQVA

SEQ ID NO: 38308 - protein, 336 aa, Methanothermobacter thermautotrophicus str. Delta H
MERTGEENRKLIFQDCLCAVCGLCGEICPVNAIEVNPTGAMVRTEQDESKICIDENKCVLCGMCSSICPFQALDLQIDGTSIKELAEYPKIIKSAEIDDETCIQCKACETACPQDAITITRDLPERKDLITGEIEIDKETCIYCGMCEEMCPVDAIEIDHQVPTSSSPAVATDIRVDEDKCVHCGICKRICPVDAITQVCRICPYGEYEIKVPEVTGTSYIDPELCVNCGWCQEICPVDAATVTKPFEGELIIDEDTCQACETCVMACPCNVLSFPKPEKPGEKPAKLYKDERFCIYCGACERSCPVDAIEVKRSRINTTPIKSKAWKNAFESLLK

SEQ ID NO: 38309 - protein, 310 aa, Medicago sativa
MAEKSKILFIGGTGYIGKHIVEASAKAGHPTFALVRESTLADPAKANLLNNFKTLGVNLVPGDLYDHQNLVKVIKQVDVVISTVGHALIEDQVKIIAAIKEAGNVKRFFPSAFGNDVDRVHAVDPAKSAFYGKAKIRRAIEAEGIPYTYVSSNYFAGYFLPTLAQPGQFAPPPPKDKVVIYGDGNPKAVFNKEDDIGTFTIRAVDAPGPWNKILYIKPPKESYSSNELVALWEKKSGKPAQKPSLPEDNLLKDIQEAPIPITVVLPIHHGVFVKGDHTNFVIEPSFGVEAYELYPDVKYTTVEEYLDQSV

SEQ ID NO: 38310 - protein, 380 aa, Glycine max
  misc_feature (189)..(189): Xaa can be any naturally occurring amino acid
  unsure (1)..(380): unsure at all Xaa locations
METQNWFERVKPLAAVVSMQFGYAAMDVLSKAAMNKGMSNYVFVVYRHAVAFFVMAPLAWFFDKKVRPKMTFSIFMKIAVLSWIEPVIDQNLYFLGMKYTTATFAVTITNMLPAITFIFACILRLEKIKIRSIRSQAKVVGTLTTVSGAMVMTLLKGPVLFGSHGSNDHSQHNGTSMRHTITGFILITXIGCFSWACFVILQAITLKTYPAELSLSAWICLMGTIEGAAVALIMERGNPSVWSLKLDMKLLCAVYTGIVCSGMGYYLQGVVMKTRGPVFVTAFSPLCMVIVAVMSYFILAEQVFLGRMIGAVIICLGLYVVVWGKSKDYSPPNPNTQEPTLPAKQIVNEDNAKKENYNCTHEVINVNNFGNGITRNEELV

SEQ ID NO: 38311 - protein, 219 aa, Thermobifida fusca YX
MTRTSENLSPELHAYLVAHSTPVDEVLTDLAAETERLFPDHVGMQIAPEQGLFLTLLTQLIGARNIVEVGTFTGYSSICLARGLPNDGTLLACDVSEEWTAVARRYWQRAGVADRIDLRLAPALDTLRALPEEPQFDLAFIDADKESYIAYWEELVPRVRPGGVLLADNVFSHSRVLDPAQTAARVQAIRDFNVHARDDTRVDLVILPIGDGFTLARRR

SEQ ID NO: 38312 - protein, 444 aa, Glycine max
MESKPHVLMQRYELGRLLGQGTFGKVYYARSTITNQSVAIKVIDKDKVMRTGQAEQIKREISVMRLARHPNIIQLFEVLANKSKIYFVIEYAKGGELFNKVAKGKLKEDVAHKYFKQLISAVDYCHSRGVYHRDIKPENILLDENGNLKVSDFGLSALVDSKRQDGLLHTPCGTPAYVAPEVIKRKGYDGYLPFHDPNLIEMYRKISKAELKCPNWFPPEVCELLGMMLNPNPETRIPISTIRENSWFKKGQNIKNKRPVVENNTVSSSSTVLLDQNDCDGLAAEANGESVVPLSINAFDIISRSVGFDLSRFFDESFKKKEARFSSRLPANVIISKLEDIANQLRMKIKKKAAGLLKLESLNEGRKGVLSIDAEIFEVTPCFHMVEVKKSNGDTLEYQKILKEDIRPALQDIVWVWQSDQQLQSQQSEQQQQTDDQQQQQPQS

SEQ ID NO: 38313 - protein, 215 aa, Pseudomonas aeruginosa UCBPP-PA14
MVLRSEILTKKSELPTPDQALPGRESAMPVPEAHFVNGRPLTAPFPAGLQQVLFGMGCFWGAERRLWQQPGVWVTAVGYAGGYTPNPTYDEVCSGLTGHSEVVLVVYNPQETSFEQLLKVFWEAHDPTQGMRQGGDIGTQYRSVIYTFDAAQKAAAMASRENFQAELAKAGYDRITTEIADVPPFYYAEAYHQQYLAKNPNGYCGLGGTGVCLPA

SEQ ID NO: 38314 - protein, 356 aa, Glycine max
MKKGNLGLGLKLSVPVSDQSNFAKFLTESGTFKDGDLLVNRDGVRIVSQNDVEAPPPIKPTDNQLALADIDVIKVVGKGNGGVVQLVQHKWTSQFFALKVIQMNIEESMRKQITQELKINQQAQCPYVVVCYQSFYENGVISIILEYMDGGSLADLLKKVKTIPESYLAAICKQVLKGLVYLHHERHIIHRDLKPSNLLINHIGEVKITDFGVSAIMESTSGQANTFIGTCNYMSPERINGSQEGYNFKSDIWSLGLILLECALGRFPYAPPDQSETWESIYELIEAIVEKPPPSPPSEQFSTEFCSFISACLQKDPKDRLSAQELMAHPFVNMYDDLEVDLSAYFSNAGSPLATL

SEQ ID NO: 38315 - protein, 351 aa, Neisseria meningitidis
MKHRTFFSLCAKFGCLLALGACSPKIVDAGAATVPHTLSTLKTADNRPASVYLKKDKPTLIKFWASWCPLCLSELGQTEKWAQDAKFSSANLITVASPGFLHEKKDGDFQKWYAGLNYPKLPVVTDNGGTIAQSLNISVYPSWALIGKDGDVQRIVKGSINEAQALALIRDPNADLGSLKHSFYKPDTQKKDSKIMNTRTIYLPAAASGAWKPISNASTAWLTRYPYANGNTKNPSYEDVSYRHTGHAETVKVTYDADKLSLDDILQYFFRVVDPTSLNKQGNDTGTQYRSGVYYTDPAEKAVIAAALKREQQKYQLPLVVENEPLKNFYDAEEYHQDYLIKNPNGYCHID

SEQ ID NO: 38316 - protein, 435 aa, Arabidopsis thaliana
MEEERRVLFGKYEMGRLLGKGTFAKVYYGKEIIGGECVAIKVINKDQVMKRPGMMEQIKREISIMKLVRHPNIVELKEVMATKTKIFFVMEFVKGGELFCKISKGKLHEDAARRYFQQLISAVDYCHSRGVSHRDLKPENLLLDENGDLKISDFGLSALPEQILQDGLLHTQCGTPAYVAPEVLKKKGYDGAKADIWSCGVVLYVLLAGCLPFQDENLMNMYRKIFRADFEFPPWFSPEARRLISKLLVVDPDRRISIPAIMRTPWLRKNFTPPLAFKIDEPICSQSSKNNEEEEEDGDCENQTEPISPKFFNAFEFISSMSSGFDLSSLFESKRKVQSVFTSRSSATEVMEKIETVTKEMNMKVKRTKDFKVKMEGKTEGRKGRLSMTAEVFEVAPEISVVEFCKSAGDTLEYDRLYEEEVRPALNDIVWSRAR

SEQ ID NO: 38317 - protein, 199 aa, Brassica napus
  misc_feature (47)..(47): Xaa can be any naturally occurring amino acid
  unsure (1)..(199): unsure at all Xaa locations
IFSQYIYTLEFNICLGFLGAACVRVANELGKGDAAAVRFSIKVILTXSTIMGVIFSVLCLAFCGQISYLFTNSEEVSKAVDDLSIILAVSILLNSIQPVLSGVAVGAGMQSIVAVVNFVSYYAVGIPLGLILTYVFHLGVKGLWSGMSAGIAIQTAILCYIIYRTDWELEVKKTSERMKAWSIQPSHEESNPIREDERK

SEQ ID NO: 38318 - protein, 243 aa, Zea mays
MQIFVKTLTGKTITLEVESSDTIDNVKAKIQDKEGIPPDQQRLIFAGKQLEDGRTLADYNIQKESTLHLVLRLRGGMQIFVKTLTGKTITLEVESSDTIDNVKAKIQDKEGIPPDQQRLIFAGKQLEDGRTLADYNIQKESTLHLVLRLRGGMQIFVKTLTGKTITLEVESSDTIDNVKAKIQDKEGIPPDQQRLIFAGKQLEDGRTLADYNIQKESTLHLVLRLRGSMQIFVKTLTGKTLHL

SEQ ID NO: 38319 - protein, 487 aa, Salmonella enterica subsp. enterica serovar Dublin
MKKINHWINGQNVAGDDYFQTTNPATGDVLAEVASGGEAKLNQAVAAAKEAFPKWANLPMKKRARLMRRLGDLIDQNVPEIAAMETADTGLPIHQTKNVLIPRASHKFEFFAEVCQQMNGKTYPVDDKMLNYTLVQPVGVCALVSPWNVPFMTATWKVAPCLALGNTAVLKMSELSPLTADRLGELALEAGIPAGVLNVVQGYGATAGDALVRHHDVRGVSFTGGTATGRNIMKNAGLKKYSMELGGNSPVLIFEDAEIERALEAALFTIFLINGERCTAGLSIFIQQSIYPEFVKRFAERANRLRVGDPTDPNTQVGALISQQHWEKVSGYIRLGIEEGATLLAGGAEKPTDLPAHLKGGNFLRPTVLADVDNRMRVQEEIFGPVACLLPFKDEAEGLRLANDVEYGLASYIWTQDVSKVLRLARAIEAGMVFVNTQNVRDLRQPFGGVKASGTGREGGEYSFEVFAEMKNVCISMGDHPIPKWGV

SEQ ID NO: 38320 - protein, 545 aa, Porphyromonas gingivalis
MAKEIKFDMESRDLLKKGVDALPNAVKVTLGPKVRNVILSKTYGAPHITKDGVSVAKEIELECPFENMGAQLVKEVASKTNDDAGDGTTTATILAQSIIGVGLKNVTAGANPMDLNRGIDKSVKSVVTHIAGMAKEVGADFQKIEHVAKISANGDENIGSLIAEAMRKVKKEGVITVEEAKGTDTTVEVVEGMQFDRGYISPYFVTNTDKMEVQMENPFILIYDKKISVLKEMLPILEQTVQTGKPLLIIAEDNDSEALPTLVVNRLRGSLKICAVKAPGFGDRRKAMLEDIAILTGGAVISEETGLNLENTTMDMLGTAEKVRVDKDNTTIVNGAGNKEGIASRITQIKAQIENTTSDYDREKLQERLAKLAGGVAVLYVGAASEVEMKEKKDRVEDPLSPTRPPIEEGTVPGGGTTYIRAIAALEGLKGENEDETTGIEIVKRAIEEPLRQIVANAGKEGAVMVQKVKEGKDDFGYNARTDVFENLYTTGVIDPAKVTRVALENAASIAGMFLTTECVIADKKEDNPAAPAMPGGMGGMGGMM

SEQ ID NO: 38321 - protein, 342 aa, Parachlamydia sp. UWE25
MKTDVLPQFFSVDQDAVIKKLGPQALIECFQQMLKIRNFELRAESAYQQGKIGGFFHAYVGQEAIQTAAVQAIGQSNWYATSYRCHALALLLGATPNELMAELYGRATGNAKGRGGSMHFFTDRLLGGFGIVTGQVPIATGAAFALKYKGNKNEVAVCFMGDGAVPQGSFHESLNLASLWNLPCIYVIENNQWGMGTAIQKAVSVKRLAEDKASGYNMKAYTLDGMDFFNCYGGFAQIHQEVLQRQRPVLVEVVTERFKGHSISDPGLYRAKDTLKQIMAKDPILALQAVLIKKGILTEDMVKQMNKENREKIIEAMSFAENSPWPDPQTLEEDVFAPNFIV

SEQ ID NO: 38322 - protein, 405 aa, Hyphomicrobium methylovorum
MTVTPHLFIPGPTNIPDAVRMAMNIPMEDMRSPEFPKFTLPLFEDLKKAFKMKDGRVFIFPSSGTGAWESAVENTLATGDKVLMSRFGQFSLLWVDMCERLGLKVEVCDEEWGTGVPVEKYADILAKDKNHEIKAVFVTHNETATGVSSDVAGVRKALDAAKHPALLMVDGVSSVGSLDMRMGEWGVDCCVSGSQKGFMLPTGLGILAVSQKALDINKSKNGRMNRCFFSFEDMIKTNDQGFFPYTPATQLLRGLRTSLDLLFAEGLDNVFARHTRLASGVRAAVDAWGLKLCAKEPKWYSDTVSAILVPEGIDSNAITKTAYYRYNTSFGLGLNKVAGKVFRIGHLGMLDEVMIGGALFAAEMALKDNGVNLKLGSGTGAAAEYFSKNATKSATALTPKQAKAA

SEQ ID NO: 38323 - protein, 359 aa, Arabidopsis thaliana
MSCFKSKFADELIANAAYIGTPGKGILAADESTGTIGKRFVSINVENVESNRRALRELLFTTPGALQYISGIILFEETLYQKTASGKLFVDVMKEAGVLPGIKVDKGTVELAGTNGETTTTGLDGLGDRCKKYYEAGARFAKWRAVLKIGNNEPSELAIHENAYGLARYAVICQENGLVPIVEPEILVDGSHDIEKCAYVTERVLAACYKALSDHHVILEGTLLKPNMVTPGSDSGSKVKPEVIAKHTVRALRRTVPAAVPAVVFLSGGQSEEEATVNLNAINQLKGKKPWSLTFSYGRALQQSTLKAWGGKEENVDKAQKAFLARAKANSEATLGGYKGDAQLGEGASESLHVKDYKY

SEQ ID NO: 38324 - protein, 328 aa, Petunia integrifolia subsp. inflata
MAVNGASSGGLIVSFGEMLIDFVPTVSGVSLAEAPGFLKAPGGAPANVAIAVTRLGGNSAFVGKLGDDEFGHMLAGILKENGVKAEGINFDTGARTALAFVTLRADGEREFMFYRNPSADMLLTPDELNLDVIRSAKIFHYGSISLIVEPCRSAHLKAMEVAKEAGALLSYDPNLRLPLWPSAEEARKQIKSIWDKADVIKVSDNELEFLTGSDKIDDESAMSLWHPNLKLLLVTLGEKGCRYYTKNFHGGVEGFHVKTVDTTGAGDSFVGALLTKIVDDQSILEDEARLKEVLTFACACGAITTTKKGAIPALPTESEALTLLKRGA

SEQ ID NO: 38325 - protein, 273 aa, Colwellia psychrerythraea 34H
MKHIHSYYSPNNLYNKIIEGLNNLGKDLSSVTPDDLQPVDEFHIRGDIATKELIELGNFTPDMHILDVGCGVGGSTRRLSHETGCHVTGIDLSDEYIDAAERLTQLLNMQARVKFNVGSALELPYADNTFDGAWSIQMNMNVEDKLGWLKEMYRVLKPGARAVLYEVCGHEEKTIYFPVPWAQDSSMSFLIPKEAFRDLIASTGFKIEVWNDKSDLAQKAFARMREPTGESTLPELGLHMLIGNDIKTKAYNMRRNLDDERISLIEILAIKPS

SEQ ID NO: 38326 - protein, 565 aa, Listeria monocytogenes str. 4b F2365
MEITETKEWWKESVVYQIYPRSFQDSNGDGIGDIRGIIERLPYLKDLGINVIWLCPVYKSPMDDGGYDISDYYEIDPMFGTMSDMDELIEKAEKLGIKILMDLVVNHTSDEHEWFEKAIADPKSKYRDYYIFREGVNGNPPNNWRSYFGGSAWEAVPGEENMFYLHAFSKKQPDLNWENIVVRNECIQMINWWLEKGLGGFRIDAILNLKKRIEYGTFPADGEDGLVFIGHWILNQPGIEEWLKEIDERTFKKHNAFTVAEADVPEERLSEFIGENGHFRMVFDFSYTDIDTPETGEWFKNSEWTVKELKEKIITNELVTQRNGWGAKYLENHDQPRSINKYLPQEYQDDRSKKMLGTLFMMLHGTPFIYQGQEIGMSNTRMESIDDYNDIATHDQYHRAILSGMSPEEALEGMYRRSRDNSRTPMQWNNQKNAGFSDSDEIWLKANPNYLDINVEQEQIDDNSVLNFYKKLIHLRSDSSKYKEVAVYGELLPVESSDEVIAYKRKTDDAELLIIVNFSDSENQLCIEGTYEQVLANVALPEMVENVLEIPAYTGAVFSRVLEVD

SEQ ID NO: 38327 - protein, 480 aa, Listeria monocytogenes str. 4b F2365
MQIKNKAMLITYSDSLGKNMEELSKVMETYFEDAVGGIHLLPFFPSTGDRGFAPSDYTTVDSDLGSWEIIEKLGEKYYLMFDFMINHISRESLFFQDFKKEHLNSKYKDMFIRINDFFPPGRPNEKDLDLIYKRKDKAPFQEVEFADGGTELVWNTFGEEQIDLDVTAEVTKEFIRQTIKNMAAHGCSILRLDAFAYAIKKLDTNDFFVEPEIWDLLDEVKAEAAKYDMELLPEIHEHYSIQMKIANHDYYIYDFALPMVMLYSLYSGRVERLAKWLEMSPMKQFTTLDTHDGIGVVDARDLLTDEELDYTSAELYKIGANVKKIYSSEKYNNLDIYQINSTYYSALGDDDKSYLLARVIQCFAPGIPQIYYVGLLAGKNDIDLLEETKEGRNINRHYYTIDEIKNEVKRPVVKALCNLLRFRNTSEAFDLEGSIEIETPSSNEIVIIRKNKTNKITATLKANLSTKTFQISENERNILI

SEQ ID NO: 38328 - protein, 576 aa, Mycobacterium leprae
MEQSRRVPPLQWLSAVARPIARVLTLISTPTFDIADTFGYACPNPPEVSPTEGVYVVATKTSPATGQPVKRTATKTPATPAKRSTTKAANGSAPTKRATSTASRATKSTTPPKASGASDAAKKARTSVKSVDTKAPSAQDHTTKASAAKDTLNDPEATLNTLDSDATADDLDAEPDLDVEPSEDIDIDIDIEAADLGLDDLEDDDVVTDIEPGETEDGEATAATKTDEASTDDDEEIVEPTEKDKASGDFVWDEDESEALRQARKDAELTASADSVRAYLKQIGKVALLNAEEEVELAKRIEAGLYATQLMTELSERGTKLPTAQRRDMMWICRDGDRAKNHLLEANLRLVVSLAKRYTGRGMAFLDLIQEGNLGLIRAVEKFDYTKGYKFSTYATWWIRQAITRAMADQARTIRIPVHMVEVINKLGRIQRELLQDLGREPTPEELAKEMDITPEKVLEIQQYAREPISLDQTIGDEGDSQLGDFIEDSEAVVAVDAVSFTLLQDQLQSVLETLSEREAGVVRLRFGLTDGQPRTLDEIGQVYGVTRERIRQIESKTMSKLRHPSRSQVLRDYLD

SEQ ID NO: 38329 - protein, 268 aa, Salmonella typhimurium
MERYENLFAQLNDRREGAFVPFVTLGDPGIEQSLKIIDTLIDAGADALELGVPFSDPLADGPTIQNANLRAFAAGVTPAQCFEMLALIREKHPTIPIGLLMYANLVFNNGIDAFYARCEQVGVDSVLVADVPVEESAPFRQAALRHNIAPIFICPPNADDDLLRQVASYGRGYTYLLSRSGVTGAENRGALPLHHLIEKLKEYHAAPALQGFGISSPEQVSAAVRAGAAGAISGSAIVKIIEKNLASPKQMLAELRSFVSAMKAASRA

SEQ ID NO: 38330 - protein, 210 aa, Sinorhizobium meliloti
MPSRKLWARTCKTTLRSRSEAAMSRALDKAGRWIGWAFFADLANGLALTFGYMFSRPVTMQYPDKEKWLPYSRYRGHHFLKRDDEGEIKCVACELCARICPCDCIEVVPYEDEKGNRRPAKFEIDTARCLFCGLCEDACPADAIALGQQYEFSSFSSRDLVIGRDDLLAKPGKAMTGGGVVAARLNTERDVLVEASEPRGYNWWRNIRRK

SEQ ID NO: 38331 - protein, 728 aa, Trichodesmium erythraeum IMS101
MGEFRENLVQLPLEDQRYLLETLPGFLVSECDTEQLHRLLTDFDFLESRLYLFGVEYLLNDYEEAMHSDAWISGEKLKTLKFIQGAIELSSHILVEDKTQLAEQLWGRLLSFEIPEIQQMLQQAKSWKVTSWLRPIAPSLTPPGGRLLRTFTGHSGWVNAIVVTSGGMVISGSSDNTLKVWNPETGKEISTITGHAARIRAIALLDDKWVISGSDDFTIKVWDLETTEELVTLTGHTRAVRAVAALSDGRVISGSSDNTIKVWNLETQKVEMTLRGHQGWVNAVSVLSDKEIISGSSDNTIKIWSLETGEELFTLKGHTDGVRTITTLLERQIISGAADNTVKVWNLDSKKAVFTFKGHSKEINAVAVTPDNKRMISAASDNTLKVWNLETGEELFPLKGHTESVYAVAVLPDGRLISGSDDFTLKIWSLDTSEEFCPMVGHTNRVNAAIVLPEQQVISAAWDHTIKVWNLNTTKSIYTLKGHTDRVNSVAALPNQRIISASDDNTLKIWSLKTAEELLTIVSDNRCIFAVAVTPDGKQAIACLSDQTLKVWNLETLEEIFLLRGHTDWVSAVTVTPDGKQVISGSFDKTIKVWSLATRKEIATLVGHTGWVKALAVTPDGKRVISGSFDKTIKVWCLETGQELFSLSGHTDWVNSIAVTPDGSLVISASDDNTLKVWDLETRQVIANFTGESSLECCAVAADGVQFIVGEASGRVHFLKLENYKNQV

SEQ ID NO: 38332 - protein, 450 aa, Zea mays
MREIISIHIGQAGIQVGNACWELYCLEHGIEPDGTMPSDTTVGVAHDAFNTFFSETGSGKHVPRAIFVDLEPTVIDEVRTGSYRQLFHPEQLISGKEDAANNFARGHYTVGKEIVDLCLDRVRKLADNCTGLQGFLVFNAVGGGTGSGLGSLLLERLSVDYGKKSKLGFTIYPSPQVSTAVVEPYNSVLSTHSLLEHTDVAVLLDNEAIYDICRRSLDIERPTYTNLNRLISQIISSLTTSLRFDGAINVDVTEFQTNLVPYPRIHFMLSSYAPVISAEKAYHEQLSVPEITNAVFEPSSMMAKCDPRHGKYMACCLMYRGDVVPKDVNAAVATIKTKRTVQFVDWCPTGFKCGINYQPPSVVPGGDLAKVQRAVCMISNNTAVAEVFSRIDHKFDLMYAKRAFVHWYVGEGMEEGEFSEAREDLAALEKDYEEVGAEGADDEGDEGDDY

SEQ ID NO: 38333 - protein, 508 aa, Synechocystis sp. PCC 6803
MPHHYDRVNINKLLTRTRITMVTTPDWVKKAVFYQIFPDRFAIGQQQAIAVAQQPKLEPWEAPPTVQGYKGGNLWGVIEHLDYLQDSGITALYLTPIFQSACNHRYHTHDYYQVDPLLGGNEALQALLTQAHRREMKVVLDGVFNHASRGFYFFNDILENGPHSPWLDWFHIEDWPLSAYDGSLPANYRGWVDLRALPQFNHDHPDVREYLMRVGEYWIAQGIDGWRLDVPDCVKAEGFWQEFRCRVKAINPEAYIVGEIWCDASPWLAGDQFDGVMNYRFTEPTVAFAIGDRLQKEHLRGEEYRPYPALTAEAYGERISQLLQQHPWEIQLTQLNLLNSHDTARLLTLANGDRPSVNLALLLMFTFPGAPCVYYGDEVGLPGEADPDCRRVFPAKTDWDLDCWEFYRQLIALRHRYQCLQLGDYKIIATAGMGYVFQRQYGDETLMVAVNSGDNIIEIILSPDIINLDKIDIAEPVFSANGETVIDRNTAGLLLTMAPQSGAAFAII

SEQ ID NO: 38334 - protein, 164 aa, GIBBERELLA ZEAE PH-1
MSLHVPMAHRSRDQTGATKAVILVGGPSRGTRFRPLSLDLPKPLFEVAGHPIIWHCLSSVARVPNKQIQEVYIIGYYDESVFRDFIKDSAKEFPGITIKYLREYEALGTAGGLYHFRDAILKGRPERLFVLNADVCCSFPLDEMLKLFNDKDAEADILGTRVSD

SEQ ID NO: 38335 - protein, 160 aa, Medicago sativa
MGTLDTKGFTEEQEALVVKSWNAMKKNSAELGLKLFLKIFEIAPSAQKLFSFLKDSKVPLEQNTKLKPHAMSVFLMTCESAVQLRKSGKVTVRESSLKKLGANHFKYGVVDEHFEVTKFALLETIKEAVPEMWSPAMKNAWGEAYDQLVNAIKSEMKPSS

SEQ ID NO: 38336 - protein, 238 aa, Zea mays
MDPTKFRPSSSHDTTVTTTNAGAPVWNDNEALDDTKTWPEDLLPLRPVGRLVLDRNVDNFFNENEQLAFGPGLVVPGIYYSDDKMLQCRVFAYADTQRYRLGPNYLMLPVNAPRCAHHNNHYDGAMNFMHRDEEVDYYPSRHAPLRQAAPPTPLPPRPVAGRREKATIRKPNDFKQPGERYRSWDADRQDRFVRRFADSLGHPKVSQELRSIWIDLLAKCDASLGMKIATRLNMKANM

SEQ ID NO: 38337 - protein, 366 aa, Nocardia farcinica IFM 10152
MSAARQAIASARSVVVKIGSSALTSLEGGLDTTRLDRLADAVEARMRAGSDVVVVSSGAIGAGLAPLGLSRRPRDLATKQAAASVGQLALAHAWGTSFARYGRTVGQVLLSADDFSRREHHRNAQRTLDRLRSLGAVAVVNENDTVATEEIRFGDNDRLAALVAHLVGADALILLSDVEGLYDGDPRKGAATFIPEVRSSADLDGVIAGSGGVLGTGGMASKLSAARLAADAGVPVLLAAAEQAATALGSGTVGTAFAARPVRLSARKFWVRHAADSRGALVLDDGAVQAVAQRRRSLLAAGITAVRGRFHGGDVVDLLAADQRLVARGVVEYDSTELSTMLGRSTTELPDTMQRPVIHADDLVKV

SEQ ID NO: 38338 - protein, 839 aa, Gibberella moniliformis
MSTQEITTTNSNIIASHESIIFHPSLKGRSKPVVGKQLRAPRDPPVSLEKKINFYIWVLTIMLIQAWRDLKTRRWFKPLQRDDVAGHYFYVPIGRLNPRILLSAPHDRVLIRTIPSSMTRDYEELDDFSACPQREIVNAGSNNYGGFSRAEHNSASLIETTLRLLPFNPPPIELASRVNEELATYLGSKACSTTTSGFSANLLAFTTAAQTAEKLGRHCVFLLDAESHASMFTGAFVNKRATTHRFKHNDITDLEFKLRILKAKEPDAHVCVAIEGIYSLAGHMSPAPAILALRRVYNFCLLVDEAHGFMALGKSGRGSFEWWQDCGYDCPLQEVDIMTGTMSKSLCCIGGFVSANGVYAAELERQRTLQHQNGAETLSTAVLVRILSLINKPKLIKERMTALGRKASFVADCLAQAGCDILSSYGSPVVCFPVGEFPRVINWHSTLVKQGLIGQKEQFSKRLGFTRKPWKGALQSLAVYLPLRHYDLINMIIKVSCKLQLKGITATVFTPDTLPKQYLDDPSIAEQSIKSDASICSYVESLSKTYPGGDLEAKAPLNLAQSQEAVEASVKAFSKYGLGPSSARWFYGTFDVFIALERRLAKLYPSLQRHSGRCRAMLGTDAHTMMLSLLSACANPYTSGVMNILLIPTTASLAVQDGADLNRPRAETKIIYYEKLDNLVAKLRELPIDASKLHLTLYLQTTSHDGSSILDLPATVQMINSGMNDPNQLKGLKLILDDSGGLGKVGPHHLGYLDLMERDHGVSFLNQSLGIKLAPKTEIIVTGSFFNAFGQQGGYIISSASFIEVHTVSSKSFVFSTPPTPIQAALSGKVLEILSRGTC

SEQ ID NO: 38339 - protein, 153 aa, Arabidopsis thaliana
  misc_feature (27)..(27): Xaa can be any naturally occurring amino acid
  misc_feature (45)..(45): Xaa can be any naturally occurring amino acid
  misc_feature (63)..(63): Xaa can be any naturally occurring amino acid
  misc_feature (79)..(79): Xaa can be any naturally occurring amino acid
  misc_feature (96)..(96): Xaa can be any naturally occurring amino acid
  misc_feature (106)..(106): Xaa can be any naturally occurring amino acid
  misc_feature (118)..(118): Xaa can be any naturally occurring amino acid
  unsure (1)..(153): unsure at all Xaa locations
GRYGERVGNLSIVCKSADVPSKFESQXKLVVRPRYSSPHIHGASXVGTCVQSSDMYNIWIIEXLKKWVTVVKSMRQQLXEAIQGRGTPGAGSHMCXQHGMCTMTGXNKEPVDIMNKEXLGCMTSEGRISMAGLSSKPVPPLMDAMHAAVTRMG

SEQ ID NO: 38340 - protein, 526 aa, Triticum aestivum
TSSRLVSSLVPIPSPGTLPRSSPPRTHHPLSPRPVEGIPAPEDGCAVADGAGSAAVDGPTDVIIVGAGVAGSALAYTLGKDGRRVHVIERDLTEPDRIVGELLQPGGYLKLMELGLQDCVDEIDAQRVLGYALFKDGKNTKLSYPLEKFHSDVAGRSFHNGRFIQRMREKAASLPNVQLEQGTVTSLLEENGTVKGVQYKIKSGEELKAYAPLTIVCDGCFSNLRRALCSPKVEVPSCFVGLVLENCELPHANHGHVILANPSPILFYPISSTEVRCLVDVPGQKVPSIASGEMTNYLKTVVAPQIPPQICDSFIAAIDKGSIRTMPNRSMPAAPHPTPGALLMGDAFNMRHPLTGGGMTVALSDIVVLRNLIKLLRNLHDASALCKYLESFYTLRKPVASTINTLAGALYKVFSSSPDKARDEMRQACFDYLSLGGVCSNGPIALLSGLNPRPLSLVAHFFAVAIFGVGRLMLPLPSPKRMWTGARLISGACGIIFPIIKAEGVRQMFFPATVPAYYRAPPEAEF

SEQ ID NO: 38341 - protein, 466 aa, Escherichia coli O6
MDKKQVTDLRSELLDSRFGAKSISTIAESKRFPLHEMRDDVAFQIINDELYLDGNARQNLATFCQTWDDDNVHKLMDLSINKNWIDKEEYPQSAAIDLRCVNMVADLWHAPAPKNGQAVGTNTIGSSEACMLGGMAMKWRWRKRMEAAGKPTNKPNLVCGPVQICWHKFARYWDVELREIPMRPGQLFMDPKRMIEACDENTIGVVPTFGVTYTGNYEFPQPLHDALDKFQADTGIDIDMHIDAASGGFLAPFVAPDIVWDFRLPRVKSISASGHKFGLAPLGCGWVIWRDEEALPQELVFNVDYLGGQIGTFAINFSRPAGQVIAQYYEFLRLGREGYTKVQNASYQVAAYLADEIAKLGPYEFICTGRPDEGIPAVCFKLKDGEDPGYTLYDLSERLRLRGWQVPAFTLGGEATDIVVMRIMCRRGFEMDFAELLLEDYKASLKYLSDHPKLQGIAQQNSFKHT

SEQ ID NO: 38342 - protein, 331 aa, Flaveria bidentis
MSAASAFAMNAPSFVNASSLKKASTSARSGVLSARFTCNSSSSSSSSSATPPSLIRNELVFAAPAPIITPNWTEDGNESYEEAIDALKKTLIEKGELEPVAATRIDQITAQAAAPDTKAPFDPVERIKSGFVKFKTEKFVTNPALYDELAKGQSPKFMVFACSDSRVCPSHVLDFQPGEAFVVRNVANMVPPFDKTKYSGVGAAVEYAVLHLKVQEIFVIGHSRCGGIKGLMTFPDEGPHSTDFIEDWVKVCLPAKSKVVAEHNGTHLDDQCVLCEKEAVNVSLGNLLTYPFVRDGLRNKTLALKGGHYDFVNGTFELWALDFGLSSPTSV

SEQ ID NO: 38343 - protein, 335 aa, Desulfotalea psychrophila LSv54
MKVKATGGPAGAGVDPAHARQLLYQMVRIRRFEEKAAELYTKMKIRGFLHLYIGEEAVAAGVSAALEPEDATVATYREHGNALARGISAGAIMAEMYGKQEGCSRGRGGSMHIFDDKTRFYGGNAIVGGGLPLAVGLALADKMQGKKRVTCCFFGDGAVSEGEFHESMNLAALWNLPVLFICENNLYAMGTALERSQSVTDLTRKAVSYRIAASAVDGMDVLAVEAAANEAVNAVRSGQKPYFLECRTYRFRAHSMFDPELYRSKAEVEKWKKRCPISSFVKRLKKQDLLDDGDVEELERQVAREIEEAVAFAENGTWEPVEDLMRFVYSERGAA

SEQ ID NO: 38344 - protein, 212 aa, Aeropyrum pernix K1
MLASIEEAIDKSLKLGRGKRFKQSVEIIVALKDIDLKSPQARIRETVFLPNRPPKEAKVCVVAHGDMELQAKEAGVEVLNRQDLQNLSQNKREVKKLARRCYWVLVRADLMGLAGRILGPALGPRGKAPVPVPPNANIKDLIERYKAAVWVRIRNQPQVMARIGTEDMSPRELAENALAVLQVIENRLGRGKISRIYVKKTMGPPVEVPAIG

SEQ ID NO: 38345 - protein, 527 aa, Zea mays
MATCDLLMLREASPWALAGAVASVSLLWLVAWTLEWAWWTPWRLDRALRAQGLKGTRYRLFTGDLRETARVNREARKKPLPLGCHDITPRVQPMHHSTIKEYGKLSFTWFGPTPRVMIPDPELVKEVLSNKFGHFGKPRSSRIGRLLANGLVNHDGEKWAKHRRILNPAFHHEKIKGMMPVFSTCCIEMITRWDNSMSSEGSSEIDVWPEFQNLTGDVISRTAFGSNYQEGRRIFELQGELAERLIQSVQTIFIPGYWFLPTKNNRRMRAIDVEIRKILREIIGKREKDTKNRETNKDDLLGLLLESNTRQSNGNASLGLTTEDVIEECKLFYFAGMETTSVLLTWTLIVLSMHPEWQERAREEVLSHFGRTTPDYDSLSRLKTVTMILHEVLRLYPLATFLTRRTYKEMELGGIKYPAGVELLLPVIFIHHDPDIWGKDASEFNPERFANGISSATRHQAAFFPFGGGPRICIGQSFALLEAKMTLCTILQRFSFELSPSYTHAPYTVITLHPQHGAQIRLKKLSP

SEQ ID NO: 38346 - protein, 333 aa, Cupriavidus necator
MTARASQDSAALPLDKETLLTVYRKMRTIRDFEERLHVDFGRGDIPGFVHLYAGEEAAGVGILHHLNDGDRIASTHRGHGHCIAKGVDPVAMMKEIYGKKGGSCNGKGGSMHIADLSKGMMGANGILGAGAPLICGAALAAKFRGKGEVGITFCGDGASNQGTFLESLNLAAVWNLPVIFVIENNGYAESTSRDYGTAVDSYVDRAAGFGIPGVTVDGTDFFAVHEAAGEVIRRAREGGGPSLLECKMVRFYGHFEGDAQTYRAAGELDDIRANKDCLKLFGRAVTQAGVVAREELDTIDREVAALIEHAVQEAKAAPQPGPEDLLTDVYVSY

SEQ ID NO: 38347 - protein, 251 aa, Frankia sp. EAN1pec
MSSSSGTAPNSGTAPAPGTAPDPGASPNGAGRYDGKSGFLARPLYAYLMAHGSPPDAVLSDLAAETAALGSVARMQIPAEQGSLLTILTAALAPSRAIEIGTFTGYSALSIARGLPAGGRLLCLDVSEQWTSVARRYWERAGVSDRIELRLGPAADSLAALPAEPVFELAFIDADKTSYPTYYELLLPRMKPNGLIIVDNVLQSGRVLDADVTEPSAVAVRAFNRMVADDPRVQVVMLPVADGLTIARKLP

SEQ ID NO: 38348 - protein, 148 aa, Oryza sativa; identical to SEQ ID NO: 833

SEQ ID NO: 38349 - protein, 400 aa, Glycine max
MSFRSIILERKGFEVKFGYSMRSRSQSHSDAIAQDSLVVLDGLKQSCWANMPPELLRDVLMRIEASEDSWPAQKHVVACAGVCRSWREIMKEIVKSPQLSGKLTFPISLKQPGPRDSLLQCYIKRNRSNQTYYLFLGLNQASTDEGKFLLSARKCRRATHTDYIISLNCDDVSRGSSTYIGKLRSNFLGTKFTVYDAHPPIYGAKVTKSRSSRLVSLKQVSPRVPAGNYPIAHVSYDLNVLGSRGPRIMQCVMDAIPASAVEPGGVAPTQTQFLHSRIDTSPSIPFFRSKSTRMDNLPTVPLTCQNEGTLVLRNKSPRWHEHLQCWCLNFNGRVTVASVKNFQLVASPKNGVSEQAQENVILQFGKVGKDVFTMDYQYPISAFQAFAICLSSFDTKIACE

SEQ ID NO: 38350 - protein, 432 aa, Parachlamydia sp. UWE25
MISRPISQQIYSNLNRVIPGGVNSPVRACANMGQIPMIIDHAYRDTLVDVDGKTYVDYCGSWGALIHGHAHPSILEAVQQRMKKGTSFGITTSIEGELAQEVIKLIDSVEKIRFVSSGTEATMSAVRLARGYTNKEFIVKFNGNYHGHADFFLVQAGSGVLEVSPSASSAGIPADIVKQTLCLPYNDIEACRQIFHHSDYRHKIAAIILEPIAGNMGVIPASQEFMQFLRKETLAMGALLIFDEVMTGFRVALKGAQDIYPVEPDLTCFGKIIGGGFPAAAFGGREEIMNLLAPLGSVYQAGTLSGNPIAMEAGLQSLRLIQQPGFYEELHRKTDLLLNPIKETIKKNNWPICIQQAGSMFTLFFCKNRVRNLEDALKANTTIFANFFRKLFDQGIYIPPSQHEAWFISQAHEESNLIKTQSAILTFLEENF

SEQ ID NO: 38351 - protein, 530 aa, Mesorhizobium sp. BNC1
MRLPRREGRRRKFNQLDRDYAQSGLAMEETMQTAHTWKADRQQSLRGHTVPTALLIAGEWIERDKSFTVTNPATNEEIARVSDGTAEDALRALEAATASQEAWAAWAPRQRANLFHRAHRLMLERATAFAEVMTLESGKPLAEAKAEFALSADFFLWYAEQIAHLHGTFASGSPGGYRIIATHRPVGPCFLVTPWNFPLLMIARKGGAALAAGCTTIVKSARETPLTAALFAQTLLEAGFPAGTVNLIHTTSSASISEALLADPRLRKVSFTGSTEVGSRLLSGAAQNIVNASMELGGDGPFVVLEDADIDLAVRQAIICKFRNAGQACVAANRIICHAAVVDEFTQKFVDETRKLRVGDGFEPGTDVGPIISSPQLERVDRMVAMLKDAGAELLTGGKRKGVTGNFYEPTVMRIKGSAPACRNEELFAPIAVIYSVDSVAEAIRFANDTIYGLAAYVFTRNVDRAIAVSEKLDFGMVGINRGIMADPAAPFGGIKSSGLGREAGHDGIYEFLEPQYLALTVNEAAGISQ

SEQ ID NO: 38352 - protein, 287 aa, Nocardia farcinica IFM 10152
MTTPVIAVLGSINMDLVTTTARRPAPGETVLGSGFDTVPGGKGANQAVAARRSGGRVEFLGAVGTDVFAPQLRGALESVGVGTAGLRTVPGPSGVASIVVDESGENSIIVVGGANAAMTALRETDRAMIAAADVLVCQLEIPVPTVAAGLRHARANGTTVLLNPSPAQDLPPQLWADVDVAVVNRGEERQLGAVLDRVPHVVVTLGGAGARYRGPDGAELAVPGVPVEVVDTTGAGDAFTGALAVTWRHGPAAALRWACAAGALATTRLGASASIPERAAIEDLLAR

SEQ ID NO: 38353 - protein, 650 aa, Symbiobacterium thermophilum IAM 14863
MEKAKSGHPGAPMGCADMAFVLWTQFLRFDPENPEWPNRDRFILSNGHGSMLLYSLLHLSGYDLDMEQIQSFRQWGSRTPGHPEYGHTPGVEVTTGPLGQGIAHAVGMAAAAEMLAARVNTDDFRPVDHYIYGICGDGDLMEGVVAEAAALAGQWKLGRLIFLYDDNEISIEGNTDIAFSEDVAKRFESYGWHVDRCDGHDHLAIAAAIERARAVTDKPSLIICRTVLGHGSPNKAGKAVAHGAPLGPEETRLTKEALGWPQEPAFYVPDEVRQFFAELKAEKQAEARRWQEQFDAWRQANPEKAQLWDQHKNLMVPADLDAQLVEAARSEKPLATRKYSEMVIQRAAALVPSLVGGSADLAESNLTTIKGGGDVGPACRIDEYDFSWSGRNFHFGVREHAMGSIVNGVVLYGGFRAYGATFLVFSDYMRPPIRLAALMQVPSIFVFTHDSFFLGEDGPTHQPVEHLWSLRMIPHVTVFRPADGLETAMAWAYALMEAKEPTILALTRQNVPHLERPAGFAIRDVWKGGYVVSDAANPVATLIATGSEVGLAVEAQKLLAERGIAVRVVSMPSVELFLRQPREYQEQVLVGRLAAIEAGRTDGWYRIIGRDGLAIGHEDFGASAPAGVLAEKFGFTPAQVAARVVEWLEG

SEQ ID NO: 38354 - protein, 498 aa, Wolinella succinogenes
MLKCPHQFTFSIRQSSSHSRRKDMADQSKVKEFFRFCQENEVEFVDFRFTDIKGVWHHVSYSMASIDEESFNGLPFDGSSIPAWQPINRSDMQLIPDPVSYFLDPFTADTTVVVFCDVWDIYKNQPYEKCPRSIAKKALKYLESTGLGDVAYFGPENEFFVFDSIKIQDSINCQSYEVDVEEGTWNSNRAYENGYNLGHRPGTKGGYFPVAPVDSMVDIRAEMVKVLNQVGLETFVVHHEVAQGQGEIGVRFGDLIKAADNVQKLKYVVKMVAHMNGKTATFMPKPLYGDNGSGMHTHISIWNKGENTFAGDAYQGLSETALHFVGGVLNHAKSAAAFTNASTNSYKRLIPGFEAPSILTYSAQNRSASVRIPYVQGAKAKRVEFRFPDSSANPYLAFSALLMAGIDGIQTKANPGEPMEMDLFELSLDEIREKGIKQMPHTLRSAVENMLADKDYLKKGDVFSEDFLQTYKAYKFETEIWPWEARPHPFEFISTYSC

SEQ ID NO: 38355 - protein, 421 aa, Nocardia farcinica IFM 10152
MTVETTAEFDVREAVHEAARRARVASRALAQLTTAQKNDALHAAADTLLAAADTVLAANAEDIAAAEAAGTEASLLDRLRLTKARIDGIASGLRQVAGLPDPVGGVVRGSTLPNGLEIRQVRVPLGVVGMVYEARPNVTVDAFGLALKSGNAALLRGSSSAAKSNAALVEILREALRAQQIPADAVQLLPSHDRSSVTHLIQARGLVDVVIPRGGAGLINAVVRDAIVPTIETGTGNCHVYVHAAADLDMAEQILINAKTRRPSVCNAAETVLIDRAVADTAVPRLTAALREHGVTIHGDLPGLVPATDTDWGEEYLTLDIALKVVDNLDAAVEHINTWGTGHTEAIVTGDLAAAREFTSRVDAAAVMVNASTAFTDGEQFGFGAEIGISTQKLHARGPMALPELTSTKWIVWGEGQIRPV

SEQ ID NO: 38356 - protein, 459 aa, Thermobifida fusca YX
MSESGGTFDLVILGGGSGGYSAAIRASELGMRVALIEKDKLGGTCLHYGCIPTKALLHAGEVADTVRASEKFGVRASFDTIDMARVHEYKDKVVSGLHRGLTGLIKARGITLVEGEGKLTGVDEVTVNGVAYKGRHIILATGSQARSLPGLEIDGERIITSYEALRLDRVPKSAIILGGGVIGVEFASVWRSFGAEVTIVEALPHLVPAEEESSSKLLERAFRKRGIKFELGSPFESVKLTETGVSMTLASGKTVEGELLLVAVGRGPVSQGLGYEEVGIRLERGFVQVDENLHTGVGNIYAVGDLIPTPQLAHVGFAEGIFVAEHIAGLNPVNIDYDGIPRVTYSDPEVASVGITSKTAAERGIETTEFVYNLAGNGKSQILQTQGAVKVIAAKDGPVLGVHMVGSRVGELITEGQLIYNWEALPSEVAQLIHAHPTQSEALGEAHLALAGKPLHVHD

SEQ ID NO: 38357 - protein, 278 aa, Triticum aestivum
DPRFRKEGIPPDQQRLISAGNQLEDGRTLADYNIQKESTLHLVLRLRGGMQIFVKTLTGKTITLEVESSDTIDNVKAKIQDKEGIPPDQQRLIFAGKQLEDGRTLADYNIQKESTLHLVLRLRGGMQIFVKTLTGKTITLEVESSDTIDNVKAKIQDKEGIPPDQQRLIFAGKQLEDGRTLADYNIQKESTLHLVLRLRGGMQIFVKTLTGKTITLEVESSDTIDNVKAKIQDKEGIPPDQQRLIFAGKQLEDGRTLADYNIQKESTLHLVLRLRGGQ

SEQ ID NO: 38358 - protein, 192 aa, Triticum aestivum
  misc_feature (36)..(36): Xaa can be any naturally occurring amino acid
  misc_feature (70)..(70): Xaa can be any naturally occurring amino acid
  misc_feature (148)..(148): Xaa can be any naturally occurring amino acid
  unsure (1)..(192): unsure at all Xaa locations
RRPTPSVPGSRSNNTLPWSPAVMASSATTGAPFQGXKSTAGLPVGRRSSGSLGSASHGGWIMCMQVWPIXGIKKFETLSYLPPLSTEALLKQVDYLIRSKWVPCLKFNKVAFLFREHNSFPGYYDGRYWTMWKLPMFWCTDTTQVLNXEVEDVKKEYPDSYIRVIRLDNLRQLQCVIFIAFRPSGCEEYDKA

SEQ ID NO: 38359 - protein, 135 aa, Cytophaga hutchinsonii
MAQQSTAAKRKDKAKKRIVVIEPTGQVHIRASFNNIIISVTNSTGQVISWASAGKMGFRGSKKNTPYAAQVAAQNCAQVAFEGGMRKCEVFVKGPGSGRESAIRTIQNAGIEVLTIKDVTPMPHNGCRPPKKRRV

SEQ ID NO: 38360 - protein, 435 aa, Oryza sativa (japonica cultivar-group)
MAPWRAAAMASSQLARRAARRLLSSQHRRHCAAPACPWLLGSAPPVLAPSPVAAAAAGDRRGFCSVRRFTGESNAAAAVEEAENGLVAGGDQAIDFPGGKVSFVAEMNFLPESQRDRINCYRVLDDDGRTISGSRFQEVSKELALKMYNEMATLQVMDTIFFEAQRQGRISFYLTSHGEEAINIASAAALTIDDIVLPQYREPGVLLWRGFTLQEFANQCFGNKLDYGKGRQMPIHYGSNRLNYFTVSSPIATQLPHAVGAAYSLKMDKKDACAITYFGDGGTSEGDFHAALNFAAVMEAPVIFFCRNNGWAISTPTSEQFRSDGAVIRGQAYGMRSIRVDGNDALAVYSAVHTAREMAIKEGRPILVEALTYRVGHHSTSDDSTKYRPVDEIEHWRTARDPISRYRKWVQGNGWWCDEDESELRNNVRQEVTFL

SEQ ID NO: 38361 - protein, 90 aa, Argemone mexicana
  misc_feature (75)..(75): Xaa can be any naturally occurring amino acid
  unsure (1)..(90): unsure at all Xaa locations
REQDRYMPIANVIRIMRKVLPTHAKISDDAKETIQECVSEYISFITSEANDRCQREQRKTITAEDVLWAMSKLGXDEYIEPLTLYLQRYR

SEQ ID NO: 38362 - protein, 371 aa, Sulfolobus solfataricus P2
MKTILFFILIFNSQYMSKRIGVAVVGLGSIGKTHVKALKDLEKETEFVKLVAVVDQIKAIAEKIGSEYGTPYYTTIDEVLRNSEVDVISIATPSYLHAPQAILAIEYGKHVIVEKPMATTLAGAREMVSRAERNEVKLGVIFQERYAPDIRRLKNDILKELGRIYLIESELKWYRDMKGYYKRDEIARSWRGMWNTEGGGVMTNQGIHTIDLMIWLNGEVEEVSGFVDNLTHDGIEVEDTAVAIMRYKNGALGTISQTVSMKPTTYQYRKIRVNGSNGFVEITDGSLSTVAIEGKIEESKSSVEYKKETIAQPGNLHKELLRDFLRALSEDNDFPINGKEGMKSLEVIKAVYLSSVNRQVVKLPLDVRIVV

SEQ ID NO: 38363 - protein, 487 aa, Oryza sativa (japonica cultivar-group)
MAPWRAAAMASSQLARRAARRLLSSQHRRHCAAPACPWLLGSAPPVLAPSPVAAAAAGDRRGFCSVRRFTGESNAAAAVEEAENGLVAGGDQQAIDFPGGKVSFVAEMNFLPESQRDRINCYRVLDDDGRTISGSRFQEVSKELALKMYNEMATLQVMDTIFFEAQRQGRISFYLTSHGEEAINIASAAALTIDDIVLPQYREPGVLLWRGFTLQEFANQCFGNKLDYGKGRQMPIHYGSNRLNYFTVSSPIATQLPHAVGAAYSLKMDKKDACAITYFGDGGTSEGDFHAALNFAAVMEAPVIFFCRNNGWAISTPTSEQFRSDGAVIRGQAYGMRSIRVDGNDALAVYSAVHTAREMAIKEGRPILVEALTYRVGHHSTSDDSTKYRPVDEIEHWRTARDPISRYRKWVQGNGWWCDEDESELRNNVRQELLKAIQVAERMPKPPLAELFTDVYDEVPSNLREQERLLRDTIKKHPADYPADVHI

SEQ ID NO: 38364 - protein, 921 aa, Oryza sativa
MASKGTEGGHGGVERKEQQQQRGYQLPRDSRGSLEVFNPSSASSFRTAAAAPKSASPFLAIPDREEDNVVAQQRAAEWGLVLQTDHHTGLPQGVSARPSSGSARTSSEDNPQQQQSAAAIPRVSEELRAALSAFQQTFVVSDATHPNHPIMYASAGFFNMTGYTSKEVVGRNCRFLQGSGTDPHEIDKIRQSLANGSNYCGRILNYKKDGTPFWNLLTIAPIKDEDGRLLKFIGMQVEVSKYTEGKKDTVVRPNGLSESLIKYDARQKDHARSSVSELLLALKNPRSLSESSNNTLKRKSQESLSMSMTEVPSKRSSESGSRRNSRSGTRSSLQKINEVPDQGNRTRKSGLRAFMGFLGMGHGSVEKNMLKPRDEDPLIDSDDERPESFEDEFRRKEMRRGIDLATTLERIEKNFVITDPRLPDNPIIFASDSFLQLTEYNREEILGRNCRFLQGPETDRATVRKIRDAIDNQAEVTVQLINYTKSGKKFWNLFHLQPMRDQKGDVQYFIGVQLDGTEHVQDDAAKEGVVLVKKTADNIDEAAKELPDANLRPEDLWANHSKVVLPNPHMKDTASWRAIQKVLESGESIGLKHFRPVKPLGSGDTGSVHLVELLNTGEYFAMKAMDKSIMLNRNKVHRATAERQILDLLDHPFLPTLYASFQTKTHICLITDYCPGGELFVLLDNQPLKVLHEDAVRFYAAEVVVALEYLHCQGIIYRDLKPENILLHRDGHISLTDFDLSCLTSCRPQVFLPEDADEKKGRKNGSYPIFFAEPMRASNSFVGTEEYIAPEIITGAGHTSAVDWWALGILLYEMLYGYTPFRGKTRQRTFANILHKDIRFPASISVSLAARQLMYRLLHRDPANRLGSYEGANEIKGHPFFRGINWPLIRATAPPKLEIPLFSKDDMEKKGLVTNNRTDMF

SEQ ID NO: 38365 - protein, 1627 aa, Nostoc sp. PCC 7120
MKILIVEDDELNAYALTAVLTNQNYAVEVGSDGITAWELIQTYDYDLILLDVMLPRLDGISLCRQIRSSGRQMPILLLTGCDSSHEKAIGLDAGADDYVVKPFDEEELVARVRALLRRGVTTAQPILEWGNLQLDPSSCEVRYNQNLLSLTPKEYALLELFLRHSRRVFSCSMILEHIWSYEDTPGEEAVRTHIKGLRMKLRNAGAPGDLVETVYGIGYRLKAQEEEQGSKEEVKQPTSKGKSQQQTLTAIAGIWQKFYVRVDEQVKVLEQAAMTFERSQMITLTQEALNSELYSQAIREAHTLAGSLGTFGLPEGSKLARKIEQLLKSGKRLTPTEIQSLQNWVKLLRQEVAAHEPQAASPETTSAAILQPQPPQAEAKVLAVDDDPQILAILQTLLHPWGLQVITLDDPRQFWETLRDVNPDLLILDVEMPYTNGIELCQVVRNDPQWSELPILFLTVHKDGEIVNQVFSVGADDFVSKPIVGPELVTRIINRLERVKLLRRVSESRGVGEKISPPSPSFTDWRTIFNAEPECVMIVATDGTLLDINPAGVAAIEADSVGAVIGKRVYSLVVPECQQAFRQLNESVCQGKQGTLEFEIITCRGNRRWMATHAVPVRNEKDGNLVQLSITRDVTQYKQAELEIKRINRTLQTLSDCNQLVIRTQDESELLQKVCQILVDVGNYRLAWVAFAENDAEKSIHPVAQAGYEEGYLQSLNLTWADTVRGQGPTGTAIRTGKTAIIQNILTDPRFEIWRCQANNRGYASSISLPLMNNGQAFGALNIYAAEANAFDSDEVKLLEELTADVAYGIVALRNRRDRQIAEAALRESQERLSLTLEAVNLGIWDWNITTNQIIWSEGHARLFGIESGKFDGTYEAFQACIYPEDRGGLAEVINSARQQKTDYSHEFRIISPDGNIHWIEGTGKLYYNEMGEAVRMLGIVRDITSRKQIEATLQKINNELELRVAERTAELVNVNRQLQSELDERQRIEEALRISQVRLARILDIADDAIISINGNQQITLFNQGAEKIFGYSAEEIIGQRLDTLIPQRFTQTHRQHVADFGQAPSLARRMGERREIFGCRQDGTEFPAEASISKFQLDKEVFYTVILRDVTERKQIERMKDEFVSVVSHELRTPLTSIHGSLGMLASGLLSADSEQGKRLLEIATDSTERLVRLINDILDIERIESGRVKMERESCDLSDLIESAVSIMQPLANKAGVKLSVSSPSIQLWVDPDRIVQTLTNLLSNAIKFSTAEKTVWLVAQHYGDELLLTVKDNGRGIPADKLDSIFERFQQVDSSDSRNHDGTGLGLAICQSIIQQHGGRIWAESVLGEGSNFYFTLPILPISQNSELPDSLPHHPLSPEESPPSLISSTHSPLVLVCDDDPLIRTELQSLLEQGGYRVFTVATGQEAIASASTQHPDVIVLDLLMPGMNGWETMAMLKESTETKHIPIVICSVYKPTSNHQPSRDFVDWVSKPVQESYLLHSLRQAIAKSSHRVRILIVEDDADLAELFVTLFERHDIETFSAKTGREAIHLSQEVNPDLLILDLILPETDGFAVVDWLQKHQRLCNIPVVVYSAKDLDESERKRLKLGHTEFLTKGRVTTKEFEQRVIELLQRITPTNVRD

SEQ ID NO: 38366 - protein, 1040 aa, Hypocrea jecorina
MEGYYQTNQLPPQQLDGQLPHPPDEQPPTHISHNVLAMSMQDHTLPPELQQQLQQSRQAMSNPMISGQAVMPDGHMDDVMRDGHHDIQRRRSMPQAYGNTLGPASQGNPPRRMSTIGPRDMMTFDAGPAGFGNYQFDPEMPTSFSAMGASMGMQDPMGGYVSDAGNFPAMPQDLIGTMMQSQFANMDMDGLTAEPSAMDLFPGTSGQASDLAATSIAGQMDASQLASGGDGYALTGAGAGASLGGRSNGGHKGMALGHDEDMMNAPPPQFPTMTAGPSHLAMESDMVAFEPNMPSPLPGSVPALSTQQSTASMEMAQPSSASATPVPVANSSDQPKEKTIYSKSGFDMLKALWLVATRKNPKIHLGAVDMSCAFVVCDVTMNDCPIIYVSDNFQNLTGYSRHEIMGQNCRFLQAPDGKVEAGSKREFVDDGAVYNLKRMIQEGREVQQSLINYRKGGKPFLNLLTMIPIPWDTDEIRYFIGFQIDLVECPDAISGQEMGGVKVNYKHSDIGQYIWTPPVSNQLEADNGQTLGVDDVSTLLQQFNPNGLVSDWHRQSWDKMLLENTDDVVHVISLKGLFLYLSPSCKRVLEYDAADLVGNPLSSVCHPSDIVPVTRELKDATTGSQVNIVFRIRRKQSGYTWFESHGSLFVDQGRGRKCIILVGRKRPVFALGRHTLEANGGIGDSELWSKLSTSGMFLSVSANIRSLLDLQPESLVGTSIQELMRKESRAEFGRTIEKARKGKISTCKHEMLNRRGQGLQAQTILYPGDASEGQKPSFVLAQTKLLKASSRHAPSTLTAANASYAANSLRADGQHQGAGHGGPILQPAGGTLVPGSQDAALASDDNIFDELRTTKCSSWQFELRQMEKINRILAEELGGLLSNKKKRKRRKGVGNVARDCANCHTRNTPEWRRGPSGQRDLCNSCGLRWAKQTGRVSPRNSTRGSHSVNTDTYTKKSTSPIHSSPLHRSETPNPIHSNGENFLDPKQLASKIAVATGGTGSMAGPHASSTMPPPSQSSLAPGAVSSGMTSIREERESSQT

SEQ ID NO: 38367 - protein, 396 aa, Persea americana
MALKLSPVMFQSQKLPFLASYPPSNLRSPRVFMASTLRSSTKEVDNIKKPFSPPREVHVQVTHSMPPQKIEIFKSLEDWAEENILVHLKPVEKCWQPQDFLPEPESEGFLESVEELRKRAKEIPDEYFVCLVGDMITEEALPTYQTMLNTLDGVRDETGASPTSWAIWTRAWTAEENRHGDLLNKYLYLSGRVDMRQIEKTIQYLIGSGMDPRTENSPYLGFVYTSFQERATFISHGNTARHAKEYGDDKLAKICGTIAADEKRHETAYTKIVEKLFEIDPDGTVLAFCDMMKKKISMPAHLMYDGQDDDLFGHFSSVAQRLGVYTAKDYADILEFLVRRWDVEHLTGLSPEGKTAQEFICKLAPRIRSLEERARSRAKEGPTIPFSWIFNREVKL

SEQ ID NO: 38368 - protein, 1024 aa, Thermosynechococcus elongatus BP-1
MVLTELIKKSRDYLRSLAVIEIHSQWFPLTSPSLKDVGTTPYGVNAKGHLTWPKGRHSLWLGQRLSVPAMVQGYSVAGLTLRLDLRWWADQATVYVNGQAVHQGDLFDHSVSLCLGEAVTPGQTWEVMLHLISPGHDDGALVKSCLRFESPTGVDPAFVAAELNILEIFAETLNLEPLELLLQEVLNSQGQRPILDSLLAQMHDSMLAIATPLREFTIHLCGHAHLDLAWLWPIAETWQVAQSTFQSVLGLKKRYPELTFTHSTPALYAHLQTHAPELFGQIQAAVAAGWWDVAAGLWVEPELNLIHAESIARQILYGQQYVQQVFGEMSPIAWLPDTFGFPERLPSFLAQGGIRYFVTQKLRWNDTTRFPYGWFVWRDVAGAEIHALMSAPIGEGIDPVKMATYAQQWWQQTGSQRSLWLPGVGNHGGGPTAEMLERVRRWQRLGGIGPQWQWTTVREYLAQLSQETPPTPQWQGELYLEFHRGCYTSHGDQKAAHDRAQRQLQEAERWCALAAITTSFAYPREELKTSWQQLLFNQFHDILPGSSIPEVYAEVNPTWQQLLKTTETLLAAAQTALCASIDYGTPPVAGAIPVVIFNSGVGDRAGVVHIDLAQLPQEIPSWRVYCPRGNYDLPAQLNAPQGCLTFSTPEVPGIGYTLLWLCPRSRPETLPTPPLGYVLENNYLHVEIDPATGEITNLYDKLNHRPCLGDRGNQLQFFRDQGQYWDAWNIDPNYGRHRLAGAILESIEWVTWHQLEQRLRVRWRFQSSWIQQEYVLQYQTPWLRIDTVIDWQEEHILLKAAFPLAISAEQITCETPGGVTVRPTLPNPHLSPHEQTKWEVPFLTWVDLSTPEYGVSLFSDCKHGLDAQANQLRLTLLRSPTWPDPTSDRCQHCFSYGVFPHSGSWQAAAVPQWAAQFHHPLRSAIGHGATKPFDPSPGALPAYAHLLHWSEAGIQCLALKEAEDGEGWQLRVADVAGEGGPLELHSTLIPWQIKARQTLLEMPTDGGNAMTLKPWEVVTLRLET

SEQ ID NO: 38369 - protein, 243 aa, Bacillus licheniformis
MSYRVKRVLLLLVTGLFLSLSAVTSTASAQAGGSFFDPFNSYNSGVWQKANGYSNGGVFNCTWRANNVSMTSLGEMRLGLTSPSYNKFDCGENRSVQTYGYGLYEVGMKPAKNVGIVSSFFTYTGPTDGTPWDEIDIEFLGKDTTKVQFNYYTNGVGNHEKLVNLGFDASNSYHTYAFDWQPNSIKWYVDGQLKHTATSQIPTTPGKIMMNLWNGIGVDDWLGSYNGVTPLYAHYDWVRYTKR

SEQ ID NO: 38370 - protein, 335 aa, Xylella fastidiosa Ann-1
MRNTKSTLKIAIIGYGSQGRAHALNLRDSGFDIIVGLRPGGPTEAKAQVDGFTVQSPDQAAKHADLVAVLTPDMVQKKLYEEVLAPNIKQGACLLFAHGLNVHYSLITPRSDLDVVLVAPKGPGALVRREYEIGRGVPCIYAVHQDLSSHAEQLALTYAGGLGGARANIIKTTFKEETETDLFGEQAVLCGGVSSLVQAGFETLVEAGYQPEIAYYEVLHELKLIVDLFYEGGITRMLEFVSETAQYGDYVSGPRVIDRSTKERMKAVLKDIQDGTFTKHWIAEYQAGLPNYKKYKQADLEHPIEKVGKQLRAKMVWLNSEKTNDTTHPMSSKVV

SEQ ID NO: 38371 - protein, 584 aa, Glycine max
MSGATTPLPSGVSTPDIRTRELKQPMDVAEYLFRRLHQVGVRSVHGLPGDYNLVALDYLPKCGLDWVGNVNELNAGYAADGYARIKGISAIITTFGVGELSAINAIAGAYSEYVPVVHIVGYPTTAAQKNNLLLHHTLGNGDFNSFADMSRKVSCAVSMLNDPHEAATLIDDAIKKCYVLSRPVYIALPSDMVGKKIEGERLKTPLNLEFSPNHEEKEDYVVDVVLKYLHAAKNPVILVDACAIRHRALKETDEFIKKTGIPTFVAPMGKSAVDETLPNYGGVYAGDGSNAGVRERVESADLIISIGAVKSDFNTAGFTYRTSQLNTIDLHSYGVAVKYSEYPGVRMNGVLTKVTAKLGKLNIESGPVPNNTVPKEHADSSDPTITQAWLWPRVGQWLRENDIVITETGTANFGIWETRFPKGVTAISQVLWGSIGYATGCLQGAALAAKELGRERTILFTGDGSFQLTAQEVSTMIRKNLNPIIFVICNDGYTIERCIHGWDAVYNDIQNWNYKDLPAAFGGKPEQFDTYQVKTKEELNKLFAEESFNTSKKLRFVELYMPRDDAPAALMLTAEAAAKRNLEG

SEQ ID NO: 38372 - protein, 373 aa, Clostridium perfringens str. 13
MAEGGNKMKAKTTKAKKGEGKEKVDKMVLVKRLIDKGKKSGSLTYKEIMDELDEIELNPEQIEKIYEVLESMGIEVISEIEQEEEEEEELDLSVPEGIAIDDPVRMYLKEIGKVPLLSSEDEIELAKKIEEGSNYAKKKLAEANLRLVVSIAKRYVGRGMLFLDLIQEGNLGLIKAVEKFDYRKGYKFSTYATWWIRQAITRAIADQARTIRIPVHMVETINKLIRIQRQLVQELGRDPLPEELSKQMDMPVDKVREILKIAQEPVSLETPIGEEEDSHLGDFIPDDDAPAPAEAAAFTMLKEQLINVLDTLTPREEKVLRLRFGLDDGRARTLEEVGKEFNVTRERIRQIEAKALRKLRHPSRSKKLKDYLD

SEQ ID NO: 38373 - protein, 713 aa, Agrobacterium tumefaciens str. C58
MARKPNSTSSITATIHDQQLIRGAGGELHQIATGDEPVLTTAQGAPVADDQNSLRIGPRGPLVVDDFHFREKIFHFDHERIPERVVHARGYGAHGYFETYDSLATHTKADLFQRAGERTPAFVRFSTVAGNKGSADLARDVRGFAVKLYTKEGNWDLVGNNIPVFFIQDAIKFPDLVHAAKQEPDRAFPQAQTAHDTFWDFISLTPESMNMVMWIMSDRTIPRSFRFMEGFGVHTFRFINAKEQSTFVKFHWKPKLGLQSVAWNEAVKINGADPDFHRRDLWTAIQSGNFPEWELQVQLFDQDFADSFDFDVLDPTKIIPEEILAPKPVGRLVLDRMPDNFFAETEQVAFMTQNVPPGIDFSNDPLLQGRNFSYLDTQLKRLGGPNFTHLPINAPKCPFAHFQQDGHMAMRNPTGRANYQPNSFGEGQRESPTRGFQHFAAEEQGVKARLRPESFADHYSQARQFYISQTPPEQRHIASALTFELSKVETVEIRERMVSHLLNIDETLATTVAQKLGLQTMPEPANTAIPTRQDLEPSPALSIVERGPKRFEGRKLGILITDGVDAKLLKGLTQAVTAEKAVFEFIAPKVGGVTASNGTLIEAHHMIDGGPSVLFDAVALLTSEAAIAELTEEATARDFVADAFQHCKFIGYDRSALPLLEIAGIADAMDEGVLPLPGEEGLAAFVAELGKLRVWAREPSLKLGKASVPVNKE

SEQ ID NO: 38374 - protein, 589 aa, Legionella pneumophila str. Paris
MTVARNRFDAVIIGAGGAGMRAALQMTNSGLKVALLSKVFPTRSHTVSAQGGITAALGNADEDDWRWHMYDTVKGADYIGDQDCIEYLCKTGPEAVYELEHMGLPFSRMDNGKIYQRQFGGQSKHFGGEQAARTCAAADRTGHALLHTLYQQNLKAKTHVFSEWYALDLVKNSQGRIAGVTAMCMETGEIVFFQTRVCILATGGAGRIFQSTTNAFINTGDGFGMALRAGIPLQDMEMWQFHPTGIAGAGVLVTEGCRGEGGYLINKDGERFMERYAPRVKDLASRDVVARAMALEIRAGKGFDPKGVDHVKLKLDHLGADLIMSRLPGIRELSMKFAGVDPIVEPIPVVPTCHYSMGGIPTNMHGQVITKTDGKEHVVEGLYAVGECACVSVHGANRLGGNSLLDLVVFGRAAGIHVEELWQSNQLPDMSYVSEDDVVASLVRYERWENSKDGESHAVIRDEMQRVMQEDFGVFRTGEVMASGLKRLQALRDRLAHAKLDDKSQIFNTERVEAMELDNLMATAYATALSAIARTESRGAHSREDYPKRDDANWIKHTLYFEEGEVIDYRPVNTSPKYVEPFEPKERVY

SEQ ID NO: 38375 - protein, 163 aa, Glycine max
MASPGGSGTYSSGSSSLQNSGSEGDRDIMEQRKRKRMLSNRESARRSRIRKQQHLEGLSAQLDQLKKENAQINTNISITTQMYLNVEAENAILRAQMGELSNRLNSLNEMISFINSTNNNCLMMFDEAQETTTQLFNDCGFMDYAWNGIPIMASADNEMLIMY

SEQ ID NO: 38376 - protein, 343 aa, Haemophilus somnus 129PT
MSKILLPTSTAGSLPKPVWLAEPEKLWSEWKCQGNELFQAKRDALLVSLAEQVAAGIDIISDGEQTRQHFVTTFIEHLEGVDFNKRKTVRIRNRYDANVPSVIGEVSRPSSVFVDDAKFLRKHTDKPIKWALPGPMTMIDTLYDAHYKSREKLAWEFAKILNEEAKELEAAGVDIIQFDEPAFNVFFDELNDWGVAALERAAEGLKCETAVHICYGYGIKANTDWKQTLGSEWRQYEESFPKLQQSKIDIISLECQNSCVPMELIELVRGKKVMLGAIDVATNIIETPEQVADILRKALQFVDAKNLYPCTNCGMAPLSRQVANSKLNALSQGAAIIRAELAG

SEQ ID NO: 38377 - protein, 432 aa, Haemophilus somnus 129PT
MTTSATLFSRAQQVIPGGVNSPVRAFKGVGGTPVFIEKANGAYIFDTEGKQYIDYVGSWGPMILGHNHPSILSAVLKTAENGLSFGTPTPLEIELAELICQLVPSIEMVRMVNSGTEATMSAIRLARGYTKRDKILKFEGCYHGHSDSLLVKAGSGSLTLGQPSSPGVPEDFAKHTITCEYNNLQSVKNAFEQYPDQIACVIVEPVAGNMNCILPKQDFLQGLRQLCNEYGSLFIIDEVMTGFRVALGGAQSYYEVTPDLTTLGKVIGGGMPVGAFGGKKEIMQYIAPTGPVYQAGTLSGNPIAMSAGIACLNELKKEGNEQRLAMLTKKLALGLKNLANQHNIPLVVNYVGGMFGIFFTTQNEVTSYQQAIQCDVEKFNLFFHKMLEQGVYLAPSAFEAGFMSLAHTDADIDRTLQAADIAFASLCSSSFS

SEQ ID NO: 38378 - protein, 592 aa, Zea mays
MGTLGDRLRAFSTNRWLVFVAAMWLQSMAGIGYLFGTISPVIKAALGYNQRQVAALGVAKDLGDCVGFLAGSLSAVLPSWAMLLIGSVQNFLGYGWLWLIVTRQAPALPLWMMCVLIYVGTNGETFFNTTALVTCIQNFPKSRGQTVGIMKGFAGLSSAILTQLYAVMHTPDHATLVFMVAVGPSLVAIGLMFIIRPVGGHRQVRPSDKNSFLFIYTICLLLASYLVGVMLVQDFMQLSDNVVNFLTVILLILLVLPIVIPVTLTLSSKTQHPIEEALLSDPSKGETSTSQEKEDQPEVILSEVEEEKPKDIDSLPPSERRKRIEELQTKLVQAAARGGVRIRRQPRRGENFTLVQALVKADFWLIWWSLLLGSGSGLTVIDNMGQMSQAVGFKDGHIFVSLTSIWNFLGRVGGGYFSEIIVREHTYPRHIALVICQILMAVGHFLFAMAWPGTMYVGTFLVGLGYGAHWAIVPAAVSELFGVKHFGAMYNFLTVANPAGSLVFSGLIASNLYDYEAEKQAQRRQITSLTSPRLFHSMGFLADGTLKCEGAVCFFVSSLIMSAFCVVGAGLSLIVVYRTRRVYTHLYGSNRT

SEQ ID NO: 38379 - protein, 404 aa, Triticum aestivum
MDSWTEPQLRKMEAGGNDRLNAFLTARGVPKDTPHIPKYNSNAAAAYRDRIVALAEGRAWTDPPVVKETPGSGAPAPARRPPLPAGVGGGGGGGGGGWDDWDDEVRPDMRRNQSAGSFAGAGADSGRQPTRSKSTQDIYTKQELEASAASKEDFFARRMAENESKPQGIPPSQGGKYVGFGSTPPPSANRNNNGAAQGDVMQVVSQGFGRLSLVAASAAQSAATVVQVGTKEIQSKMREGGYDQKVNETVNVVTNKTAEIGSRTWGIMKGVMALATQKVEEYAKEGGVGGGWGDDWQQREQQNNSNEPYRRYEQETSNGNGWNSPQDGSAKNQNHNSNSWDDWDDQDKKEEPAKTSQSSDSWAGWDDAKDDGFDSYSHHSPANKGGSNQNGTAGGSYWADGGFR

SEQ ID NO: 38380 - protein, 241 aa, Manihot esculenta
CNKLKLDKAERGDKASVDNTELLKWLDLWEPGSVIYACLGSISGLTSWQLAELGLGLESTNQPFIWVIREGEKSEGLEKWILEEGYEERKRKREDFWIRGWSPQVLILSHPAIGAFFTHCGWNSTLEGISAGVPIVACPLFAEQFYNEKLVVEVLGIGVSVGVEAAVTWGLEDKCGAVMKKEQVKKAIEIVMDKGKEGEERRRRAREIGEMAKRTIEEGGSSYLDMEMLIQYVSERSPSRA

SEQ ID NO: 38381 - protein, 144 aa, Xylella fastidiosa
LQQFGREATPEELAKEMDMPEDKIRKVMKIAKEPISMETPIGDDEDSHLGDFIEDPNVESPVDTTTNVNLSETVREVLAGLTPREAKVLRMRFGIDMNTDHTLEEVGKQFDVTRERIRQIEAKALRKLRHPSRSEQLRSFLDID

SEQ ID NO: 38382 - protein, 472 aa, GIBBERELLA ZEAE PH-1
MALNLTTSRRALSSLKPLTRAAFVGARGYATAEPDLKATLREAIPAKRELLKKVKAHSNKVLGEVKVENTLGGMRGLKAMVWEGSVLDANEGIRFHGRTIKDCQKELPKGKTGTEMLPEAMFWLLLTGQVPSVNQVRGFSRELAEKAQIPEFVSKMLNDFPKDLHPMTQFAMAVSALNYESKFAKAYEQGINKADYWEPTFDDCISLLAKLPTIAAKIYQNAYRGGGALPAEVDLEQDWSYNFAAMLGKGGKENENFQDLLRLYLALHGDHEGGNVSAHATHLVGSALSDPFLSYSAGLQGLAGPLHGLAAQEVLRWIIQMKEAIPSNYTEQDVNDYLWSTLNSGRVVPGYGHAVLRKPDPRFEALMDYAAARPEIANDPVFQLVEKNSRIAPEVLKKHGKTKNPYPNVDSSSGVLFHHYGFHETLYYTATFGVSRGLGPLAQLIWDRALGLPIERPKSINLEGILKQVEGQ

SEQ ID NO: 38383 - protein, 216 aa, Zea mays
MSKLQSESVKDAISQIVGDAKEKNRKFTETVELQISLKNYDPQKDKRFSGSVKLPHIPRPKMKVCMLGDAQHVEEAEKMGLDYMDVEALKKMNKNKKLVKKLAKKYHAFLASETIIKQIPRLLGPGLNKAGKFPTLVTHQESLESKVNETKATVKFQLKKVLCMGVAVGNLSMEEKQIQQNIQMSINFLVSLLKKNWQNVRCLYIKSTMGKPFRIF

SEQ ID NO: 38384 - protein, 599 aa, GIBBERELLA ZEAE PH-1
MMRRLSTRAPQRLISAASKSRSCAPLLAIRAISSTSVAKMSSLSTHATQPADAFQLLPESQKPGEAEDRLYEATVHEIEAWWASPRFAGIKRPYSAEDVATKRGTQKVQYPSSVMAQKLFNLIREREAKGEPIHTMGAIDPVQMTQQAPHQEVLYISGWACSSLLTSTNEVSPDFGDYPYNTVPNQVQRLAKAQNMHDRKQWDLRRKMTAEERTKTPYTDYLRPIIADGDTGHGGLSAVLKLAKLFAENGAAAVHFEDQLHGGKKCGHLAGKVLVPIGEHINRLVATRFQWDVMGCENLVIARTDSESGKLLSSAIDVRDHEFILGVADPSIEPLAETIQAMEAKGAAGAEIDAFEAQWVKNTKLITFDEAAVAHMKKEGVEQSKIDEYLAETDKDHDMGISRRRGLANKYTKEPVYFNWDVPRTREGFYHYRAGMQAATKRALAFGPYADLLWVETGDPNVQVASKLGRAVREVYPGKGLVYNLSPSFNWMAHGFTDETLKSFIWDIAREGFVLQLISLAGLHSNATITTELSREFKKDGMKAYVDIVQRREKDLKCDVLTHQKWSGASYIDGILGAIQSGSSSSKSMGEGNTEGQFH

SEQ ID NO: 38385 - protein, 442 aa, Xylella fastidiosa Ann-1
MSTLTLPSDLRLPVTVFSGFLGAGKTTLLNRLLNNRDGLRVAVIVNDMSEVNIDAQLVRDGGAALSRTDETLVEFSNGCICCTLRDDLSKEVKRLALEQRYDYLLIESTGIGEPMPVAATFAVRDADGFCLSDVARLDTMVTVVDGSQFTALFSSMNTLADLGQQADSDDTRSLADLLGQQIEFADTIVISKCDLIDATQLARVRAVVRGLNRDAQIIEAHLGEVPLPQLVGTGRFDFTRAQLAPGWMRELRGEHTPETEEYGVTSFVYRARRPFHPLRFNHLLAHGLSGVIRSKGFFWLASRMDWVGELSSVGSATRTQAAGFWYAARHRVDVHEENMPPQIGIAPLPYTELGWQRQQNDCWTAPLPAPHEVSDPGEYVAMQRLWHPQWGDRRQELAVIGLDMDKDVARNELDACLLSNEELRMGPMYWSALPDPFPQWRR

SEQ ID NO: 38386 - protein, 253 aa, Zea mays
  misc_feature (117)..(117): Xaa can be any naturally occurring amino acid
  unsure (1)..(253): unsure at all Xaa locations
MEDERNTQQHQGGEAQQDAADQVDVKDRGLLDSLLGRKKHDDDQEKKKQTDELATGMEKVTVSEPEKHGHKEEEHEVVGEKKEGLLAKLHRTSSSSSSSSDEEEEATRPRPWRRMPXHQEEAHRPHVVPTPAPPPPPHVHQHDHGVVVQDDVKTGTPPHAPEEEKKGLLDKIKEKLPGGHNKKPEAAAAAAPAPPVHAPAPAPQAENVSSPDGKEKKGGLLGKIMDKIPGYHKSSAEEADHKADAAGEHRTSS

SEQ ID NO: 38387 - protein, 424 aa, Deinococcus radiodurans R1
MESGRFITPTQGKETSRLPGMTTTTDVPASGVSLSERLRQDLAGLRESGLLISPRVLDAPQRARTRVDGREVVNLASNNYLGFADHPRLKERAAQYLQQWGVGAGAVRTIAGTLRIHEDFERQLADFKHTGSALVLHSGFSTNQGVLGGLLREGDLVVSDELNHASIIDGLRLTKATKKIYKHADPADLDRVLRENPSEGLKLVVTDGVFSMDGDVAPLDKLVEVARRYGAVTYVDDAHGSGVMGEAGRGTVHHFGFEYADDVIQVGTLSKAWGGVGGYAAGHPDLRELLINRARPYLFSTAQPPAVVGALAAALDEVQRDPSLMERLWDNTRFFKAELGRLGFDTLGSVTPITPVVFGEASAAFEASRRLFDLGIFAVGLGFPTVPRDLARIRNIVTAEHTRDDLEQALSAYQQVGRDLGVIA

SEQ ID NO: 38388 - protein, 589 aa, Glycine max
MSSASLKEMRNGGEDYSNGHGGGGVRDLYGEDCATEDQLITPWTFSVASGCSLLRDPRYNKGLAFTEGERDAHYLRGLLPPAIFNQELQEKRLMHNLRQYEVPLHRYMAMMDLQERNERLFYKLLINNVEELLPVVYTPTVGEACQKYGSIFRRPQGLYISLKEKGKILEVLKNWPEKSIQVIVVTDGERILGLGDLGCQGMGIPVGKLSLYTALGGVRPSSCLPITIDVGTNNEKLLNDEFYIGLKQKRATGQEYAELLEEFMHAVKQNYGEKVLIQFEDFANHNAFDLLEKYSSSHLVFNDDIQGTASVVLAGLLASLKLVGGTLVDHTFLFLGAGEAGTGIAELIALEISKQTKAPVEETRKKIWLVDSKGLIVSSRLESLQQFKKPWAHEHEPVKSLLDAVKAIKPTVLIGSSGAGKTFTKEVVETMASLNEKPLILALSNPTSQSECTAEEAYTWSKGKAIFASGSPFDPVEYEGKLFVPGQANNAYIFPGFGLGLIISGAIRVRDEMLLAASEALAAQVSQENYDKGLIYPPFSNIRKISAHIAAKVAAKAYDLGLASHLPRPKDLVKYAESCMYSPGYRSYR

SEQ ID NO: 38389 - protein, 82 aa, Orchidantha longiflora
CITTKELGTVMRSLGQNPTEAELQDMINEVDADGSGTIDFPEFLNVMARKMKDTDSEEMKEALRVFDKDQNGFISAAELHHV

SEQ ID NO: 38390 - protein, 83 aa, Orchidantha maxillarioides
CITTKELGTVMRSLGQNPTEAELQDMINEVDADGSGTIDFPEFLNLMARKMKDTDSEEELKEAFRVFDKDQNGFISAAELRHV

SEQ ID NO: 38391 - protein, 386 aa, Parachlamydia sp. UWE25
MSEVLFEITKESLETGLRGYPVGYCTTSSVDPVKGLFYAGHPVSEIDQWEPEQVIYLLYHGYVGKPEEVSRFSQDLLIRANCSTALIESIEKLPRNIHPMKLFSIALLLASGFEGKNDYHEDYLNLIAKVPEIAATVINHHAGWGKTKQSQPQLGYMENFTQMLNVPDANQQELARAFKFFNVLHYDHGGGNLSAFVGKAVASGLEDLYGSMSAAMCALAGPRHGKANQDCLTFVHQLVEELGEHSTEEELERLIRAHLDKGELIFGFGHAVLRVEDPRATLLYEVTNQYYASHALVKMAQLLRKVGSKVLQNNPKISDPYPNVDAISGILLTAAGFPCSEYYTVLFGLARVVGIGRQIVYERKEAREGKGTPIVRPKYFFKENKQ

SEQ ID NO: 38392 - protein, 766 aa, Photobacterium profundum SS9
MTITTENKTVTHILGYPRVGSQRELKFAQEKYWRGEIEQNELKEVGSLLRHRHWGDQVGAGLDYVSVGDFAWYDHVLNTSMLLGHIPKRHDNGFPDLDTLFRIARGKAPTGCSCAASDMTKWFNTNYHYIVPEFTEDDQFNVSWQQLFGEVAEAKKAGHKVKPVLLGPVSYLWLGKEKEEGFDRLSLLPRLLAAYQKILSKLEALGVEWVQIDEPVLALELPKPWAESFKLAYQVLNGNTKLLLTTYFDNITHHLDKIVELNIDGLHVDLSAAPEQLNAVVDALPENWVLSAGVVNGRNVWRADLSHVLDVLQPVKAKLGQRLWVGSSCSLLHSPIDLDLETDLSPEVRQWLSFAKQKCREFLVAQALDGNAIAIQECAKYSAPIKARATSALVNNPDVRQRTNAITAALAERTAPYAERTRQQRAALNLPLLPTTTIGSFPQTNEIRTQRRDFKAGYLTEADYNTALKGHIADAIQRQEDLDLDVFVHGEAERNDMVEYFAELLEGFAVTRFGWVQSYGSRCVKPAVIVSDIYRAKPMTVEWTTYAQSLTDKLVKGMLTGPVTILGWTFPREDLPRQGIANQIALALRDEVSDLQAAGIKIIQIDEPAIREGLPLKESQWQAYLDWAVNAFKISAASAEPQTQIHTHMCYSEFNHIIKSVAALDADVITIETSRSDMELLKAFEEFDYPNEIGPGVYDIHSPNIPSIEQIVHLVEKAETLIPIERLWINPDCGLKTRNWEETEAALRSMVEATKKLREQWQEKAV

SEQ ID NO: 38393 - protein, 349 aa, Desulfotalea psychrophila LSv54
MGTLNILVTGGAGYIGSHTCLELLEAGYEVTVVDDLSNSCYEALSRVEALTGKKITFHQVNVLDQQALDAVFVSSKKPFAAVIHFAGLKAVGESVAKPLHYYHNNVTGTLVLCDLMAKHGVKNIIFSSSATVYGDPATVPITEDFPLSCTNPYGRTKLMVEEILADLHGADHEWNACLLRYFNPVGAHKSGRIGEDPNGIPNNLMPYIAQVAIDRLDFLSIFGNDYPTVDGTGMRDYIHVVDLAKGHVCAVKKVLEGQGITTYNLGTGRGYSVLEMVSAFSRTCGRDIAYKIVARRAGDIAECYADATKALDELDWLASLGLTEMCEDTWRWQKNNPTGYLGNREVSGS

SEQ ID NO: 38394 - protein, 769 aa, Mesorhizobium sp. BNC1
MSQIPVATLGVPRIGRRRELKFALEAYWGGESSEGELLAAAAKIRAENWSLQKAAGASIIPSNDFTLYDHVLDMAVTLGAIPEIYGWAGGAVPLDTYFAMARGSQEREACGHSHHDGTGVPALEMTKWFDTNYHYMVPEFDADQTFRLASLKPVEEFDEAKRQGIHTRPVLLGPVSFLKLGKRRDGGDPLELLPRLVPVYAELLGKLLRAGADWVQIDEPCLVLDLTERERRAFTIAYDALAATGGPKLMLATYFGGLGDNLPTAAALPVAGLHLDLVRAPDQLQDVLSAAPEERVISLGVVDGRNIWRTDIAALLDRLGPIVKGNPGRFQLAPSCSLLHVPLDLSIETGVDPELRSWLAFAVQKVEELSILSHALSADRSLVQSLIDMASRALAVRASSTRVNDPHVAGRLSAVTPEMAKRSEPFSERRKLQQERLNLPAFPTTTIGSFPQTAEVRQARAACAKGELSEAGYDGFLKGETEKAIRWQEEIGIDVLVHGEFERNDMVQYFSEQLSGYAFTKQGWVQSYGSRCVRPPIIFGDVSRPQPMTVDWATYAQSLTDKPVKGMLTGPVTMLQWSFVRDDLPRETVCRQIAFALRDEVSDLEAAGIGVIQIDEPALREGLPLREAERPAYLDWAVECFRLASSGVKPETQIHTHMCYAEFNDIIDAIAAMDADVISIETSRSKMELLRAFRAFRYPNDIGPGVFDIHSPRVPPADEMADLLRKAEDGLDPRQIWVNPDCGLKTRKWEEVRFALANMVEAARQMRAG

SEQ ID NO: 38395 - protein, 410 aa, Psychrobacter arcticus 273-4
MTAFIINRLQASLDALVAAKQYRQIPNLQHHERYVISEDKRLLNIASNDYLGLGGDKQLQSEFLNQLSQLPVDNVPRMSATSSRLLTGNDTQLQALESELQSWYQNAVDKQNLASSKSVLVFNSGYHANIGLLPALTALPIKTIILADKLVHASIIDGIRLSQSKLVSYHRYRHNDYEHLAKFIEQADSSVERIIIVTESIFSMDGDRADLAQLVQLKAKDTRIELYIDEAHAIGILGDTGLGLAEETQTLADIDYLVGTFGKAFASIGAYIMCDEVVKQWLINQMRPLIFSTALPPINHAWTRFILAKMPSLTEQRLHLAQLSTTLSDAIPERYRVSSTQQKAGYNSPIVPYILGDNALTVEKAKQLQAAGFYALPIRPPTVPANTARIRLVMNAALSHEDCQRLIAHL

SEQ ID NO: 38396 - protein, 501 aa, Xylella fastidiosa 9a5c
MLLWLASVKEAFFMSERQRRTRILATLGPATDPPGVLDALFKAGVNVVRLNFSHGDASDQARRAAEVRAAAAHVGVEIGILADLPGPKIRIGRFTEGKVRLVADARFDLLADSNAPLGDATQVGVSYLGLPQDVAAGDVLLLDDGLMQLQVVQVQGARIVTTVLNDGVLSDRKGLNKQGGGLSLGALTDRDRELIGIVSRMGVDFIAVSFCRHAEEMHEARRIARECGCDAALVSKIERAEAIVNLAEIVAASDVVMVARGDLGVEIGDAQLPGLQKKIIKEALLQNKVVITATQMLQSMVESPMPTRAEVLDVANAVIDGTDAVMLSAETATGDYPVKAVEAMARICLGAEHQFEFDTDYEMAQRNLQRADHAIAMATMFLSEHICLGGVVALTESGTTPRFLSRFRSHVPIYAFTRHEDVRRRMVLMRGVFPMRFDSRGLTPREAARATIRLLVECGCMSPGDRVVFTSGEHMETLGATNTLRLLEVGADGGVSGLWEL

SEQ ID NO: 38397 - protein, 905 aa, Azotobacter vinelandii
MLTLLPSCLLALVLGIYFTWQQLAEMHGNLVGRGQLIVSQLAPLAAPALAQNYHNRLQRIANRVLDQTDIRAVSFLDSELGTIVHAGPSLNGPLPPQDPTQLTMVRDNSATHLLMPVLGYHQNLASGSNDRDDHLLGWIALEISHHNALLQGYRNLLASLLLILSVLLVSAFLALRVGRSISDPLRRIQQGVSQLRDGHLETRLPSLRSHELDELAAGINRMAEVMQHAQEEMQNSIDQATEDVRQNLETIEIQNIELDMVRREALEASRIKSEFLANMSHEIRTPLNGIIGFTNLLQKCELTPRQHDYLNTIQKSADSLLDIINEILDFSKIEAGKLVLEHTPFNLRELIQDTLTILAPAAHAKHLELVSLIYRDTPLALNGDPQRLRQVLTNLISNAIKFTNEGTIAVRAMVEDIGEEFAQLRISVHDTGIGLSQEDLNALFQAFSQADNSLTRQAGGTGLGLVISKRLIEQMGGEIGVNSVPGEGSEFWIRLSLPLDDHSEDEPPTALHGHRVALLEQHELARQSIQHQLEDCGLEVQPFAELDSLLAGVAAARQEERPVGLAVLGVTSRDTSAEELAQRIADLERLGCKCLVLCPTTEQMFYQEVLPEAQIQLQSKPAHRDKLQAALGELLTPQPTGSQTLGPLGNRAPRLLCVDDNPANLLLVQTLLGDMGAAVTVADSGHAAVEAAQRERFDLIFMDVQMPGMDGRQATRAIRQWEAGQPEQRHTPIIALTAHALANERRALLQSGMDDYMTKPINERQLAQVVHKWTRLHLRSPGAQQVHEVQPASIGHLSVLDSEEGLRLAAGKPDLAADMLSMLLASLDADRQAIHQARRDGDRAALIERVHRLHGATRYCGVPQLRAACQHSETLLKQHAPAADTALDELDAAILRLAGEAKFGA

SEQ ID NO: 38398 - protein, 334 aa, Xylella fastidiosa 9a5c
MSIEQLAETAQAMVASGKGIIAIDESAGTIAKRFSSVGIENIEENRRAYRELLLTTPKLSDYISGAILFDETIRQSTKAGVPFPKYMADHGIIPGIKVDKGAYPLAGCPGELVTEGLDGLRARLEEYYKLGARFAKWRAVINIGDDIPSGMCIDANVHALARYAALCQEQGLVPMVEPEVIMDGNHDISAAYEVTEATLRSLFNALYEQNVVLEGTILKASMVIPGTDCEEQASIDEVAESTVMCLKSTVPAILPGIVFLSGGQTDAQSTAHLNAMNQLDPLPWPLSFSYGRAMQQAALKLWSQDMKGNFAKAQQVVYERAKENGLAALGKWKG

SEQ ID NO: 38399 - protein, 451 aa, Staphylococcus epidermidis RP62A
MANTRELNHKDAQYVWHPFTQMGVYAKNDNIIIEKGRGSYLYDTEGNKYLDGYASLWVNVHGHQHKKLNKAIHKQLDKIAHSTLLGSSNIPSIELAEQLVKLTPDRLQKVFYSDTGSASVEIAIKMAYQYWKNIDAERYAKKNKFLTLHHGYHGDTIGSVSVGGIDSFHKIFKDLIFENIQIETPCLYKSKYRNEAEMLNSILNQIENILSERNDEIVGFILEPLIQGATGLFVHPHGFLKAVEQLCRKYDVLLICDEVAVGFGRTGEMFACNHEDVQPDIMCLGKAITGGYLPLAATLTSQKIYDAFLSQSHGKNTFFHGHTYTGNQLVCSVALENINLFKKKHLIGHIQKTSQTLKQRLEALQPHKNIGDIRGRGLMYGVELVENKSTQTPLDIPTVELIIRRCKENGLMIRNLENVITFVPILSMSNKEIKKMVKIFNKALHQTLGKK

SEQ ID NO: 38400 - protein, 590 aa, Asparagus officinalis
MCGILAVLGCSDDSQAKRVRVLELSRRLKHRGPDWSGLCQHGDCFLSHQRLAIIDPASGDQPLYNEDKSIVVTVNGEIYNHEELRRRLPDHKYRTGSDCEVIAHLYEEHGEDFVDMLDGMFSFVLLDTRNNCFVAARDAVGITPLYIGWGLDGSVWLSSEMKGLNDDCEHFEVFPPGNLYSSRSGSFRRWYNPQWYNETIPSAPYDPLVLRKAFEDAVIKRLMTDVPFGVLLSGGLDSSLVAAVTARHLAGSKAAEQWGTQLHSFCVGLEGSPDLKAAKEVAEYLGTVHHEFHFTVQDGIDAIEDVIFHIETYDVTTIRASTPMFLMARKIKSLGVKMVISGEGSDEIFGGYLYFHKAPNKEEFHHETCRKIKALHQYDCLRANKATSAWGLEARVPFLDKEFMDVAMSIDPESKMIKPDLGRIEKWVLRKAFDDEENPYLPKHILYRQKEQFSDGVGYSWIDGLKAHAAKHVTDRMMLNAARIYPHNTPTTKEAYYYRMIFERFFPQNSARLTVPGGPSIACSTAKAIEWDARWSNNLDPSGRAALGVHDSAYDPPLPSSISAGKGAAMITNKKPRIVDVATPGVVIST

SEQ ID NO: 38401 - protein, 451 aa, Saccharomyces cerevisiae
MLRTRLTNCSLWRPYYTSSLSRVPRAPPDKVLGLSEHFKKAKNVNKIDLTVGIYKDGWGKVTTFPSVAKAQKLIESHLELNKNLSYLPITGSKEFQENVMKFLFKESCPQFGPFYLAHDRISFVQTLSGTGALAVAAKFLALFISRDIWIPDPSWANHKNIFQNNGFENIYRYSYYKDGQIDIDGWIEQLKTFAYNNQQENNKNPPCIILHACCHNPTGLDPTKEQWEKIIDTIYELKMVPIVDMAYQGLESGNLLKDAYLLRLCLNVNKYPNWSNGIFLCQSFAKNMGLYGERVGSLSVITPATANNGKFNPLQQKNSLQQNIDSQLKKIVRGMYSSPPGYGSRVVNVVLSDFKLKQQWFKDVDFMVQRLHHVRQEMFDRLGWPDLVNFAQQHGMFYYTRFSPKQVEILRNNSFVYLTGDGRLSLSGVNDSNVDYLCESLEAVSKMDKLA

SEQ ID NO: 38402 - protein, 917 aa, Neisseria meningitidis Z2491
MRHLRYIYSIYGNERKIMQLHILNNPKDAALAADAEFLKQSLFNLLHEEASPLVVETVKLLSTSDDSAALIEKVLPQLDEQQTHDLTLACGLFAQILNIAEDVHHERRRQIHEEAGRGGAEGSLTETVRRLKAGKADGKSVQRQLDNTSVTAVLTAHPTEVQRQTVLNFNRRIRALLPQRERCTNADALARLRREIDTILLGLWQTSETRRHKLSVNDEINNGVSIFPMSFFEALPKLYRKMEHDFQTAYPDVRVPDILKIGGWIGGDRDGNPFVSAETLRFAFRRHADAVFRFYRGELDKLYRELPLSIRRVKVNGDVMALSDKSPDEETARAEEPYRRAIAYIMARAMGKARALGLGMGCKFGFLEPYASAQEFLDDLKKLQHSLIDNGSRLLAEGRLADLIRSVSVFGFHMMPLDLRQHAGKHADVVAELFQHAGLEDYNSLNEEQKQAALLRELSHQRPLYSPFITYSDHTRHELAIFNEARKIKDEFGEDAVTQSIISNCEQPSDLLALALLLKETGLLAVENGKPKSRINIVPLFETIEALENACPVMETMFRLDWYGALLESRGNIQEIMLGYSDSNKDGGYVTSSWCLYQAELGLVELFKKYDVRMRLFHGRGGSVGRGGGPSYQAILAQPAGSVAGQIRITEQGEVITAKYADPGNAQRNLETLVAATLEASILPDKKDPDAKLMQDLSDVSFKYYRELITHPDFIDYFLQTSPIQEIATLNLGSRPASRKTLARIQDLRAIPWVFSWMQNRLMLPAWYGFGSAVETLCEGNPDTLAALREHAQSNPFFQAMLSNMEQVMAKTDITLAENYAGLSESPDKAKVIFGMIKEEYRRSRKALLDLLQTEELLRDNRSLARSLALRIPYLNALNGLQVAMLKRLRKEPDNPHALLMVHLTINGVAQGLRNTG

SEQ ID NO: 38403 - protein, 534 aa, Streptococcus agalactiae NEM316
MTKYIFVTGGVVSSIGKGIVAASLGRLLKNRGLKVTIQKFDPYINIDPGTMSPYQHGEVYVTDDGAETDLDLGHYERFIDINLNKYSNVTTGKIYSEVLKKERRGEYLGATVQVIPHVTDALKEKIKRAATTTDSDVIITEVGGTVGDIESLPFLEALRQMKADVGSDNVMYIHTTLLPYLKAAGEMKTKPTQHSVKELRGLGIQPNMLVIRTEQPAGQSIKNKLAQFCDVAPEAVIESLDVDHIYQIPLNMQAQNMDQIVCDHLKLETPAADMTEWSAMVDKVMNLEKKVKIALVGKYVELPDAYLSVVEALKHSGYVNDVAIDLKWVNAAEVTEDNIKELVGDADGIIVPGGFGQRGSEGKIEAIRYARENDVPMLGVCLGMQLTCVEFARNVLKLHGANSAELDPKTPFPIIDIMRDQIDIEDMGGTLRLGLYPCKLKAGSRAAAAYNNQEVVQRRHRHRYEFNTKFREQFEAAGFVFSGVSPDNRLMEVVELPEKKFFVAAQYHPELQSRPNHAEELYTAFVTAAVENMK

SEQ ID NO: 38404 - protein, 455 aa, GIBBERELLA ZEAE PH-1
MEGRKVPRVPELSTEGPSSAGFKTYSAAVSADRISLVSGHLSHQTSSYNAASPALSSATQARSLSTTTANMSSQPEHATLLIPGPIEFDDDVLKSMGHYSESHVGPGFVNTFGETLSMTRKLFQSTDPSAQPYIISGSGTLGWDIVAANLVEAGEDALVLSTGYFGDGFADCLRAYGANVTKLDGEVGGRPQLPEIEKALSEKKYKILTVTHVDTSTGVLSELKNLAATVKRVSPETLVIVDGVCSVACEEIAFDEWGLDGVVTASQKAIGVPAGLSISFFSGRAVAAALENRKTPIPAYFASMKNWTPIMKNYEAKKPSYFATPSPQLVHALHTSLTQILSKPLSERFQGHIEVSNKVKKAITDLGLKIVATKPEDQAHAMTAIYLPEGVGAPDVLPKLAGKGVVFAGGIHKAIASKYIRFGHMGVSALDPSRNHMEKAINALKESLFEAGYKA

SEQ ID NO: 38405 - protein, 516 aa, Arabidopsis thaliana
MAFTNVCLWTLLAFMLTWTVFYVTNRGKKATQLADAVVEEREDGATDVIIVGAGVGGSALAYALAKDGRRVHVIERDLREPERIMGEFMQPGGRLMLSKLGLEDCLEGIDAQKATGMTVYKDGKEAVASFPVDNNNFPFDPSARSFHNGRFVQRLRQKASSLPNVRLEEGTVKSLIEEKGVIKGVTYKNSAGEETTALAPLTVVCDGCYSNLRRSLNDNNAEVLSYQVGFISKNCQLEEPEKLKLIMSKPSFTMLYQISSTDVRCVFEVLPNNIPSISNGEMATFVKNTIAPQVPLKLPGISGSTHASGEHIKAMPTKKMTATLSEKKGVILLGDAFNMRHPAIASGMMVLLSDILILRRLLQPLSNLGNAQKISQVIKSFYDIRKPMSATVNTLGNAFSQVLVASTDEAKEAMRQGCYDYLSSGGFRTSGMMALLGGMNPRPISLIYHLCAITLSSIGHLLSPFPSPLRIWHSLRLFGLAMKMLVPHLKAEGVSQMLFPVNAAAYSKSYMAATAL

SEQ ID NO: 38406 - protein, 202 aa, Thermosynechococcus elongatus BP-1
MPYHLEAWCIYVDRTPELRQHINLEHLRHMGGKRNAELLPELLGRSLSAAEIERWGAGKEAVFRELLAPHLELLPGLLPFLKSAKEKGYRLGLGTSACAANVELVLSCEGVGHFFDTVVMEQDVQRGKPDPECYLLVAERLQVVPQYCLVFEDAVAGVMAAVQAGMLCWGVLTTQSAMTLQAAGAEVCIEDFTDPRLQRLLS

SEQ ID NO: 38407 - protein, 229 aa, Zea mays
  misc_feature (188)..(188): Xaa can be any naturally occurring amino acid
  unsure (1)..(229): unsure at all Xaa locations
MAMVDEPLYPIAVLIDELKNEDIQLRLNSIRRLSTIARALGEERTRKELIPFLSENNDDEDEVLLAMAEELGVFIPYVGGVEHAHVLLPPLETLSTVEETCVRDKAVESLCRIGAQMKENDIVDYFIAVVKRLAAGEWFTARVSSCGLFHIAYPSATDPLKTELRTIYGQLCQDDMPMVRRAAASNLXGKFAATVEQSHLKTEIMSIFDDLTQDDQDSVRLLAVEGWAA

SEQ ID NO: 38408 - protein, 368 aa, Haloferax volcanii
MSVLQRDPQDRVRVLDEDGTVVGEVPDIDDETLVEMYRYMRLARHFDTRAVSLQRQGRMGTYPPLSGQEGAQIGSAIALDEQDWMVPSYREHGASLLRGLPLKQTLLYWMGHEKGNEMPEGVNLFPPAVPIASQIPHATGAAWAKKLRGEDDTAVICYFGDGATSEGDFHEGLNFAGVFDTPNVFFCNNNQWAISVPRERQTASETLAQKATAYGIDGVQVDGMDPLAVYSVTKAALDKAKNPGEGEGRPTLIEAVQYRFGAHTTADDPTVYRDDEEVEKWKAKDPIPRLEAFLRETGRIDDEGVEAIEEDVKGRVADAIEAAESDPRPDPSEMFNHAYAERTPEIQAQYEEFEALREKFGDEGFLRE

SEQ ID NO: 38409 - protein, 419 aa, Streptococcus pyogenes MGAS10394
MKDVIYDVEEVPKAGMLVGLSFQHLFAMFGATVLVPILVGIDPSVALLSSGLGTLAHLSVTKFKIPAYMGSSFAYIAAMQLLMRTNGIGAVAQGAMTGGLVYLIVALIVKAIGNDWIDNILPPIVVGPTVMVIGLSLASTAVNDVMLKNGNYNLTYLVIGLVTLLSVIFFNIYGKGIVAIVPLLLGLLVGYVVALLVGVLTGQEIVDFTNVAQAKWFSIPSVEIPFLTYGVKFYPSAILTMAPIAFVTMTEHFGHIMVLNSLTKRDYFKDPGLEKTLTGDGFAQIIAGFLGAPPVTSYGENIGVMALNKIFSVYVIAGAAVIAALLSFIGKVSALIQSIPTPVIGGISVALFGVIASSGLKILIESKVDMDNKKNLLIASVILVSGIGGLMLQVNGLQISGVAFSTLLGIILYQVLPEK

SEQ ID NO: 38410 - protein, 73 aa, Eleusine indica
MSCSCGSSCNCGSSCKCGKMYPDLEEKSTGAQATVVLGVAPEQKLQFKAATESGETAHGCGCGSSCKCNPCNC

SEQ ID NO: 38411 - protein, 359 aa, Mycobacterium bovis AF2122/97
MATHQVDAVVLVGGKGTRLRPLTLSAPKPMLPTAGLPFLTHLLSRIAAAGIEHVILGTSYKPAVFEAEFGDGSALGLQIEYVTEEHPLGTGGGIANVAGKLRNDTAMVFNGDVLSGADLAQLLDFHRSNRADVTLQLVRVGDPRAFGCVPTDEEDRVVAFLEKTEDPPTDQINAGCYVFERNVIDRIPQGREVSVEREVFPALLADGDCKIYGYVDASYWRDMGTPEDFVRGSADLVRGIAPSPALRGHRGEQLVHDGAAVSPGALLIGGTVVGRGAEIGPGTRLDGAVIFDGVRVEAGCVIERSIIGFGARIGPRALIRDGVIGDGADIGARCELLSGARVWPGVFLPDGGIRYSSDV

SEQ ID NO: 38412 - protein, 450 aa, Streptococcus mutans
MTKQYDYIVIGGGSGGIASANRAAMHGAKVILFEGKQVGGTCVNVGCVPKKVMWYGAQVAETINNYAADYGFDVTTQTFHFDALKQNRQAYIDRIQDSYERGFDSNGVERVYSYATFVDAHTVEVAGEHYTAPHILIATGGHALLPDIPGSEYGITSDGFFELDAIPKRTAVVGAGYIAVEISGVLHALGGETHLFVRRDRPLRKFDKEIVGTLVDEMKKDGPHLHTFSVPKEVIKNTDNSLTLILENGEEYTVDTLIWAIGRAANTKGFNLEVTGVTLDSRGFIATDAFENTNVEGLYALGDVNGKLELTPVAVKAGRQLSERLFNHKPQAKMDYKDVATVIFSHPVIGSIGLSEEVALDQYGEENVTVYRSTFTSMYTAVTSHRQACKMKLVTVGEDEKIVGLHGIGYGVDEMIQGFAVAIKMGATKADFDNTVAIHPTGSEEFVTMR

SEQ ID NO: 38413 - protein, 409 aa, Alkaliphilus metalliredigenes QYMF
MWYWIGCITPVGVGKEQFWSSLINGVSGVSEITRFDASELPTKIAAVVKDFDGEDYIDKKELRKMDRFTQFAVAASQLAIEDSGCNLEEIVQERFGVVLGSGIGGIETLEAQKEKMLEKGAKRVSPFFIPMMISNMGSGYISMILGAKGPNTTVVTACASATNAIGEAFKIIQRGDADMMMTGGAEASITPLAMAGFCSMKAMSTRNEEPEKASRPFDKDRDGFVMGEGSGMLLLEDLDHALKRGAKIYGEVVGYGMSADAYHITSPAPGGEGAARAMQNALNDAKANPEEIDYINAHGTSTPYNDQFETMAIKTVFKEHASKLCISSTKSMTGHLLGAAGGIEAMACVLAIQEGVIPPTINYTTPDPECDLDYVPNIARNREVNYALSNSLGFGGHNATVLFKKYRGQ

SEQ ID NO: 38414 - protein, 456 aa, Haemophilus somnus 129PT
MTKHYDYIAIGGGSGGIASINRAASYGKKCAIIEAKYLGGTCVNVGCVPKKVMFYGAQVAEAITKYAPDYGFDVTLNHFDFAKLVESRQAYIDRIHTSYNNVLAKNNVDVLNGFAKFFDAKTIEVSYANGEKELVTADHILIATGGRPSRPTIPGAEYGIDSDVFFALTELPKRIAVVGAGYIAVELAGVVNSLGAETHLFVRRQTPIRSFDPLIIETLVEVMKQDGIQLHTQAIPQEIIKNADNSLTIKLEDGRTQDVDCLIWAIGREPATDVINLASTGVETNERGFIKVDKYQNTNVEGIYAVGDIIEGGIELTPVAVAAGRRLSERLFNNKPDEHLDYHLVPTVVFSHPTIGTVGLTEPKAIEQYGAEAVKVYTSSFTPMYSAVTSHRQPCRMKLVCVGKEEKIVGLHAIGFGVDEMIQGFAVAIKMGATKADFDNTVAIHPTGSEEFVTMR

SEQ ID NO: 38415 - protein, 459 aa, Xanthomonas campestris pv. campestris str. ATCC 33913
MSDPSAPDHLQRSLSNRHLQLIAIGGAIGTGLFMGSGRTISLAGPSILFVYLIIGVMLFFVMRAMGELLLSNLDYKSFIDFSTDLLGPWAGFFCGWTYWFCWIITAIADVIAIAAYAQFWFPELAPWVPAVLCVLLLLALNLVTVKLFGEMEFWFALIKIIAICALIITGAGLVMWGFRSPSGHVASLSNLWNDGGMFPMGIGGFFAGFQIAVFAFVGIELVGTTAAETADPQRNLPKAINSIPVRILIFYVLALIAIMAVTPWRQVVADKSPFVELFVLAGVPAAASLINFVVLTSATSSANSGIFSTSRMLYGLAEERNAPRGFAKLTRAAVPARGLLFSCICLLLGAMLVYLIPDLVTAFTLVTTLSAVLFMFVWSLILCAYIAYRRKRPEQHAASAFKMPGGVLMCYVCLAFFAFIIVLLTLQPDTLHALLVSPLWFLVLAIAYWVRRNQSPTAR

SEQ ID NO: 38416 - protein, 409 aa, Solanum tuberosum
MASVGLAPTSGLRESSGHNAGVDRLPEEMNDMRIRDDKEMEAAMVAGIGTETGHIIVTTIGGRNGQPKQTISYMAERVVGQGSFGVVFQAKCLETGETVAIKKVLQDKRYKNRELQTMRLLDHPNVVSLKHCFFSTTDKDELYLNLVLEYVPETVHRVIKHYNKLNQRMPLILVKLYTYQIFRALSYIHRTIGVCHRDIKPQNLLVNPHTHQVKLCDFGSAKVLVKGEPNISYICSRYYRAPELIFGATEYTTAIDVWSAGCVLAELLLGQPLFPGESGVDQLVEIIKVLGTPTREEIKCMNPNYNEFKFPQIKAHPWHKIFHKRMPPEAVDLVSRLLQYSPNLRCGALDALVHPFFDELRDPNTRLPNGRFLPPLFNFKAHELKNVHAEILLKLVPEHARKQCPSLGL

SEQ ID NO: 38417 - protein, 390 aa, Ralstonia eutropha JMP134
MAPRDPILGLNEAFNADTRATKVNLGVGVYFTDEGKIPLLRAVQEAEKARLTTATPRGYLPIEGIAAYDQAVQSLLFGKESPLITEGRVVTAQALGGTGALKIGADFLKRLYPTSKVAISDPSWENHRALFEAAGFEVVNYAYYDAPTHGLNFAGMVESLKSYPANTIVVLHACCHNPTGVDLSADQWKEVVALIKERNLIPFLDMAYQGFADGIDPDGAAVRLFADSGLPFFVSSSFSKSFSLYGERVGALSIVTTGKEEAQRVLSQVKRVIRTNYSNPPTHGGTVVATVLNSPELRAMWEEELAEMRDRIKLMRHALVDKLAAKGVKTDFSFVKAQRGMFSYSGLTSAQVDRLRNEHGIYAVGTGRICVAALNSRNIDAVVDAIAAVL

SEQ ID NO: 38418 - protein, 357 aa, Deinococcus radiodurans R1
MRPMKHFTPQDPTPRDLGFAMPPEWAPHEATWMGYPADDELWFGHLAGVRDEYAGLVRTIARFERVELLVRDEESERDARARLTGHNVRFHRVPLDDSWLRDSGPLFVTRGEKDPEVALVNWRFNAWGGKFEWENDNRVPEYVAQFLGMGHWDRPEVLEGGGLEIAGDGAALTTRSCFLTDTRNPGLSEEGYTFLLSDQLGVKKLHWLDGGLENDHTDGHIDTITRFAAENVIVTSVEADPNDANHAVMQRNLATLRELRTPGGDFYQIVELPLPAHRLEGAEGRLPPTYANFYIGNGFVVVPQYGDPNDKQALDVLRPLFPGREVIGVPSRKIIEGGGSFHCLTQQQPAGRVWSGE

SEQ ID NO: 38419 - protein, 162 aa, Boehmeria nivea
TSVYPREPESMKELREITAKHPWNLMTTSADEGQFLSMLLKLINAKNTMEIGVFTGYSLLANGLALPEDGKILAMDINRENYELGLPVIEKAGLAHKIDFREGPALPALDQMIEDGKYHGSFDFIFVDADKDNYLNYHKRLIELVKVGGVIGYDNTLWNGSV

SEQ ID NO: 38420 - protein, 166 aa, Zea mays
  misc_feature (52)..(52): Xaa can be any naturally occurring amino acid
  misc_feature (112)..(112): Xaa can be any naturally occurring amino acid
  misc_feature (128)..(128): Xaa can be any naturally occurring amino acid
  unsure (1)..(166): unsure at all Xaa locations
TTLNMATPFQHFSPEWQRAGRKIPYTEKGLYTQEALFIYMGNIRVRLYGINXTTGADPYYCMPCPTGIKPRHCDGIGCYSNWTSGMGMHLIVGSNIIEDGHSGKEDRSSGEXAQEVELVCLINIEEAXAYEPTVLYGSGSQLGTRNAMIMILQLIFAGMIVIRLQE

SEQ ID NO: 38421 - protein, 501 aa, Lactococcus lactis subsp. lactis
  misc_feature (70)..(70): Xaa can be any naturally occurring amino acid
  misc_feature (91)..(91): Xaa can be any naturally occurring amino acid
  misc_feature (128)..(128): Xaa can be any naturally occurring amino acid
  unsure (1)..(501): unsure at all Xaa locations
MTYVLGIDLGTSSLKGILMDEVGNLITTKSAEYQIDTPKQGYSEQRPEYWIVALESVLTGLSVEISDFGXQLAGISFSGQMHSLVVLDDNXKPVYPAILWNDVRTSKQCQEITDRLGQRLLEITKNIXLEGFTLPKILWLQENEPEVWSRVKKIMLPKDYLSLWLTGNIYTEFSDAAGTLLLDIEKKQWSEEITDAFNIDMEILPELIESTDRTGFVKAEIAERYKLTNEVKVFAGGADNAAAALGVGLINEEVGLISMGTSGVVSAYEPKIADYKGKLHFFNHTVPGAYYSMGVTLAAGNSLNWYKETFGKGLSFNELLSEVYTVSPGSEGLLFTPYIVGERTPHFDSKIRGSFIGISAHHEQKHFSRAVLEGITFSLRDSKDIMEKTKNKKFKRLISVGGGAQNPDIMQMQADIFNSEMIRLTVEQGPGLGACMIAAFGCGLFDSLEAVTKAFVHYKEASFIPNPKNVARYEQIYQIWKQVYKNTSEISHQLVQFNDEG

SEQ ID NO: 38422 - protein, 494 aa, Oryza sativa
  misc_feature (370)..(370): Xaa can be any naturally occurring amino acid
  unsure (1)..(494): unsure at all Xaa locations
MAESYHKEVIAGLKDKSLFIQEAFIDGQWVAKDNKFDVFEPSTATVLGQVANCALEDFQTAIKSADVAQTNYFDSTTGASRGALLRTWYDLVLANQEDLANILSLENGKTYSEALGEVLYSASFISWFAEEATRSYGVTIPSSAPHTTLMTVREPVGVCGIITPWNFPAAMITRKIAPALAAGCSVVIKPPSETPYSALAFTKLAIDAGLPPATIQVLPTRDRQAATELATNPLVKKISFTGSTGVGKYLAKLAAGTLKKLSLELGGNAPFIVFEDADLDLAAEGAMFCKFRCSGQTCVCANRLYVQKSVAKEFTAKLVEKVNALKMGSGLDKSTTQGPLVNKAAVDKVKEHIADATSKGAQIATGGSTXRSPGFFHQPTVLTGVTQEMAVAKDETFGPLAPIFEFDTEEDAIRLANDTEFGLAGYFFSKDISRVMRVAHKMQVGMVGANTGKISAAEAPFGGVKESGYGKEGSLYGMAEYQNIKSITIGNLNN

SEQ ID NO: 38423 - protein, 247 aa, Synechocystis sp. PCC 6803
MKKYIAEFIGTFWLVLGGCGSAVFAAFIAAPGGGNTNEFGLGYLGVALAFGLTVFTGAYALGHISGGHFNPAVSFGLWMGKRFPGSQLAPYIGAQVLGAIVASLFIFIVAQGGPNFSLDGSNPLATNGFGDHSPQGYGFLAALLIEFVLTFIFLIVILGVTDKTAPAGFAPAAIGLALTLIHLISIPITNTSVNPARSTGVALFCGNPALIGQLWLFWLAPIAGALLAGFVYHNVLEDLGRPEPEAE

SEQ ID NO: 38424 - protein, 338 aa, Vibrio cholerae O1 biovar eltor str. N16961
MKVLVTGGMGYIGSHTCIQMIQAGMTPVILDNLYNSKVTVLDRIEKVIGVRPQFVQGDIRDKALLVDLMQQHNIEAVVHFAGLKAVGESVQKPLEYYDNNVNGTLVLVAAMREAGVKSLVFSSSATVYGEPTSVPITESFPTKAANPYGRSKLMVEECLTDFQKANPDWSITLLRYFNPVGSHPSGELGEDPQGIPNNLMPFVTQVAVGRREYLSVFGSDYPTKDGTGVRDYIHVMDLADGHIAALKKVGTCAGLHIYNLGTGKGYSVLDVVKAFETASGRTVPYKLVDRRPGDIAEYWADPTKAAQDLGWKATRNLHTMAQDAWCWQSNNPQGYPEA

SEQ ID NO: 38425 - protein, 456 aa, Nicotiana tabacum
MASKIGTAGNRSGTTGMPSFISQIPVSNPMGTEANNTNTSRMSDFGVLEQYLGFRIGDGANVNRSPLFNSTSATNPAVGFEVSGTINRTLAPSNTSLPTATPRSQTMLLQSNLVSASGTHHENWGESNMADSGSRTDTSTDMDGDDKNQLIEAGQSSDKSKEKVLDQKTLRRLAQNREAARKSRLRKKAYVQQLENSRLKLSQLEQDLQRARQQGKYISNIADQSNGVGANGPLAFDAEYSRWLEEHNKHINELRTAVNAHASDPELRSIVNNVTAHFDEVFRVKGNAAKADVFHVLSGMWKTPAERCFMWIGGFRPSELLKLLVNQLEPLTEQQLAGIYNLQQSSHQAEDALSQGMEALQQSLAETLANGSPAPEGSSGDVANYMGQMAMAMGKLGTLEGFLRQADNLRQQTLQQMHRVLTTRQSARALLAINEYFSRLRALSSLWLARPREQLV

SEQ ID NO: 38426 - protein, 303 aa, Streptococcus agalactiae NEM316
MSNIVIIGSISMDLVMETNRIAKEGETVFGQRFSMVPGGKGANQAVAIGRLSQDRDNITILGAIGEDSFGPILLDNLNKNHVTTDFVGTIPSSSGVAQITLYNNDNRIIYCPGANGKVDTKKWSQEWSIIKEADLVVLQNEIPHQANMKIANFCKEHSIKLLYNPAPSRKTDIEMLDKVDYFTPNEHECQELFPNQKLEDILATYPEKLIVTLGTKGAIYSDGKESHLIPALETKAVDTTGAGDTFNGAFGYAISKKFKIANALRFATLAAHLSVQKFGAQGGMPTIKEMEDNQHYEKDWHIK

SEQ ID NO: 38427 - protein, 162 aa, Boehmeria nivea
TSVYPREPESMKELREITAKHPWNLMTTSADEGQFLSMLLKLINAKNTMEIGVFTGYSLLATALALPEDGKILAMDINRENYELGLPVIEKAGLAHKIDFREGPALPALDQMLEDGKYHGSFDFIFVDADKDNYLNYHKRLIELVKVGGVIGYDNTLWNGSV

SEQ ID NO: 38428 - protein, 198 aa, Triticum aestivum
MPQLAASPAAAAFAVAGGGRAGFRPPPRAPMRARAAAAASGAASAYTAMPAAQQQQPQPTFYDLLGISAEGSSFEDVRAAYRRMARKYHPDVSPPDAAKEHTRRFIQVQEAYETLSDPSRRSTYDRALARGVCRLAFSPAARRHDASAFYHQEQEEKSGWRTSWEGQISELKKRSTVKDAEENLSWGAQMRRRRAEQS

SEQ ID NO: 38429 - protein, 1115 aa, Mesorhizobium sp. BNC1
MNTMEKVASELMSPEEAEAVQVVPPAGPRPPDWYKDAVIYQLHIKAFHDSNGDGMGDFNGLMQRLDYVERLGVNTIWLLPFYPSPLRDDGYDIADYRSINPSYGTMRDFRRFVAEAHRRGIRVITELVINHTSDQHPWFQRARHAKKGSAARQFYVWNDDDERYPETRIIFLDTEKSNWTWDPVAGQFFWHRFYSHQPDLNFDNPRVLDAVIRIMRFWLDMGVDGLRLDAIPYLVERDGTNNENLPETHEILKKIRKALDEKYPDRMLLAEANQWPEDTRPYFGEGDECHMAFHFPLMPRIYMALAQEDRHPISDIMRQTPEIPESCQWAIFLRNHDELTLEMVTDRERDYLWRTYAEDVRARINLGIRRRLAPLMQNDRRKIELMNALLFSMPGTPIVYYGDELGMGDNIYLGDRDGVRTPMQWAPDRNGGFSRANPQMLYLPPIMDPVYGYQTINVEAQEADPSSLLNWVRRVIGVRKQHSAFGRGDFTMLYPRNRRILAYTRSDANETILCVANLSRSPQAVELDLSKYRNCVPIELVSQSPFPPIGDLPYMLTLTGYGTFWFVLASEAQAPEWHNNVPEPLPEFITLTMVDGRIERALEGRERRQLEQDVLPQFMQRQRWYGAKGEGIRSAGISDIAKLGDEGGLLTIVDVDLSVSGRQRYLLPLTVLWGEENVQFGAPKLSVTLARVRKGSRLGALIDGAYDDRFASELMRRMQENQEMQVPGGTLRFYGNEQLTAMHFEETPSPLMGEQSNVSVAFDRQVLLKIFRRLRPGDQPEVEVARFLTEVAGFRNTPAFLGMVEYEEQGARTVLASVSGFVENQGDAWGVFVHALERQIEDETLAPPAPAGATPAEGTTAQLLYPLDLLRRLGERTGEMHAALAIETDMEAFRCEPIRRADIASWVKDLKQQAASARAALERNKDRLPLNIRESVEHLLSLRQRIDRRISEFGKITPSGKKSRIHGDYHLGQVLVSKQDLYIIDFEGEPRRSLEERRGKSSPLRDVAGMLRSFDYAAWTAVRQVAARLPDQTRDGSSLARQWRERMSAEFLEGYRAAASVAQNQPADGATWEALLELFLLQKGFYEINYELSNRPDWVGIPVQGVLDLIERRSG

SEQ ID NO: 38430 - protein, 418 aa, Desulfotalea psychrophila LSv54
MNRQQIYDSLAMASLFALLLFAPLARGSVSPWAQSTLQILVIITSYFTFLKVTSSNRALFIPTPLFYPILALILWTLLSFALSPLKGVGVDALMLLFTYILLYYSVIHLIDSRKKERMLVCLLIGLGIFLSIFGFFKMLGYKPFPWWDYLQHDTFITSTYGNHNHLAGYLEMVIPLSLCLFLTRTRRGVSFFALLLISLILLAAHIATLSRGGWLALALSLLFMATVLLGQKRFRAKKLLLLIISFTLLLSIFILAGSDILERLLSLTDQETVAGLNGRSHTWQGVYKMIAAHPFIGSGPGSFATIFTQFQLPGTSARFYYAHNDYLQFIAELGLPVVLIILWALLTVAKQACRKIKEASRQTWGFTLAALAGLLAIACHSSVDFNLHIPANALIFTVLISLVGSGPKQIEKSKGGVA

SEQ ID NO: 38431 - protein, 695 aa, Sinorhizobium medicae
MNVSQQIEPRAAAWERNMADAIRFLSMDAVEKANSGHPGMPMGMADAVTVLFNRFIRIDPSLPDWPDRDRFVLSAGHGSMLLYSLHHLIGFADMPMAELSSFRQLGSKTAGHPEYGHALGIETTTGPLGQGMSTAVGMAMAEQMMASRFGSVLCNHFTYVVAGDGCLQEGISHEVMDLAGHLKLRKLFVLWDDNRISIDGSTDLSTWMNQFARFRAASWDAQAVDGHDPEAVAKALERARRTRKPSLIACRTRIGKGAASMEGSHKTHGAALGDKEIAATREKLGWPHPPFFVPPEIRAAWAKVAARGRTAREAWDIRLDASRSKKRYEQTIRRQFDGELGDLLAKFRSAHRTRATKVATRQASQMALEVINGATALTIGGWADRTGSNLTMTSQTQPISPGNFKGRYLHYGIRQHGMAAAMNGIALHGGFIPYGGTFLVFSDYARGAMRLSALMGLPVIYVKKKDSIGLGEDGPTHQPVEHLAMLRATPNLNVFRPADIIETAECWEIALGEKNTPSVLALSRQALPMLRRTEGNENQSALGAYVLREARGNRDITILATGSEVEIAVAAAERLQAEEGIAAAVVSMPCWEKFEVQDLAYRRKVLGDAPRIAIEAAGRLGWDRWMGPDGAFVGMTGFGASAPAGDLYRHFGITADHVVAEALELLRRAYSETLPIGARIGPHPSAHTVRSSQEA

SEQ ID NO: 38432 - protein, 656 aa, Arabidopsis thaliana
MADSPVDSSPAPETSNGTPPSNGTSPSNESSPPTPPSSPPPSSISAPPPDISASFSPPPAPPTQETSPPTSPSSSPPVVANPSPQTPENPSPPAPEGSTPVTPPAPPQTPSNQSPERPTPPSPGANDDRNRTNGGNNNRDGSTPSPPSSGNRTSGDGGSPSPPRSISPPQNSGDSDSSSVCICICCNRKKKKKSPQVNHMHYYNNNPYGGAPSGNGGYYKGTPQDHVVNMAGQGGGNWGPQQPVSGPHSDASNLTGRTAIPSPQAATLGHNQSTFTYDELSIATEGFAQSNLLGQGGFGYVHKGVLPSGKEVAVKSLKLGSGQGEREFQAEVDIISRVHHRHLVSLVGYCISGGQRLLVYEFIPNNTLEFHLHGKGRPVLDWPTRVKIALGSARGLAYLHEDCHPRIIHRDIKAANILLDFSFETKVADFGLAKLSQDNYTHVSTRVMGTFGYLAPEYASSGKLSDKSDVFSFGVMLLELITGRPPLDLTGEMEDSLVDWARPLCLKAAQDGDYNQLADPRLELNYSHQEMVQMASCAAAAIRHSARRRPKMSQVQKLIPLVGSIIVRALEGDMSMDDLSEGTRPGQSTYLSPGSVSSEYDASSYTADMKKFKKLALENKEYQSSEYGGTSEYGLNPSASSSEEMNRGSMKRNPQL

SEQ ID NO: 38433 - protein, 302 aa, Triticum aestivum
  misc_feature (110)..(110): Xaa can be any naturally occurring amino acid
  misc_feature (160)..(160): Xaa can be any naturally occurring amino acid
  unsure (1)..(302): unsure at all Xaa locations
MGPVFLLGLSQHGSAPGLFRALFLPRSHTDYSHHIPRSRATSLVSMDTKHADSFEERDVVVDAGCVRAVLGELVLTFLFVFTGVAAAMAAGVPELPGAAMPMATLAGVAXAQALAAGVLVTAGFHVSGGHLNPAVTVALLARGHITAFRAVLTEAAQLLXSVASLACILLRYLSGGQATPVPVHTLGTGIGAMQGLVMEIILTFSLLFVVYATILDPRTPVPGYGPMLTGLIVGAHTLAGGHFSGASMNPARSFGPALATGVWTHHWVYWVGPLVGGPLAGYVYETVFMVTKTHEPLLGWDF

SEQ ID NO: 38434 - protein, 172 aa, Oryza sativa
MAPSVMASSATTVAPFQGSSPPPACRRPPSELQLRQRQHGGRIRCMQVWPIEGIKKFETLSYLPPLTVEDLLKQIEYLAPFQVVPCLEFSKVGFVYRENHKSPGYYDGRYWTMWKLPMFGCTDATQVVKELEEAKKAYPDAFVRIIGFDNVRQVQLISFIAYNPGCEESGGN

SEQ ID NO: 38435 - protein, 291 aa, Streptococcus pyogenes MGAS10394
MPASKKVIIIFILNLSFSLIEFIFGTLFFSGAILADAVHDFGDAIAIGISAILERKAVKKESSNFSLGYKRFSLLGALTTNLILISGSLLVMIETIPKLWHPTIVNYDGMFVLAIFAIIINGFASFIIHSNQTKNEEILSLHFLEDILGWLAIIILSLILKWKPWYILDPLLSIAIASFILSKALPKLVATANIFLDGVPDSIDYCALHHELSQLPHIVSVNQLNVWSMDGIDHRATIHCCLRESTTEKHCKKSIRLICQRYNINSVTVEIDTSLNEHQHHCSSLSSIEVN

SEQ ID NO: 38436 - protein, 387 aa, Micromonas pusilla
IGAKFWEVIRDEHGIDPTGTYCGDSDLQLERINVYYNEASGGRYVPRAVLMDLEPGTMDSVRSGPFGQIFRPDNFVFGQTGAGNNWAKGHYTEGAELIDSVLDVVRKESESCDCLQGFQVCHSLGGGTGSGMGTLLISKIREEYPDRMMLTFSVVPSPKVSDTVVKPYNATLSVHQLVENADECTVLDNEALYDICFRTLKLTTPTFGDLNHLISAVMSGVTCCLRFPGQLNADLRKLAVNLIPFPRLHFFMVGFTPLTSRGSQQYRALTVPELTQQMWDAKNMMCAADPRHGRYLTASALFRGRMSTKEVDEQLLNVQNKNSSYFVEWIPNNVKSSVCDIPPKGLKMAATFIGNTTAVQEMFKRVSEQFTSMFRRKAFLHWYTGEG

SEQ ID NO: 38437 - protein, 764 aa, Mycobacterium bovis AF2122/97
MTIPRSQHMSTAVNSCTEAPASRSQWMLANLRHDVPASLVVFLVALPLSLGIAIASGAPIIAGVIAAVVGGIVAGAVGGSPVQVSGPAAGLTVVVAELIDELGWPMLCLMTIAAGALQIVFGLSRMARAALAIAPVVVHAMLAGIGITIALQQIHVLLGGTSHSSAWRNIVALPDGILHHELHEVIVGGTVIAILLMWSKLPAKVRIIPGPLVAIAGATVLALLPVLQTERIDLQGNFFDAIGLPKLAEMSPGGQPWSHEISAIALGVLTIALIASVESLLSAVGVDKLHHGPRTDFNREMVGQGSANVVSGLLGGLPITGVIVRSSANVAAGARTRMSTILHGVWILLFASLFTNLVELIPKAALAGLLIVIGAQLVKLAHIKLAWRTGNFVIYAITIVCVVFLNLLEGVAIGLVVAIVFLLVRVVRAPVEVKPVGGEQSKRWRVDIDGTLSFLLLPRLTTVLSKLPEGSEVTLNLNADYIDDSVSEAISDWRRAHETRGGVVAIVETSPAKLHHAHARPPKRHFASDPIGLVPWRSARGKDRGSASVLDRIDEYHRNGAAVLHPHIAGLTDSQDPYELFLTCADSRILPNVITASGPGDLYTVRNLGNLVPTDPDDRSVDAALDFAVNQLGVSSVVVCGHSSCAAMTALLEDDPANTTTPMMRWLENAHDSLVVFRNHHPARRSAESAGYPEADQLSIVNVAVQVERLTRHPILATAVAAADLQVIGIFFDISTARVYEVGPNGIICPDEPADRPVDHESAQ

SEQ ID NO: 38438 - protein, 452 aa, Legionella pneumophila str. Paris
MKTKHFDLIVLGGGSGGIASAVRAAQYGAKVAVIEQNHLGGTCVNLGCVPKKIMYNASSIAETLHKSPDYGFFLENNAKLDWKRLVNKRNAYIERLRENYAKRFSQHKITLIQGKGIFHDQSSITIDHTIYQAEHIIIATGGEPALPAINGIKHAIDSDGFFSLTKLPAKVAVIGSGYIGVELAGILNSLGSETHLLMRGTRPLSRFDHMIGDTLMEIMQKQGICIHQNHKAQAIHLHSDGRKSILCQSGSIIENIDVIISAVGRKPRTGNLNLDKINVNMDDKGLILVDAFQNTSVKGIYAIGDVTNTPALTPVAIAAGRRLADRIFGNQPDACLNYDNICSVVFSHPPSGSVGLTEHEAIEKYGKSKIKIYQTRFIPMYDALSVDKTPTAMKLVTLGKKEKIIGLHVVGYSADEMLQGFGVAIKMGACKKDFDNTIAIHPTSAEEFVTMV

SEQ ID NO: 38439 - protein, 210 aa, Bassia scoparia
  misc_feature (197)..(197): Xaa can be any naturally occurring amino acid
  unsure (1)..(210): unsure at all Xaa locations
QRGYTAGVITAFYLSNNQVHPGHHDEVDMEFLGTTFGKPYVLQTNVYIRGSGDGTIIGREMKFHLWFDPTKGFHHYAIFWSPKEIIFLVDDIPIRRYPRKSAATYPLRPMWVYGSIWDASSWATEDGKYKANYNYQPFVGQYTNFKASGCSAYAPRSCRPVSVSPYRSGGLTQKQTYVMKWVQRHYMIYNYCKDRKXDHSHTPECWLRRR

SEQ ID NO: 38440 - protein, 492 aa, Arabidopsis thaliana
MDPYRVRPSSAHDSPFFTTNSGAPVWNNNSSLTVGTRGPILLEDYHLLEKLANFDRERIPERVVHARGASAKGFFEVTHDITQLTSADFLRGPGVQTPVIVRFSTVIHERGSPETLRDPRGFAVKFYTREGNFDLVGNNFPVFFVRDGMKFPDMVHALKPNPKSHIQENWRILDFFSHHPESLHMFSFLFDDLGIPQDYRHMEGAGVNTYMLINKAGKAHYVKFHWKPTCGIKCLSDEEAIRVGGANHSHATKDLYDSIAAGNYPQWNLFVQVMDPAHEDKFDFDPLDVTKIWPEDILPLQPVGRLVLNKNIDNFFNENEQIAFCPALVVPGIHYSDDKLLQTRIFSYADSQRHRLGPNYLQLPVNAPKCAHHNNHHDGFMNFMHRDEEVNYFPSRLDPVRHAEKYPTTPIVCSGNREKCFIGKENNFKQPGERYRSWDSDRQERFVKRFVEALSEPRVTHEIRSIWISYWSQADKSLGQKLATRLNVRPNF

SEQ ID NO: 38441 - protein, 274 aa, Triticum aestivum
MERYELLKDIGAGNFGVARLMRNKELFDRICNAGRFSEDEARYFFQQLICGVSYCHFMQICHRDLKLENTLLDGSPAPRLKICDFGYSKSSLLHSKPKSTVGTPAYIAPEVLSRREYDGKTADVWSCGVTLYVMLVGGYPFEDPDDPKNFRKTIGRIMSIQYKIPEYVHVSQDCKQLLASIFVANPAKRITMREIRNHPWFLKNLPRELTEAAQAMYYKRDNSAPTYSVQSVEGIMKIVEEAQKPPPSTTPVAGFGWAEEDEQEDGKKPEEEAC

SEQ ID NO: 38442 - protein, 467 aa, Deinococcus radiodurans R1
MTNNFDYDVLVIGAGPGGYHAAIRASQLGLKTACVERGAVGGVCLNIGCIPTKALLHAAETMQASKHAAEFGLTFSGQALDIARLNGWKDSIVKKLTGGVSGLFKANKVTLLTGQASFVDDHTVQVGDKTYTAANIIIATGSDPAKLPGLEVDQQQIVDSTGALVMPDPVPARMLCVGGGVIGFEFAQVYNNLGSQVKIIEFLPSVIPGADADAVKEFSKIMSRQGIEIVTQMKANRAEKKSDGVHVELENVKTGEKTTEVFDRVLVAVGRRPRTDGLNPEQAGVTVTERGFIPADKQQRTNVPHIFSIGDVAGNPMLAHKAMKEGLVAAEVIAGKPAEQDAVAIPGVVYTNPELAWVGLTEAEAQEKGYEVKTGVFPMSASGRAMTLQATEGFVKMVVEKDTDLLLGVHIVAPHASDMLAEAGLALEMAATATDISLTIHAHPTLGESILEAAEASHKQAIHIVNR

SEQ ID NO: 38443 - protein, 308 aa, Oryza sativa (japonica cultivar-group)
RRRRGGGGGGGWDDWDDDFRPDMRRNQSVGSFGESGAESGRQPPRSKSTQDMYTRQQLEASAANKDSFFARRMAENESKPEGIPPSQGGKYVGFGSSPAPSANRNGAAAQGDVMQVVSQGIGRLSLVAASAAQSAASVVQVGTKEFQSKMREGGYDQKVNETVNVVANKTAEIGSRTWGIMKGVMALASQKVEEYAKEGGNGWGDDWQRREQGSEPYHRFERETNGNGWNSSSHDGSSKNYNSNSWDDWDEPVKKDEPAKERQSSDSWAGWDDGKDDNFDSYNHSTPSKGSNQNGTTGGSYWTEGGFR

SEQ ID NO: 38444 - protein, 397 aa, Lycopersicon esculentum
MSSSLHSPLYSSLSSSSALQDRKLRNAVNFAKPNLIFKPRRSFPLIRASAGFSSSLDTGLSTELDAVANHSEIVPDTVIFDDFEKFPPTAGTASSSLLLGICGLPDTKFKSAVDRALSDSECYGLESSDLQMSCFFNKALAHVGGDLAKLVPGRVSTEVDARLAYDTHGIVRKVHDLLKAYTEIEVPPERLLFKIPATWQGIEASRVLEAEGIQTHLTFVYSFCQAAAAAQAGASVIQIFVGRLRDWSRNHTGDSEVESALRRGEDPGLALVTKTYNYIHKYGHKTKLMAAAVRNKPDVFNLLGGGYIITPLKVLQSLKESVTLLDEKYSFTRRLSPQSAAAFNFTQDELQKWDQYSFSSAMGPASVELLTIGLDGYINQAKRVEELFGKIWPPPNV

SEQ ID NO: 38445 - protein, 588 aa, Deinococcus radiodurans R1
METSTLQPKSEFFAALRHFAGYYRPYRLTLYADLLCALLVAGITLVYPLCAGYITRTVLTLTPQQAWPELLRVGGLMVGLLAVQVAANSFLDYQGHMMGTFIERDMRRDLFAHLQKLPFGFYDTHRTGQLMSRVTGDLYDIGELAHHGPEDLFIALVSFVGVFVILAGLNLPLTLILLAFLPFMAAYALYFNVQLNRALLQSRQRIGEVNAQVEDSLAGIRVVQSFTGEGTEARRFGAANDLFVEGRRGEYRAELYFYQGMTAFTGLMTIAVLMFGGWAILQGGLRIDGLVTYLMCVGILLEPIRRLVNLARVLQEGVTGFQRFREMMAVTPDIVDAPGAAELQNVRGEVEFQGVSFGYSPDAPPVLRDLNLKIRAGEFVALVGASGVGKSTLCALIPRFYDVSAGQVLVDGHDVCGVTLASLRRSVGVVQQDVYLFSGTVMENIRYGRPGATEAEAMDAARQAGAHDFITRLPQGYHTDIGQRGVKLSGGQKQRLSIARVFLKDPPILIFDEATSSLDNESERLVQESLERLARRRTTLVIAHRLSTVRNAHRIVVLTENGVAEEGSHAELLALGGEYARLQALGRL

SEQ ID NO: 38446 - protein, 438 aa, Pinus radiata
MVLENFGGVGAREASCRIRHELRGIGGWRMSMPKLCDVCQVSSSVIYCRAHTAQLCLVCDAKIHGGSKASLCHERVWVCEVCEQAPAVVTCKADAAALCVACDTDIHSANPLASRHERAPVIPFYECPNMPTNNTVTHANNDNLDCNVLLNEDGGGDDPLKHDYVDDDYGDYDDDENDQNNLLNNQEDNNDAEICCAEEAATASWLIPEANRNNLTIINGGNSEGEDKMVKDKLKFKAYMQSMDFLQDVDNYADLEYLGTTTITTPINPTANMGADSMVPVHTPEVIEHSSTKVSIDTAGSMDVDAASKCNHVYRTTSLNHCVSSSPIDVGIVPDSNITSDISTPYHDPRGVFEIPPRVVHPGGQGEVMGREARVLRYREKRKNRRFEKTIRYASRKAYAETRPRIKGRFAKRTEVEVEQIYSSSLLPDQGYGVVPSY

SEQ ID NO: 38447 - protein, 461 aa, Burkholderia fungorum LB400
MTFLKSPPPTPDAVADEYAAMISGSSLPKYRIPEASSDRRAVFDLVRDELFMDGNSRQNVATFCTTYADDEVRRLMDLSIDKNMIDKDEYPQTAEIEMRCVHMLADLWHATKSWKTTGCSTTGSSEACMLGGLALKWQWKKRREAQGKPTGKPNFVCGPVQVCWAKFARYFDVEMRQVPLSGDATGLRPEDLAQYCDENTIGVVATLGITFTCVYEPVKALAGALDALQANVGLDIPIHVDAASGGFVAPFIQPDLEWDFSVPRVKSINASGHKYGLAPLGVGWIVWRSTQDLPDELIFRVDYLGGDMPTFALNFSRPAGQIIAQYYMLLRLGREGYRHIQQECADTAQALADGLAKIDALDMIYDGRGALPAVCYKLKHPDTAGFTLFDLSDRVRMRGWQIASYELPAGREDTIVQRVLIRRGVTRDMAAMLLEDIKHAIAHLTKNPVPNSTAGPTFHHD

SEQ ID NO: 38448 - protein, 401 aa, Glycine max
  misc_feature (78)..(78): Xaa can be any naturally occurring amino acid
  misc_feature (91)..(91): Xaa can be any naturally occurring amino acid
  unsure (1)..(401): unsure at all Xaa locations
MDYFNAPGRNHLFVPGPVNIPDQIIRAMNRNNEDYRSPAIPAMTKTLLEDVKKIFKTITGIPFLIPTTGTGAWESALXNTLSPGDRIVSFXIGQFSLLWIDQQQRLKFNVDVVESEWGQGAKLDVLESKIASDTSHTIKAICIVHNETATGVTNDLAKVRQILDSYRHPALLIVDGVSSICALDFRMDEWGVDVAITGSQKALSLPTGIGIVVAGPRAIEASKHAKSLRVFFDWKDYLKFYQLGTYWPYTPSIHLLYGLRAALDLIFEEGLENVIARHSRLGKATRLAVEAWGLKNCTQKEEWYSDTVTAVLVPAYIDSTEIVRRAWKRYNLSLGLGLNKVAGKVFRIGHLGNLNELQLLGCLAGVEMILKDVGYPVKLGSGVAAASAYLQDTIPMIPSRI

SEQ ID NO: 38449 - protein, 179 aa, Wolinella succinogenes
MALEGESPQGWVIWITGLAGSGKTTLGRAVYEALRREISHVVYLDGDGFREIFGHSGYDRESRIEISKKRSALCAFLASQGIHVVATAISMFDEIYRLNRQNIPRYLEVYVKCEMEELIRRDQKNLYTKALKGEIQEVVGVDIAFDEPSAHVVIDNTLWGSIDEKRDRILSEIYIQGIR

SEQ ID NO: 38450 - protein, 329 aa, Oryza sativa (japonica cultivar-group)
MASPSGAGKPPAVLLLRPVDQPFAVALRERYRVLDLLSSGQPLPAFLAAAAAAPDPPRAAVVMGGGSIRADAALFDAVPSLRCVVSTAAGVDHIDLAECARRGVVVANSGTVYSGDVADHAVGMVIDVMRRVSAAERYVRRGLWPVQGDYPLGSKVSGKRVGIIGLGNIGSLIAKRLEAFGCVISYNSRNPKRSLPYTYYADVRALAADSDVLVVSCALNSETRHIVGGEVLDALGEGGVVVNVGRGANVDEAALVRALREGRIAGAGLDVFEGEPKVSPELREMENVVLTPHVAVWTAESRSDLRDHTVANLDAFFSGDPLLTPVMLP

SEQ ID NO: 38451 - protein, 155 aa, Xylella fastidiosa 9a5c
MNVAFDLTPPSPSQREALIATLNAEEHRILLQHGTEAPFCNRLLDNNQLGTYTCRFCGLPLFHSNAKFKSGTGWPSFFEPYTHAHIRKQHDTSHGMIRTEILCARCNSHLGHLFPDGPPPTYERYCLNSVSLTFIPTGTLLPDQLHRGDNTAYRT

SEQ ID NO: 38452 - protein, 474 aa, Haemophilus somnus 129PT
MNKEIKTQVVVLGAGPAGYSAAFRCADLGLETVIVERFSTLGGVCLNVGCIPSKALLHVAKVIEEAKSLSAHGIVFGEPTTDIDKIRGWKEKVINQLTSGLAGMAKQRKVQVVNGYGKFSGPNAIIVAGDEGETKITFDNAIIAAGSRPIQLPFIPHEDPRIWDSTDALKLKEVPENLLIMGGGIIGLEMGTVYHALGSKIDVVEMFDQVIPAADKDMVQIYTKRIEKKFNLLLETKVTAVEAKEDGIYVSMEGKAASETRRYDAVLVAIGRVPNGKLIDAGIAGVEVDDRGFIRTDKQMRTNVPHIFAIGDVVGQPMLAHKGVHEGHVAAEVIAGQKHYFDPKVIPSIAYTEPEVAWVGKTEKECKAEGINYEVAKFPWAASGRAIASDCADGMTKLIFDKDTHRVIGGAIVGTNGGELLGEIGLAIEMGCDAEDLALTIHAHPTLHESVGLAAEVFEGSITDLPNPKAKKKK

SEQ ID NO: 38453 - protein, 392 aa, Arabidopsis thaliana
MILSLCCLGSWPAILTLLERRGRLPQHTFLDFATANLLAAIVIAFSLGEIGKSTFLKPDFTTQLPQDNWPSVLLAVAGGVLLSIGNLATQYAFAFVGLSVTEVITASITVVIGTTLNYFLDNKINKAEILFPGVGCFLIAVFLGAAVHASNAADVKEKLKSLPSEDLYSSIENGEDKPEIEKTDVESQEKLAEKAKAGTAGFYVELENKRAIKVFGKSIMIGLFITLFAGISLSLFSPAFNLATNDQWSTLPKGVPKLVVYTAFFYFSIAGFLISLILNLIFLYRPMVGLARSSLKKYIYDSKGRGWAVFAGFLCGFGPTRPNGLQFMGGQAAGYAAADSVQALPLVSTFWGIVLFGEYRKSSKRTYALLVSMLAMFVAAVAILMASSGHRK

SEQ ID NO: 38454 - protein, 387 aa, Micromonas pusilla
IGAKFWEVICDEHGIDPTGTYCGDSDLQLERINVYYNEASGGRYVPRAVLMDLEPGTMDSVRSGPFGQIFRPDNFVFGQTGAGNNWAKGHYTEGAELIDSVLDVVRKESESCDCLQGFQVCHSLGGGTGSGMGTLLISKIREEYPDRMMLTFSVVPSPKVSDTVVEPYNATLSVHQLVENADECMVLDNEALYDICFRTLKLTTPTFGDLNHLISAVMSGVTCCLRFPGQLNADLRKLAVNLIPFPRLHFFMVGFTPLTSRGSQQYRALTVPELTQQMWDAKNMMCAADPRHGRYLTASALFRGRMSTKEVDEQLLNVQNKNSSYFVEWIPNNVKSSVCDIPPKGLKMAATFIGNTTAVQEMFKRVSEQFTSMFRRKAFLHWYTGEG

SEQ ID NO: 38455 - protein, 479 aa, Haemophilus somnus 129PT
MSRRLRRTKIVCTLGPSTDRGNNLEKIIVAGANVVRMNFSHGTPEDHLARAEKVREIAKKLGKTVAILGDLQGPKIRVSTFKEGKIFLNIGDNFTLDADLPKGEGNQEAVGLDYKTLPQDVVPGDILLLDDGRVQLKVLSTDNTKVFTEVIVGGPLSNNKGINKLGGGLSANALTEKDKEDIILAARIGVDYLAVSFPRSSADLNYARELAQQAGLKAKIVAKVERAETVIDEEAMDDIILASDVIMVARGDLGVEIGDPELVGIQKKLIRRSRQLNRVVITATQMMESMISNPMPTRAEVMDVANAVLDGTDAVMLSAETAAGQYPSETVSAMAKVCLGAEKMPSVNISRHRLDKEFDTIEETIAMSTMFAANHMKGVAAIIAMTSSGHTAKLMSRISSGLPIFALSRNESTLNLCALYRGVIPIHFDQDSRTLEGLKAAIQSLKDKGYLVSGDLVLLTQGDHLTSNGTSTCRALVVE

SEQ ID NO: 38456 - protein, 150 aa, Corylus avellana
MSIVPNNERERSVSNPSSRDLWDVFRSFRENHLQDPFSDLPFASTLSTLFPHSPFGSSVNTRLDWRETPRAHVLKASLPGFVDEDVLVELQDDRVLQVSVESGKFVSRFKVPDDAMLDQLKASMHNGVLTVTIPKAEASRPTVRTIEISG

SEQ ID NO: 38457 - protein, 90 aa, Glycine max
ITELAGCDRLTISPALLEELTKSTDKLAKKLDPETAAKAYSGEKLSYDEKDFRLSMNEDAMATDLLAEGIRGFSADIVKLEQILKAKLSA

SEQ ID NO: 38458 - protein, 447 aa, Pisum sativum
MGKEKVHINIVVIGHVDSGKSTTTVHVIYKLGGIDKRVIERFEKEADEMNKRSFKYAWLLDKLKAERERGITIDIALLKFETTKYYSTVMDAPGHRDFIKNMITGTSQADCAVLIIDSTTGGFEAGISKDGQTREHALLAFTLGVKQMICCCNKMDATTPKYSKGRYEEIVKEVSSYLKEVGYNPDKIPFVPISGFEGDNMIERSTNLDWYKGPTLLDALDNINEPKRPSDKPLRLPLQDVYKIGGIGTVPVGRVETGVVKPGMLVTFAPTGLTTEVKSVEMHHEALTEALPGDNVRFNVKNVAVKDLKHGLVASNSKDDPAKDAANFTSQVIIMNHPGQIGNGYAPVLDCHTSHIAVKFAELITKIDRRSGKEIEKEPKFLKNGDAGMVKMIPTKPMVVETFAEYPPLGRFAVRDMRQTVAVGVIKSVEKKDPTGAKVTKAAAKKK

SEQ ID NO: 38459 - protein, 324 aa, Vigna unguiculata
MVKAIRVHEQGGPQVLKWEDVEIGEPKEGEVRVRNKAVGVNFIDVYFRKGVYKPPSFPFTPGMEAVGVVTAVGAGLTGRQVGDLVAYAGQPMGSYAEEQILPANKVVPVPSSIDPPIAASIMLKGMTTHFLVRRCFKVEPGHTILVHAAAGGVGSLLCQWANALGATVIGTVSNKEKAAQAKEDGCHHVIIYKEEDFVARVNEITSGNGVEVVYDSVGKDTFEGSLACLKLRGYMVSFGQSSGSPDPVPLSSLAAKSLFLTRPSLMQYVVTRDELLEAAGELFANVASGVLKVRVNHTYPLSEAAKAHEDLENRKTSGSIVLIP

SEQ ID NO: 38460 - protein, 492 aa, Acacia ampliceps
MDPYKYRPSSTFNTPFWTTNSGTPVYNNDSALTIGSRGPILLEDYHLVEKIANFTRERTPERVVHARGASAKGFFEVTHDITHLTCADFLRGPGVQTPVIVRFSTVIHERGSPETIRDPRGFAVKFYTREGNFDLVGNNFPVFFIRDGMKFPDVIHAFKPNPKSHIQEYWRVLDFCSYLPESLHTFMFLFDDVGVPQDYRHMEGSSVNTYTLINKAGKVHYVKFHWKPTLGVKCLLEEEAIRVGGANHSHATQDLYDSIAAGNYPEWKLYIQTIDPDFEDRFDFDPLDGTKTWPEDLVPLQPVGRLVLNRNIDNFFAENEQLAFSPSLVVPGIYFSDDKVLQARIFAYGDTQRHRIGPNYLQLPVNAPKCAHHNNHYDGTMNFMHRDEEVDYFPSRYDTARHAEKFPIPPVNLIGRRDRRIIEKENNFKQPGDLYRTWAPDRQERFIRRWIGVLSDPKVTHEVRSIWISYLSQADRSLGQKVASHLNMRPSI

SEQ ID NO: 38461 - protein, 290 aa, Triticum aestivum
MTTVAIGILAMACLVGVARGGNFFRGCDMTWGDGRGKVVDGGRGLYLTLDKTSGSGFQSKTEYLFGKIDMQIKLVPGNSAGTVTTFYLSSQGTAHDEIDFEFLGNVTGEPYTLNTNVFVKGQGQWEQQFRLWFDPTKGYHTYSIIWNPQHVIFGVDGTAIRDFKNHEARGGIAFPKNQPMRLYSSLWNADDWATQGGRVKTDWSHAPFSASYRGFKADACVVTAAGRPRCGASVGTEVAPGTGAAGEWYNQELDLTRQQRMRWVQSNYMIYNYCTDPKRFAQGVPAECSM

SEQ ID NO: 38462 - protein, 393 aa, Bacillus halodurans C-125
MREAVIVAGARTPVGKAKNGTLANVRPDDLGALTVKETLKRAGDFDPARIDDVIIGCAMPEAEQGMNMARNIAALAGMPHTVPAITINRYCSSGLQSIAYGAERIMLGQGEAIVAGGAESMSLIPMGGHVIAPNPTLVENQPEYYMGMGHTAEEVASRFGVSREDQDAFAVESHKRAAKAIEEGKFADEIVPVDVTLRHVDDNHKLVEKHVTFSVDEGVRPETNMETLSTLRPAFHAKGTVTAGNASQMSDGAAAVLLMDREVAEREGLTPVVKFRSFAVAGVAPEIMGVGPVEAIPKAVKMAGLDLSDIGLFELNEAFASQAIQVIRGLNLDHDKVNVNGGAIALGHPLGCTGTKLTLSLIHEMKRRGEQFGVVTMCIGGGMGAAGVFELIG

SEQ ID NO: 38463 - protein, 421 aa, Streptomyces arenae
MTRRVVITGIGVRTPGGLGTKAFWSLLSEGRTATRRISRFDPSPFRSRIAGEVDFDAEAEGFSPREVRRMDRATQFAVACTRDAVADSGLETTALDPARVGVSLGSAVASATSLEREYLVLSDSGRQWLVDDGFLSPHMADYLSPGVMPAEVAWSVGAEGPVTMVSDGCTSGLDAVGHGVQLIREGTVDVVLAGASDTPVSPIVVACFDAIKATTPRNDDPEHASRPFDGSRNGFVLAEGAAMFVLEEYEAARARGAQIYAEVGGFATRCNAYHMTGLKTDGREMAEAIRAALDEARLDRTAVDYVNAHGSGTKQNDRHETAALKRSLGAHAYDVPVSSIKSMVGHSLGAIGSIEIAACALAIKTNVVPPTANLHTPDPECDLDYVPLTARDKQVDTVLSVGSGFGGFQSAMVLHRPEVAA

SEQ ID NO: 38464 - protein, 429 aa, Streptomyces arenae
MNSGTRSGTSSATRNGTSSGAAGAGAVVVTGVSVVAPGGLGTEEYWKSVLTGRSGIGELTRFDVTRYPARLAGQIRDFEAADHLPSRSLPQTDVSTCHALAAAAWALADAGVGAGTLPDYDMGVVTSTSQGGFEFTHREFNKLWSKGPQHVSVYESFAWFYAVNTGQISIRHGMRGPSAALVAEQAGGLDAVGHARRTVRRGTRLVLSGGVDSAFDPWGWVAQSASGRVTTATDPERAYLPFDTDASGHVPAEGGAILVVEDAASARLRGAERIYGTLAGYASTFDPRPGSGRPPGLRRAAELALADAGLAPGDIDVVFADAAGVPELDRAEAAAISGLFGPNAVPVTAPKSVTGRMYAGGGPADLVAALLAVRDGVVPATAHTTSVPAGYGIDLVLGEPRALPVRAALVLARGRWGFNSAVVVTGPTH

SEQ ID NO: 38465 - protein, 666 aa, Arabidopsis thaliana
MSQQKKYIFQVEEGKEGSDGRPSVGPVYRSIFAKDGFPDPIEGMDSCWDVFRMSVEKYPNNPMLGRREIVDGKPGKYVWQTYQEVYDIVMKLGNSLRSVGVKDEAKCGIYGANSPEWIISMEACNAHGLYCVPLYDTLGADAVEFIISHSEVSIVFVEEKKISELFKTCPNSTEYMKTVVSFGGVSREQKEEAETFGLVIYAWDEFLKLGEGKQYDLPIKKKSDICTIMYTSGTTGDPKGVMISNESIVTLIAGVIRLLKSANEALTVKDVYLSYLPLAHIFDRVIEECFIQHGAAIGFWRGDVKLLIEDLAELKPTIFCAVPRVLDRVYSGLQKKLSDGGFLKKFIFDSAFSYKFGYMKKGQSHVEASPLFDKLVFSKVKQGLGGNVRIILSGAAPLASHVESFLRVVACCHVLQGYGLTESCAGTFVSLPDELGMLGTVGPPVPNVDIRLESVPEMEYDALASTARGEICIRGKTLFSGYYKREDLTKEVLIDGWLHTGDVGEWQPDGSMKIIDRKKNIFKLSQGEYVAVENIENIYGEVQAVDSVWVYGNSFESFLIAIANPNQHILERWAAENGVSGDYDALCQNEKAKEFILGELVKMAKEKKMKGFEIIKAIHLDPVPFDMERDLLTPTFKKKRPQLLKYYQSVIDEMYKTINAKFASRG

SEQ ID NO: 38466 - protein, 154 aa, Synechocystis sp. PCC 6803
MPLPTSLTTLDGTPLAPEVIADKVVLFVNVASKCGLTPQYSGLVALDKAYGEKGLVIIGVPCNQFGAQEPGSPEEIKDFTKTKYDVDFTLLEKQDVNGPNRSPLYQFLVGDGEDISWNFGKFLIGRDGQVVARFDPQTKPDDTNLKAAIEKALG

SEQ ID NO: 38467 - protein, 150 aa, Zea mays
QLLLPGVPDDPAGVTSATMEGDKITVVGDGVDPITLTTILRRSLGYAELLSVSSGDDKKKGDGYGYGSAGGMMYGGGGYGGGKEGKESKESSGGKSSGGGGGYGGHYQAMPSVSYPAAYQQYNAMPPYPAAYSYPAAYPQQEQDPGCSIM

SEQ ID NO: 38468 - protein, 411 aa, Triticum aestivum
MNALAATSRNFRQAARLLGLDSKLEKSLLIPFREIKVECTIPKDDGTLASFVGFRVQHDNARGPMKGGIRYHPEVDPDEVNALAQLMTWKTAVAAVPYGGAKGGIGCSPGDLSRSELERLTRVFTQKIHDLIGTHTDIPAPDMGTNSQTMAWIFDEYSKFHGHSPAVVTGKPIDLGGSLGRDAATGRGVMYATEALLAEYGKSISGSTFVIQGFGNVGSWAAQLIHEKGGKVIALGDVSGTIRNKAGIDVPALMKHRNEGGQLKDFHGAEVMDASELLVHECDVLLPCALGGVLNRENAPEIKAKFIIEAANHPTDPEADEILTKKGVVVLPDIYANAGGVIVSYFEWVQNIQGFMWEEEKVNMELHKYMNSAFQNIKAMCKSQDCNLRMGAFTLGVNRVARATILRGWEA

SEQ ID NO: 38469 - protein, 385 aa, Brassica rapa subsp. pekinensis
MVAHKETVCVTGASGFIGSWLVMRLLERGYFVRATVRDPGNLKKVQHLLDLPNAKTQLTLWKADLSDEGSYDDAINGCDGVFHIATPMDFESKDPENEVIKPTVNGVLGIMKACDKAKTVRRIVFTSSAGTVNVEEHQKNVYDENDWSDLDFIMSKKMTGWMYFMSKTLAEKAAWDYAKEKGIDFISIIPTLVIGPFITTSMPPSLITALSPITRNEAHYSIIRQGQYVHLDDLCNAHIFLYEQAGAKGRYVCSSHDATILTISEFLRQKYPEYNVPSTFEGVDENLKSIMFSSKKLIDMGFNFKYSLEDMLVESIETCRQKGFLPVTLPEHLKSEDKVPGSDDNKEIKNGSAGLTDGMVACKKTEPGMAGEKADSHMSAQQICA

SEQ ID NO: 38470 - protein, 1014 aa, Synechocystis sp. PCC 6803
MSPSQPHPPIATFEPESFLILVVDDVKENIYVISELLEGEGYSTTFVTSGPEALQRVTQAQPDLILLDLMMPGMDGLEVCDRLKQDPQTRDIPVIFLTASNEKQDLLQAFAKGAVDYVTKPFSPPELLARVKTHLELKQTRDNLHHTLLEQARTAEALACTSTRLGILVQNMQAGVLMTDAQGTIVVVNPEFARLFNLGFPADLLLGKNLTAIAPRINGLISHGQGVTHNFLAIESPEPLLKVELALEDGRFFERDYVPIMLGDSSQGHFWLYRDISQRKQVEMIQGQSLEMERRMRQQLAEQNQELVAATTAAEAANRSKSEFLATMSHEIRTPMNAIIGMTGLLLDTDLTTQQKYFAQTIRNSGETLLTLINDILDFSKIEAGKLDLEVYPFDLGQCLEEALDVVVPSARQKSLTLIRRFLTPIPPNLQGDVTRLRQILVNLLSNAVKFTEAGQVKVTVEVVDHDAAKGEYQICFAVQDTGIGIAPNQQQALFQAFSQGNSSITRRFGGTGLGLAICVRLTALMGGTIWAESNGCVVGNPPELWQIGQPTIEGSTFYFTVNLTVLPSCAYSVHNLRHSLFIGRSVLVADYDEGRGTRMRNLLASWRLQAEQITFSSPAKLGEDLKSRLTQKNYGALILHCPYPEGRGKQFTDFDLGKITTWAPTEQDIPVLVATDIYLSPGERYSGDKPPVQAWIKSPINPDELENTLVDVLGQTEPPTLVSTEAISGPLFPYSSSNLTILLAEDNLINQQVAKLLLKKLGYPVDVVNNGQEALSALAKGDYDVVLMDVEMPEMDGLTATEHIRRSQGRSERPWIIAVTAYSMEGDRERCLASGMNDYVSKPIRLEALQQALQVAATALQSTSQDRMATVSCVSAFEAKPSPSSPCPEDPAGTTLPPIDQDIICSLRDLDRENGQLILREIIDIYCQTAPELLQRIKLAIANQDWGNLSSAAHTLGSSSANLGAVLLAQQAKTLENLTRQRDSRAMDPGHFPTLAASYERVQGELKTMLDRL

SEQ ID NO: 38471 - protein, 446 aa, Zea mays
MAGSSMDTEAAGKELKQGSGGGGGYTMPATAHAVDTDSWQQVGLLLVIGFNCAYVLSFSNLMMVPLGWAWGVACLLLVGAAAWYANWLLAGLHFVDGQRFIRYRDLMGFVFGRNMYYITWFLQFATLLLCNMGFILLGARALKAINTEFTHTPARLQWFITATGIVYFAFAYFVPTISAMRNWLATSAALTLAYDVALLAILIRDGKSNKQKDYDVHAGSQAEKVFNALGAVAAILVCNTSGLLPEIQSTVREPAVRGMRRALLLQYTAGAAGYYGISVAGYWAYGSAVSEYLPNELGGPRWAAVLINATAFLQSIVSQHLFTVPIHEAMDTRLQRLDEGMFSRYNLTRRVCARGLVFGFNVFVTALFPFMGDFVNLVGSLALVPLTFTFPSMAVLKIKGKSGGRCNRLWHWGIIVLSSALCVATTAAAVRLIFNNARIYHFFADM

SEQ ID NO: 38472 - protein, 413 aa, Rickettsia heilongjiangii
IAELKIRGKIFKLPILKASIGEDVIDISRVSAEADCFTYDPGFMSTASCQSTITYIDGDKGILRHRGYDIKDLAEKSDFLEVAYLLIYGELPSGEQYNNFTKQVAHHSLVNERLHYLFQTFCSSSHPMAIMLAAVGSLSAFYPDLLNFKEADYELTAIRMIAKIPTIAAMSYKYSIGQPFIYPDNSLDFTENFLHMMFATPYTKYTVNPIIKNALNKIFILHADHEQNASTSTVRIAGSSGANPFACISTGIASLWGPAHGGANEAVINMLKEIGSSEYIPKYIAKAKDKNDPFRLMGFGHRVYKNYDPRAAVLKETCKEVLKELGQLDNNPLLQIAIELEAIALKDEYFIERKLYPNVDFYSGIIYKAMGIPSQMFTVLFAIARTVGWMAQWKEMHEDPEQKISRPRQLYTG

SEQ ID NO: 38473 - protein, 604 aa, Wolinella succinogenes
MCSICGGTIKPSLIQKASDTMRHRGPDARSFWSDGKISLAHNRLSILDLSEAGNQPFGDERYRLIFNGEIYNFQELSSDYGLRLQSSSDTEVLWRLLILEGERILPRLNGMFSFLFYDGHKGEILMARDRFGKKPLFYFHEGKELGVASEIKALRAILGEKGALDQGALLDYLSYLAPCGEKSFFPTIHKLPAGCLARFSLSEGRLEKSSFYSLPSAPSRENIEEKEALRKIEELLVESVRYRLLSDVPVASFLSGGIDSSLISALYARLSPCSIETFSIGYDEYKHYDELPYAREVASHIGSIHHEKIATRKDFLEAFEEVLPILDEPLGDPAIIPTYLLSKEVAKSGFKVVLSGEGSDEIFFGYDGYFDSLKLLWLENSLGLKEKAILLDYHRKSEHGGKEWERLRRLLMDEKPYFRGINESWTPGQRARLFKQEPAWRDPILETFQDFPSKEGEGWYSYIDLKHWMAEVLMSKMDRMSMAHSLESRAPFLDYQLVDFVLSLPSSLRTGEITKNLLKKIALAYLPDSIVNRRKKGFSSPMFEWYFEAYQGRILEDYQRVNRELGWFEDSYLKFLYEKGRMGEYKSQNWGMILFSRWFLIHCG

SEQ ID NO: 38474 - protein, 571 aa, ASPERGILLUS NIDULANS FGSC A4
MCGIFACHHHPDVQAFKPTALRMAKAVRHRGPDWSGSFIADKTILCHERLCIVGVDSGAQPLVNDDESLALAVNGEIYNHRIVRKTLDVEYNYKTHSDCEVIIPLYMKYGLDAPKHLDGMFAWVLYDKKEDRVIAARDPIGICSFYIGWSSQTPGAVYFASELKSLHPVCDKVEAFPPGHVFDSKSGEFSRYFQPSWWDPTNVPSTPVDYKAIRESLTRSVRKRLMAEVPYGVLLSGGLDSSLVASIAQRETLRMQKASSGVKSEANGELVGIDDENELSTVNSFQQLQSFSIGLPGAPDTEAAMEVAKFLGTKHHALTFTIEDGLNALSDVIYHLETYDVTTIRASTPMYLLSRKIKGLGVKMVLSGEGSDEIFGGYLYFHAAPNKEEFHKETVRRVKNLHLADCLRANKSTSAWGLEARVPFLDKAFIETSMSVDPQEKMITKDRIEKYILRKAFDTSDEPDVEPYLPDKILWRQKEQFSDGVGYSWIDGLKDHAELHVTDEMMKNPKPEWGDDIPTTKEAYWYRMMFDEHFPSYCASTVERWVPTWSKQSDPSGRAIATHNAKYDDAE

SEQ ID NO: 38475 - protein, 492 aa, Soldanella alpina
MDPYKYRSSSAFNTPFWTTNSGAPVWNNNSSLTVGTRGPILLEDYHLVEKLANFDRERIPERVVHARGASAKGFFEVTHDISHLTCADFLRAPGVQTPVIVRFSTVIHERGSPETLRDPRGFAVKFYTREGNFDLVGNNFPVFFVRDGMKFPDMVHALKPNPKSHIQENWRILDFFSHHPESLHMFTFLFDDLGVPQDYRHMEGSGVNTYTLINKAGKAQYVKFHWKPTCGVKCLLEDEAIKVGGANHSHATKDLYDSISAGNYPEWKLFIQIIEPDHEDKFDFDPLDVTKTWPEDIIPLMPVGRLVLNKNIDNFFAENEQLAFCPALIVPGVYYSDDKLLQTRIFSYADTQRHRLGPNYLQLPPNAPKCAHHNNHHEGLMNFMHRDEEVNYFPSRFDPVRHAERHPIPPPVLTGKRDRCMIEKENNFKQPGERYRTFAPDRQERFVCRWVDALSDPRVTHEIRSIWISYWTQADKSLGQKLASRLNVRPTM

SEQ ID NO: 38476 - protein, 606 aa, Wolinella succinogenes
MCGILGYLRKGSAGQSQLSCEQFNQILSKIAHRGPDHQDFVWFNEPEYQLYLGHVRLSIIDLDERASQPMLFKDRYLLVFNGEIYNYRELKEKLLLQGYGFATQSDSEVLLAAYDFWGETCVEHFNGMWAFAIYDKKRHSLFCSRDRFGVKPFYFYENEEIFVFASEIKALLPFFKEAKLNPKVILPYLARGFLDGGSETFFDGVYRLEASSNLFYDLRGKQKSFQTYYSILLNPLSAKEREIPSSAKELLSLLRQSVSLRLRSDVRVGACLSGGLDSSGVAALASQQYDFGEKLVAIHAKSSLKESDESSYAIEVANHLGLDLHMVEPSFEDFCESLDDLFYTQEEPFGSTSMFMQYFVMKKAKELGCKVMLDGQGADEVFLGYEHYFHNIFKDLRDRKFFLENDFFKDLKTFRYTKEQILEELKKADDAGVAWDVIKNRGNICSRYLCREWLDSYIAPVKTIQEFQKREIFYNHLPSLLRYEDRDSMRFGIETRLPYLDYRIVEWVLALPTEVKFQQGYLKFALREALEISGLLPKSIVWRYNKMGFESPQKLWIDRYRFEMMKVIEGSEIIRDIFFKVDIRRDDFLWKLFSIAKWEKMFNVKL

SEQ ID NO: 38477 - protein, 519 aa, Arabidopsis thaliana
MEDIQEEENGTDEEVLGSSLTMEKVAAAKQYIENHYKAQNKNIQERKERRWILERKLASSGVPKEEQINMIKDLERKETEFMRLKRNKISVDDFELLTIIGRGAFGEVRLCRERKSGNIYAMKKLKKSEMVMRGQVEHVRAERNLLAEVESHYIVKLYYSFQDPEYLYLIMEYLPGGDMMTLLMREDTLREDVARFYIAQSVLAIESIHRYNYIHRDIKPDNLLLDKDGHMKLSDFGLCKPLDCRNLPSIQENRATDDETMSEPMDVDRCFPDTDNKRSWRSPQEQLQHWQMNRRKLAFSTVGTPDYIAPEVLLKKGYGMECDWWSLGAIMYEMLVGYPPFYADDPISTCRKIVHWRNHLKFPEDAKFSSEAKDLICRLLCNVDHRLGTGGGAQQIKDHPWFKDVVWEKLYEMEAAYKPEVNDELDTQNFMKFDEVNSPAPERTRSGLSRKMLLAPKDLSFVGYTYKNFDAVKGLRHSLEMARTMSLDRSPAEAMPVELISGEAAEAQMVSSMDDPMII

SEQ ID NO: 38478 - protein, 168 aa, Zea mays
MQQNWAADLACLPGLDLGSLFLPQNDDPMYDFSTFDMVDLDPYPCSCNGSVTTTTVSSVSAAAADKHQERRGNDVERKKRRLASNRESARRSRVRKQRRLYELSLQVAELLGTNQRLLVELNHVTAKHALLARENAKLREEAAGLQRRLSEMELMGEAEAAALSPEVA

SEQ ID NO: 38479 - protein, 323 aa, Xanthomonas campestris pv. campestris str. ATCC 33913
MGLLVDGKWQDRWYDTDKSDGRFERSQSHFRHWVTADGRAGPHGEGGFQAAPGRYHLYVSLACPWAHRTLIFRQLKGLASLIDVSVVHWLMGTQGWTFEHGPGVVGDSIHHAKYLYEVYLKADPQYSGRVTVPVLWDRERDTVVSNESADIIRMFNSAFDAVGAAEGDYYPEALRAQIDTINQRVYDTVNNGVYKAGFATTQAAYEEAVVPLFDTLDWLDTCLSTQRYLCGDYLTEADWRLFTTLIRFDAVYVGHFKCNLRRIADYPQLSGFLRELYQMPGIAETVNFQHIKSHYYQSHAMINPTGIVPMGPVLDLDAPHGRG

SEQ ID NO: 38480 - protein, 253 aa, Oryza sativa
MSISVNGQSCVPPGFRFHPTEEELLNYYLRKKVASEQIDLDVIRDVDLNKLEPWDIQERCKIGSGPQNDWYFFSHKDKKYPTGTRTNRATAAGFWKATGRDKAIYNAVHRIGMRKTLVFYKGRAPHGQKSDWIMHEYRLDDPATDTAAATPTVTSAAAAAAAMAAAADGGQEDGWVVCRVFKKKHHHKEAGGGGGKHGGDGSAGAKAAHAYSSSDDALDQILQYMGRSCKQEHELPPPPTTCCSTTTTARTGP

SEQ ID NO: 38481 - protein, 387 aa, Micromonas pusilla
IGAKFWEVICDEHGIDPTGTYCGDSDLQLERINVYFNEASGGRYVTRAVLMDLEPGTMDSVRSGPFGQIFRPDNFVFGQTGAGNNWAKGHYTEGAELIDSVLDVVRKESESCDCLQGFQVCHSLGGGTGSGMGTLLISKIREEYPDRMMLTFSVVPSPKVSDTVVEPYNATLSVHQLVENADECMVLDNEALYDICFRTLKLTTPTFGDLNHLISAVMSGVTCCLRFPGQLNADLRKLAVNLIPFPRLHFFMVGFTPLTSRGSQQYRALTVPELTQQMWDAKNMMCAADPRHGRYLTASALFRGRMSTKEVDEQLLNVQNKNSSYFVEWIPNNVKSSVCDIPPKGLKMAATFIGNTTAVQEMFKRVSEQFTSMFRRKAFLHWYTGEG

SEQ ID NO: 38482 - protein, 387 aa, Micromonas pusilla
IGAKFWEVICDEHGIDPTGTYCGDSDLQLERINVYFNEASGGRYVPRAVLMDLEPGTMDSVRSGPFGQIFRPDNFVFGQTGAGNNWAKGHYTEGAELIDSVLDVVRKESESCDCLQGFQVCHSLGGGTGSGMGTLLISKIREEYPDRMMLTFSVVPSPKVSDTVVEPYNATLSVHQLVENADECMVLDNEALYDICFRTLKLTTPTFGDLNHLISAVMSGVTCCLRFPGQLNADLRKLAVNLIPFPRLHFFMVGFTPLTSRGSQQYRALTVPELTQQMWDAKNMMCAADPRHGRYLTASALFRGRMSTKEVDEQLLNVQNKNSSYFVEWIPNNVKSSVCDIPPKGLKMAATFIGNTTAVQEMFKRVSEQFTSMFRRKAFLHWYTGEG

SEQ ID NO: 38483 - protein, 383 aa, Saccharomyces cerevisiae
MSETELRKRQAQFTRELHGDDIGKKTGLSALMSKNNSAQKEAVQKYLRNWDGRTDKDAEERRLEDYNEATHSYYNVVTDFYEYGWGSSFHFSRFYKGESFAASIARHEHYLAYKAGIQRGDLVLDVGCGVGGPAREIARFTGCNVIGLNNNDYQIAKAKYYAKKYNLSDQMDFVKGDFMKMDFEENTFDKVYAIEATCHAPKLEGVYSEIYKVLKPGGTFAVYEWVMTDKYDENNPEHRKIAYEIELGDGIPKMFHVDVARKALKNCGFEVLVSEDLADNDDEIPWYYPLTGEWKYVQNLANLATFFRTSYLGRQFTTAMVTVMEKLGLAPEGSKEVTAALENAAVGLVAGGKSKLFTPMMLFVARKPENAETPSQTSQEATQ

SEQ ID NO: 38484 - protein, 719 aa, ASPERGILLUS NIDULANS FGSC A4
MVPARFLVVANIASALAFVLPFFSQTSIPIGASNSDFTCDLPFPLDPAGDGLPSAASLFSSDEALERQVKRHQGIVQVPSVSYDDLGEIGVDERWEPFYKLYPTIEKTYPVLHERAKIEKINTFGLLYTLEGSDPSLKPTLLTAHQDVVPVADASTWTYPPFEAHFDGEYIWGRGASDDKNSLTGILSAVEGLLSESDWKPRRTLLLAFGFDEEVGTNRGAKQISDVLQARYGNDSVAVILDEGGFGSQPLDDKTIYVHPAITEKGHINLHFELHARGGHSSVPLPHTGIGIISEIVVALESNPYEPVILEDSPIHKRLVCQARYSPGTQPKIEELLKERDFEGLATEFANTTPLNRFVIQTSQAVDLIGGGVKINAMPEVVTLSVNYRVAHHQRPVDVQHRAVQIIADVVDKYGLRVDAFNGDKEYHDYVAGLYRSDSLYRNDLKRRDKVDYNGTLVVSAFGKGEAAPISPTSGAVWETFSGTIRHAFASGTKTVVPVGDIMTGNTDTTHYLSLSRDVYRWTPAIARAEDNIHTVDERTMLLLDILIPRSKDMLAQGSAKMALKAINSKDAASLDQDLMEAGGFSLDQLMELAGLSVSQAVYRVHPPSAGKNLLVICGPGNNGGDGLVAARHLAHYGYKPTVYYPKEGKKELYARLKTQLSALSVPVISNPSDFQSAIPNTSLIIDAIFGFSFGGPLRDSLSRDNLRNRELLHTRVSR

SEQ ID NO: 38485 - protein, 340 aa, ASPERGILLUS NIDULANS FGSC A4
MASDIPKVVPLTCHGHSRPVPHISFSSTVEDDQYYLVSACKDNNPMLRDGITGDWIGTFLGHKGAVWQARLSTDANIAATAAADFSAKVWDTHTGQCLHTLQHSHIVRAVAFPLQPSPQVLATGGYEKKLRIFDLTRSGSNSSSPTASSAPPAEDGTSSATSYEIGPGAHGGTIKSIVWNRDYNILTTAADDRKIRWWDLRSRHPVVEYPVEGNIGSCELNTLATRPNDTGILSVAAGKSVYLFDGHTPGRLLKKIDFGYEVASAAVNNDTARLVTGSADDTWARVYDLHTDDELEVQKGHHGPIWSVSFSPDGKLYGTGSEDGTIKLWKACREPYGLWR

SEQ ID NO: 38486 - protein, 460 aa, Oryza sativa
MEKATRCLARATGLAAAAAAGDGPRKRLAVAMVDCLARRLLRPVQAITDALIDPSVYLDRRSVRAARRGFFELSPFPKVAFVVGNRAIVEAVENESLVHVVGMSGPFTQPCQWIQLLHELRRRPEGPPRVVRLTVVHDDGELLAKMEELVSDEAEELGMEFQFHGVVGQLEDLDFSNLRNVLEIKSGEALVVSCTLQLHRLLAADDDAMYSSRSAHLNQMASIAQLQHMAVNSCPSSSGGGSVQYKDDDPYRSPATPLTFVSPPVSTPHFQTPAALASFLSAVRALSPKILVVAEQDADHNGVSFRKRFCEALHHYAAVFDSLDAAAATTSAASRLWSPDERAQVERVVVGEEIKGVLLRDGAHRREWHDRLRQWAARMEMAGFTGVPLSYAAIKKGNDMVRRCGLRRCENKECGGCLLLCWSSRPLYSISAWRPAASRGSGSGSERSEYVHVGAEPDDR

SEQ ID NO: 38487 - protein, 273 aa, Phytophthora infestans
LRRKLKAGDISLEHYRGKIDEQIAYNIGIQEALGLDILVHGEPERTDMVEYFAEKLNGFAFTQNGWVQSYGSRCVRPPIIFADLERPADMTVREFVVAQSFTTKPVKGMLTGPVTILNWSFPRKDISRKDQAFQLALCLRDEVADLETAKCVVIQVDEPALREGMPLKPAKKDEYLNWAVDAFRLSTAVAKNETSIHTHMCYCEFSDCMHAIDAIDADVNSIENARSDDETIRSFKSIGYKRDLGPGTYDIHSPVVPPKEEIVKKLKSFLNLL

SEQ ID NO: 38488 - protein, 151 aa, Brassica napus
MGLEYDQDSGSATHSLPSLRSSTNSLYVPREDTPLLGPRTLSSQPKTFANVFIAIVGAGVLGLPYTFKKTGWLLGLLTLFFVSSLTFFCMMLLVRTRRKLESLPGFSSITSFGDLGEAVCGPAGRLVVDVMLVLSQSGFCVSYLIFVATTM

SEQ ID NO: 38489 - protein, 419 aa, Phytophthora infestans
KVKVGLREGSSSFAQAKAAGFSEDKGTLGEMFEVIKESDMVVLLISDSATVNLYPKIFPLIKKGATLGLSHGFLLGHLESVNETFPKDINVVMMAPKGMGPSVRRLYVQGKTVNGAGINSSVAIHQDVTGNAPEIALGWSVGVGAPYTFYTTMADEYKSDIFGERCILLGGVHGLVESLFRRYVQEGMTPEDAFKNTAECITGPLNEKISHDGIKSVYDSFKGEDKIIFEKAYTAAYTPCRDIIEEVYDDVACGNEIRSVNNAVARHDRFPFGKIDQTYTWKVGEKVRAARDGNFIMNPFTAGTYVAMMMAQIDVLISHGHCYSEVANESVIESVDSLNPYMHARGVAYMVDNCSTTARLGSRKWAPRFDYILTEQAYVAVDDNKIKNEAKIMSEFKNHTIHDVLAVCSSMRPSVDISV

SEQ ID NO: 38490 - protein, 369 aa, Crocosphaera watsonii WH 8501
MNSKSPLRVAVVGTGFGQAIHIPGLQHHPRTELVAVYNRDLGKAKAIADKNNIPYAFHNLDKLLAMSDLDAVTLSTPPFLHYEMGKQILKAGKHLLLEKPMAMSAQETRELYHLATKNNLVATTDFEFRYVPAWQLLREKLEEGYIGQPRLIKIDWLVASRANPEQGWNWYALKDKGGGVLGAVGSHAFDYIHWLFGPVKRLCARLVCAIKQRPDPLENAKLKPVDADDTCLIMLELTDGTPVQLTISSVTYNGRGHWLEVYGDRGTLVLGSDNLKDYVHGFHLQAGLAGKPLTEVEIPKRLAFPQVFTDGRLAPFIRIVDRWVESIDQKQSLAPSLYEGVYSQLLMDLTHQSSETGSWVNVPDLNSFL

SEQ ID NO: 38491 - protein, 368 aa, Pseudomonas putida KT2440
MKTLNSTPRADGFHMPAEWAPQTQVWMVWPERPDNWRLGGKPAQAAHVTLAKAIARFEPVTVAVSAGQYENARRQLDQPNIRVVEISNDDAWVRDTGPTFVINDHGEVRGVDWGFNAWGGFDGGLYAPWNRDEELAAKVLEMERCQRYQTEGFVLEGGSIHVDGEGTVITTEECLLNRNRNPHLSREQIEAVLRDHLAVDTVVWLPDGLYNDETDGHVDNFCCYVRPGEVLLAWTDDSNDPNYARCHAAMDVLKNTRDAKGREFIVHKMPIPGPLFATAEECAGVDQVAGSQERDPSVRLAGSYVNFLIVNGGIIAPSFDDPADAEARAILARIFPDHEVVMIPGRELLLGGGNIHCLTQQQPAPVKR

SEQ ID NO: 38492 - protein, 165 aa, Zea mays
MALAEADDGAVVFGEEQEALVLKSWAVMKKDAANLGLRFFLKVFEIAPSAEQMFSFLRDSDVPLEKNPKLKTHAMSVFVMTCEAAAQLRKAGKVTVRETTLKRLGATHLRYGVADGHFEVTGFALLETIKEALPADMWSLEMKKAWAEAYSQLVAAIKREMKPDA

SEQ ID NO: 38493 - protein, 451 aa, Rhodobacter sphaeroides 2.4.1
MSSSRPDPRALPVPSGRISRLARFGSLASGVAGNVALQGARQLAQGRRPTMSELILTPANVARLAEELARMRGAAMKMGQLLSMDAGEMLPPELAAILARLRADAHYMPPQQLRSVLTAAWGPDWQRRFRSFNVRPIAAASIGQVHRAMTKDGEDLAIKVQYPGVRRSIDSDVDNVAALLRLSGLVPKGLDVAAMLAEAKRQLHEEADYGREGRCLARFGALLAESPDFCVPRLHEALTTPDVLAMSHVAGQPVEDLAEAPQDLRDRVMTLLIGLMFRELFDFGLMQTDPNFANYRHDAATGQVVLLDFGATRDIDPGMADGYRRLLRAGLAGDLPASEAEMRALGFLSDAVPPDLRALMMRMFEISMEPLRAPIFDFGANDMALRLRDLGMEIGERREIHHLPPVETFYIQRKFGGMYLLASRLRARVAIRDLIYPHINDGLNEVTSGSA

SEQ ID NO: 38494 - protein, 440 aa, Taxus wallichiana var. mairei
MAGSTEFVVRSLERVMVAPSQPSPKAFLQLSTLDNLPGVRENIFNTLLVYNASDRVSADPAKVIRQALSKVLVYYSPFAGRLRKKENGDLEVECTGEGALFVEAMADTDLSVLGDLDDYSPSHEQLLFCLPPDTDIEDIHPLVVQVTRFTCGGFVVGMSFCHGICDGLGAGQFLIAMGEMARGEIKPSSEPIWKRELLKPEDPLYRLQYYHFRLIRPPSTFGKIVQGSLVITSETINCIKQCLREESKEFCSAFEVVSALAWIVRTRALQIPHSENVKLIFAMDMRKLFNPPLSKGYYGNFVGTVCAMDNVKDLLSGSLLRVVRIIKKAKVSLNEHFTSTIVTPRSGSDESVNYENIVGFGDRRRLGFDEVDFGWGHADNVSLVQHGLKDVSVVQSYFLFIRPPKNNPDGIKILSFMPPSIVKSFKFEMETMTNKYVTKP

SEQ ID NO: 38495 - protein, 603 aa, Xylella fastidiosa 9a5c
MTVIEIKVPDIGDYSKVPVIEVLVTVGDHVVKNQGILTLESDKATLEVPSMNNGVVKELKVNVGDLLSQGDVILLLETEDTTAPPSPSNTATSDTTSPPPPSPQPAASKPTAPDQQHADITCRMVVLGAGPGGYTAAFRAADLGLDTVLVERYPNLGGVCLNVGCIPSKALLHAAAVIDEAAHASTFGIDFGKPKITLDTLREYKQNVVNKLTAGLAGMAKQRKVRTVTGIAHFVSPNTLDITTADGSTQRLHFQQCIIATGSHPVKLPNFPWDDPRIMDSTDALELAEVPKKLLVVGGGIIGLEMATVYNALGSHVTIVEFMDQIIPGTDKDLVKPLADRMKKQGIEIHLNTKASHVKADKKGITVSFEAPTQGTQPALKTSTYDRVLVAVGRTPTGNNIGAEKAGVNVTERGFIPVDRQMRSNVPHIFAIGDIVGNPMLAHKATHEGKLAAEVAAAETESGKHREWVARVIPSVAYTNPEIAWIGMTETEAKAKSLNIGVAKFPWAASGRAIGIGRTEGFTKLIFDEDTHRIIGGAIVGVHAGDLLAEIGLAIEMGAEAEDISHTIHAHPTLSESIAMSAEVYDGTITDLYLPKKPATSAK

SEQ ID NO: 38496 - protein, 480 aa, Pseudomonas fluorescens Pf-5
MQLKDAQLFRQQAFIDGAWVDADNGQTIKVNNPATGEILGTVPKMGAAETRRAIEAADKALPAWRALTAKERATKLRRWYELLIENQDDLGRLMTLEQGKPLAEAKGEIAYAASFIEWFAEEAKRIYGDVIPGHQPDKRLIVIKQPIGVTAAITPWNFPAAMITRKAGPALAAGCTMVIKPASQTPFSALALVELAHRAGIPKGVLSVVTGSAGDIGGELTSNPIVRKLSFTGSTEIGRQLMAECAKDIKKVSLELGGNAPFIVFDDADLDKAVEGAIISKYRNNGQTCVCANRLYIQDSVYDAFAEKLKAAVAKLKIGNGLEEGTTTGPLIDEKAVAKVQEHIADALKKGATLLAGGKSMEGNFFEPTILVNVPKDAAVAKEETFGPLAPLFRFKDEAEVIAMSNDTEFGLASYFYARDLGRVFRVAEALEYGMVGVNTGLISNEVAPFGGIKASGLGREGSKYGIEDYLEIKYLCLGI

SEQ ID NO: 38497 - protein, 662 aa, Arabidopsis thaliana
MTTISDLSDDLVGDILSRVPFTSLISVRSTCKKWNALSKNQIFGRKTAARNQFLEFMILDSRVCSLRLDLQGIRNEDKEDFVDPSMKLISIPSNDDQVEISQVYHCDGLLLCIAKENSNVFVWNPYLGQTKWIRPRNTFHRYDRFALGYDNNRNHKILRFLYDEESNESSRRTHIDVYDFSSDSWRVLDVNPDCDIPFYQTGVSLKGNTYFFGQEVTQATKVTEIETCLLCFDFTTERFGPCLPLLFYPPCPSFETVTLSWVRDEKLAVLYNHYVTAEIIEIRISTKIEPNAVSWSSFLTVDMSLVNGLPDHFSMYFEAKSFFIDEEKKVVVLFDSKEIKTCRYQMAYIVGDDGYFKSVNIGEKVGDRERNGSQMKTSLLCIAEDNSGLVVWNPYLCQTKWIRLRNTFHRYDVFALGHDNNRNHKILRFLYDAKKYRTGRGRDNDVYDFSSDSWRRVFDVNPHRGELFYYSGVSLKGNSYFFGQEVTIEEEEEEVISQPRDYLLCFDFTTERFGPRLSLPFNPPSPNFDYLTLSWARDEKLAVLYNHYNTREIIEIWISTKIEPNTVSWSTFLTVDTSLINGLPDRFSTFYGPRSFFIDEEKKVAVFFDNKGTETGCYQVAYIIGDNGYFKSVKIGVISNSQWQQGILVCSSYVPSLVQLQD

SEQ ID NO: 38498 - protein, 327 aa, Wolinella succinogenes
MAKNDLLGGALWDAYSNKVAARMDNPKYLGTLSQEDADAKGAKLIIADYGAESCGDAVRLYWLIDPKTDRIIDAKFKSFGCGTAIASSDMMVELCLGKTVDEAIKITNIDVEKALRDDPETPAVPGQKMHCSVMAYDVIKKAASLYKGVDMASFEDEIIVCECARVSLGTLKEVIRINDLKTVEEVTAYTKAGAFCKSCVKPGGHEEREYYLVDILAQTRAEMDDEKLKTQADKSASGELGFNEMSMVQKVKAVDKVIDDNIRPMLMMDGGNMEVIDIRSSSDGHTDIYIRYVGACAGCASSSTGTLFAIESVLQQKLDSSIRVFPV

SEQ ID NO: 38499 - protein, 218 aa, Zea mays
  misc_feature (72)..(72): Xaa can be any naturally occurring amino acid
  misc_feature (99)..(99): Xaa can be any naturally occurring amino acid
  unsure (1)..(218): unsure at all Xaa locations
MVSLKLQKRLAASYLKCGKGKVWLDPNEVSEISMANSRVYVFAILTGQNIRKLVKDGFIIKKPHKIHSRSRXARRAHDAKQKGRHSGYGKRRGTREARXLPTKVLWMRRMRVLRRLLRKYREAKKIDKHMYHDMYMKVKGNAFKNKRVLMESIHKSKAEKAREKTLSDQFEAKRAKSKASRERKIARREERLAQGPREITPPVSSTAPATGAPKKAKK

SEQ ID NO: 38500 - protein, 294 aa, Triticum aestivum
MEQYEKVEKIGEGTYGVVYKARDRTTNETIALKKIRLEQEDEGVPSTAIREISLLKEMQHGNIVKLHDVVHSEKRIWLVFEYLDLDLKKFMDSCPEFAKSPALIKSYLYQILRGVAYCHSHRVLHRDLKPQNLLIDRRTNALKLADFGLARAFGIPVRTFTHEVVTLWYRAPEILLGARQYSTPVDVWSVGCIFAEMVNQKPLFPGDSEIDELFKIFRVLGTPNEQTWPGVSSLPDYKSAFPRWQAEDLATVVPNLEPVGLDLLSKMLRFEPNKRITARQALEHEYFKDMEMVQ

SEQ ID NO: 38501 - protein, 373 aa, Lactobacillus gasseri
MAESKTTKKEATMTLDKKVKEVVKEVKKDKQITEKEFTAQLIKPYNLQGKAVDQLVQEFEDNGISIVDEKGEPSKLALKKQKDVEKAELKDMSAPSSVRMNDPVRMYLKEIGRVSLLNADQEIALAKRIEAGDEEAKQELAEANLRLVVSIAKRYVGRGMSFLDLIQEGNMGLMKAVDKFDYRLGFKFSTYATWWIRQAITRAIADQARTIRIPVHMVETINKLIRIQRQLLQDLGREPTPEEIGAEMDMPTDKVREILKIAQEPVSLETPIGEEDDSHLGDFIEDKDATSPEQHASYELLKEQLEEVLDTLTDREENVLRLRFGLDDGRTRTLEEVGKVFGVTRERIRQIEAKALRKLRHPSRSNQLKDFLD

SEQ ID NO: 38502 - protein, 389 aa, Mycobacterium bovis AF2122/97
MSLADAAESWLAAHHDDLVGWRRHIHRYPELGRQEYATTQFVAERLADAGLNPKVLPGGTGLTCDFGPQHQPRIALRADMDALPMAERTGAPYASTMPNVAHACGHDAHTAILLGAALALASVPELPVGVRLIFQAAEELMPGGAIDAIAAGALAGVSRIFALHCDPRLEVGKVAVRQGPITSAADSIEITLYSPGGHTSRPHLTADLVYGLGTLVTGLPGVLSRRIDPRNSTVLVWGAVNAGMAANAIPQTGVLSGTVRTASRQTWVDLEELVRQAISALLLPLAIEHTLQYRRGVPPVVNEEISTRILAHAIEAIGPGVLADTRQSGGGEDFSWYLEEVPGAMARLGVWSGDGLQLDLHQPTFDIDERALAIGLRVMVNIIEQAAAH

SEQ ID NO: 38503 - protein, 394 aa, Mycobacterium bovis AF2122/97
MPAASASDRVEELVRRRGGELVELSHAIHAEPELAFAEHRSCAKAQALVAERGFEITTAAGGLDTAFRADYGSGPLVVGVCAEYDALPGIGHACGHNIIAASAVGTALALAEVADDLGLTVALLGTPAEESGGGKALMLQAGTFDDVAVAVMVHPGPTDIAGARSLALSEVTVRYRGKESHAAVAPHLGVNAADAVTVAQVAIGVLRQQLAPGQMVHGIVTDGGQAVNVIPGQARLQYAMRAVESDSLRELQTRMFACFAAGALAAGCEYEIDEAAPAYAELKPDPWLADVCREEMQRLGREPLLPALEAELPLGSTDMGNVTQVLPGIHPVIGLDAGAATVHQRAFTVASAGASADRAVVDGAIMLARTVVRLAQTPDERDRVLAAQQRRAAR

SEQ ID NO: 38504 - protein, 110 aa, Arabidopsis thaliana
  misc_feature (12)..(12): Xaa can be any naturally occurring amino acid
  misc_feature (28)..(28): Xaa can be any naturally occurring amino acid
  misc_feature (40)..(40): Xaa can be any naturally occurring amino acid
  misc_feature (60)..(60): Xaa can be any naturally occurring amino acid
  misc_feature (62)..(62): Xaa can be any naturally occurring amino acid
  misc_feature (79)..(79): Xaa can be any naturally occurring amino acid
  misc_feature (82)..(82): Xaa can be any naturally occurring amino acid
  misc_feature (85)..(85): Xaa can be any naturally occurring amino acid
  misc_feature (93)..(93): Xaa can be any naturally occurring amino acid
  misc_feature (108)..(108): Xaa can be any naturally occurring amino acid
  unsure (1)..(110): unsure at all Xaa locations
HAVSESDVSVHXTFASRYVRTSLPRFKXPENSIPKEAAYXIINDELMLDGNPRLNLASFXTXWMEPECDKLIMSSINKXYVXMDXYPVTNGTXKTDCFDMICTFFSNXPV

SEQ ID NO: 38505 - protein, 309 aa, Yarrowia lipolytica CLIB122
MTTLKALPLTCSGHSRPVTHVSFGEIENRPFLISACKDALPILRNGATGDWIGTYLGHKGSTWCSRMSQGGDRDSTLVCTASADFTCKIWRAATGEELHSIEHPHIVRSCCFSQSGKLLATSCQDGHVRVYQLKDDKYQQTHCIKTMSKTVLWVQDASEPLLIVCTSKGIEWWSVKDTSEPMLKGQVSLGDTPGPFEISGGLLVGPAGNQVYVLDSLTREVLKCHKLDYNVSAVAVSPDRDVFQTGNSGDTWVRVHRYETGELVDTWKGHHGPVHTVAYSPNGDISATGSEDGTVRLWKIRDGPFGLWR

SEQ ID NO: 38506 - protein, 374 aa, Yarrowia lipolytica CLIB122
MLTYSLLLLSALAVAAPTSPKVVSYSLASKYETIRAADGKTDRYLYTNITLGTPPQKFEVTFDTGSADLWVPTAPDQQCSGQCPATAGAFDADASSTYSLLNNNFDVGYIGDPNNRGNWVSDTLTVGSVTLPQFSFGTVQTEDGGIFGVSFEEQESSADDGETYPNFVFASKQQGYIDRAVFSIFSPSASSSEVTFLLGGIDHAKFSGDLAWNKVPDPSRGASILVDDFSVNGVNFSLYSSFAVDTGSVATLIPDDVFQHLTRTVQVGSWIPDLGVYTIDCNAEPSISFNLPNGTIHAHPETMVVPISRLSGNQSDTGCYFGLVSSETYDGISILGDSFLRNAYAVFDLEDYKLGFAQALYTDKSDIQPVQGPL

SEQ ID NO: 38507 - protein, 323 aa, Leptospira interrogans serovar Copenhageni str. Fiocruz L1-130
MRLLITGGAGYIGSHVVALLLEKKHELVIVDNLEKGNRSNLFSETQLIQGNIQDESVLENAFSKPIDAVFHFAAWKAAGESMTDPSKYALNNINGTLKLLTFMEKAGTNQFIFSSSAAVYGSPEYLPIDEKHPVRPENYYGYTKLAIEQNLKWYETLKGFKFAALRYFNAAGYDPKGRVRGLERTPANLLPIIMEAAVGIRKDFEVFGTDYETPDGSCVRDYIHVTDLAKAHVLSLDYLDSEKKSLTVNLGSEKGYSVLEMVRLAEEVVGRSIPHKISGRRAGDPAKLLASSAMAQRLLQWVPEYSEAKTLLKTMWDVYQNPA

SEQ ID NO: 38508 - protein, 452 aa, Pseudomonas syringae pv. syringae B728a
MAFDFDLFVIGAGSGGVRAARFAAGFGARVAVAESRYLGGTCVNVGCVPKKLLVYGAHFSEDFDHAKGFGWSLGEAEFDWATLIANKDREINRLNGIYRKLLVDSGVTLLEGHARLTGPQQVEINGQTYSAERILVATGGWPQVPDVPGREHAITSNEAFYLKTLPKRVVVVGGGYIAVEFASIFNGLGADTTLVYRRELFLRGFDGGVRTHLHEELLKRDMTIRFNSDIERIDKQADGSLLLSMKGGGTLETDCVFYATGRRPMLDNLGLDSVDVKLDEHGYIKVDEHYQSSEPSILAIGDVIGGVQLTPVALAEGMAVARRLFKPEQYRPVDYNHIPTAVFSLPNIGTVGLTEEDAIKAGHDVQIFESRFRPMKLTLTDDQERTLMKLVVDAKTDRVLGCHMVGPDAGEIVQSLAIAIKAGATKQVFDDTIGVHPTAAEEFVTMRTPVKR

SEQ ID NO: 38509 - protein, 330 aa, Yarrowia lipolytica CLIB122
MASLPNRSTVSKGKYSLTDFSIQRTLGTGSFGRVHLVRSVHNNRYYAIKVLKKAQIVKMKQVEHTNDERRMLKLVEHPFLIRMWGTFQDSKNLFMVMDYVEGGELFSLLRKSQRFPNPVAKFYAAEVTLALEYLHSHNIIYRDLKPENILLDKNGHIKITDFGFAKEVRDVTWTLCGTPDYIAPEVVTTKAYNKSVDWWSLGILIYEMLTGYTPFYDHTPMKTYENILMGHVRYPSYLHPDVTDLLTKLITKDLTRRYGNLQGGPQDVKNHPWFSEVIWEKLLSKDIETPYEPPIQSGVGDTSLFDSYPEEELDYGIVCPDPYGKLFGDF

SEQ ID NO: 38510 - protein, 585 aa, Thermoactinomyces vulgaris
MLLEAIFHEAKGSYAYPISETQLRVRLRAKKGDVVRCEVLYADRYASPEEELAHALAGKAGSDERFDYFEALLECSTKRVKYVFLLTGPQGEAVYFGETGFSAERSKAGVFQYAYIHRSEVFTTPEWAKEAVIYQIFPERFANGDPSNDPPGTEQWAKDARPRHDSFYGGDLKGVIDRLPYLEELGVTALYFTPIFASPSHHKYDTADYLAIDPQFGDLPTFRRLVDEAHRRGIKIILDAVFNHAGDQFFAFRDVLQKGEQSRYKDWFFIEDFPVSKTSRTNYETFAVQVPAMPKLRTENPEVKEYLFDVARFWMEQGIDGWRLDVANEVDHAFWREFRRLVKSLNPDALIVGEIWHDASGWLMGDQFDSVMNYLFRESVIRFFATGEIHAERFDAELTRARMLYPEQAAQGLWNLLDSHDTERFLTSCGGNEAKFRLAVLFQMTYLGTPLIYYGDEIGMAGATNPDCRRPMIWEEKEQNRGLFEFYKELIRLRHRLASLTRGNVRSWHADKQANLYAFVRTVQDQHVGVVLNNRGEKQTVLLQVPESGGKTWLDCLTGEEVHGKQGQLKLTLRPYQGMILWNGR

SEQ ID NO: 38511 - protein, 499 aa, Saccharomyces cerevisiae
MSYNFTGTPTGEGTGGNSLTTDLNTQFDLANMGWIGVASAGVWIMVPGIGLLYSGLSRKKHALSLLWASMMASAVCIFQWFFWGYSLAFSHNTRGNGFIGTLEFFGFRNVLGAPSSVSSLPDILFAVYQGMFAAVTGALMLGGACERARLFPMMVFLFLWMTIVYCPIACWVWNAEGWLVKLGSLDYAGGLCVHLTSGHGGLVYALILGKRNDPVTRKGMPKYKPHSVTSVVLGTVFLWFGWMFFNGGSAGNATIRAWYSIMSTNLAAACGGLTWMVIDYFRCGRKWTTVGLCSGIIAGLVGITPAAGFVPIWSAVVIGVVTGAGCNLAVDLKSLLRIDDGLDCYSIHGVGGCIGSVLTGIFAADYVNATAGSYISPIDGGWINHHYKQVGYQLAGICAALAWTVTVTSILLLTMNAIPFLKLRLSADEEELGTDAAQIGEFTYEESTAYIPEPIRSKTSAQMPPPHENIDDKIVGNTDAEKNSTPSDASSTKNTDHIV

SEQ ID NO: 38512 - protein, 334 aa, Haemophilus somnus 2336
MTIKIGINGFGRIGRIVFRAAQTRDDIEVVGINDLIDVEYMAYMLKYDSTHGRFDGTVEVKDGNLVVNGKAIRVTSERDPANLKWNELGVDVAVEATGLFLDDATARKHITAGAKKVVLTGPSKDATPMFVNGVNFDAYAGQDIVSNASCTTNCLAPLAKVINDKFGIKDGLMTTVHATTATQKTVDGPSAKDWRGGRGAAQNIIPSSTGAAKAVGKVIPALNGKLTGMAFRVPTPNVSVVDLTVNLEKPATYAEICAEIKRASENEMKGVLGYTEDAVVSTDFNGCSLTSVFDAAAGIALTDTFVKLVSWYDNETGYSNKVLDLVAHVHNYKG

SEQ ID NO: 38513 - protein, 217 aa, Zea mays
AGGLSPPAQPPRSDDGGRKRMSASRFIKCVTVGDGAVGKTCMLISYTSNTFPTDYVPTVFDNFSANVVVDGNTVNLGLWDTAGQEDYNRLRPLSYRGADVFLLAFSLISKASYENVSKKWIPELKHYAPGVPIILVGTKLDLRDDKQFFVDHPGAVPITTAQGEELRKQIGAPYYIECSSKTQLNVKGVFDAAIKVVLQPPKAKKKKKAQRGACSIL

SEQ ID NO: 38514 - protein, 585 aa, Thermoactinomyces vulgaris
MLLEAIFHEAKGSYAYPISETQLRVRLRAKKGDVVRCEVLYADRYASPEEELAHALAGKAGSDERFDYFEALLECSTKRVKYVFLLTGPQGEAVYFGETGFSAERSKAGVFQYAYIHRSEVFTTPEWAKEAVIYQIFPERFANGDPSNDPPGTEQWAKDARPRHDSFYGGDLKGVIDRLPYLEELGVTALYFTPIFASPSHHKYDTADYLAIDPQFGDLPTFRRLVDEAHRRGIKIILDAVFNHAGDQFFAFRDVLQKGEQSRYKDWFFIEDFPVSKTSRTNYETFAVQVPAMPKLRTENPEVKEYLFDVARFWMEQGIDGWRLDVANEVDHAFWREFRRLVKSLNPDALIVGEIWHDASGWLMGDQFDSVMNYLFRESVIRFFATGEIHAERFDAELTRARMLYPEQAAQGLWNLLDSHDTERFLTSCGGNEAKFRLAVLFQMTYLGTPLIYYGDEIGMAGATDPDCLRPMIWEEKEQNRGLFEFYKELIRLRHRLASLTRGNVRSWHADKQANLYAFVRTVQDQHVGVVLNNRGEKQTVLLQVPESGGKTWLDCLTGEEVHGKQGQLKLTLRPYQGMILWNGR

SEQ ID NO: 38515 - protein, 218 aa, Phytophthora infestans
QQTDTMSRPTISEVIAERKANNTAAFITFVPCGFKTKADTVDILLGLQRGGANIIEVGIPYSDPQADGPTIQRAHQVGVDQGITLHDVLATVSEARTKGLTTPVVLMGYYNNILQYGEVKICPDAQKAGVDGFIIVDLPPEEAKTLSDDAAKHGLAYIPLVSPTTTEERMKLIDSVAHGFVYCVSLTGVTGARNELPPNLDAFMAKIRANVKHPLALG

SEQ ID NO: 38516 - protein, 332 aa, Cucumis sativus
TDFEEMEPLFNTEINKNLNQAEFEALLQEFKTDYNQTHFVRNKEFKEAADKMQGALREIFVEFLERSCTAEFSGFLLYKELGRRLENQSSVAEIFSLMSRDEARHAGFLNKGYRISTWPLDLGFLTKARKYTFFKPKFIFYATYLSEKIGYWRYITIYRHLKANPEFQCYPIFKYFENWCQDENRHGDFFSALLKAQPQFLNDWKAKLWSRFFCLSVYVTMYLNDCQRTAFYEGIGLNTKEFDMHVIIETNRTTARIFPAVPDVENPEFKRKLDRMVEINEKLIAVGETNDLPLVKSLKRIPLAAALVSEILAAYLMPPIESGSVDFAEFEP

SEQ ID NO: 38517 - protein, 373 aa, Phaseolus vulgaris
SGVVKSTTEFPNKFFYCFWWGLRSLSSLGQDLKTSTYVPEIAFAIFISIFGLVLFSSLIGNMQEYLQSTTVRVEEMRVKRQDAEQWMSHRMLPENLKRRIRHYEQYQWQENRGVEEEALIRNLPKDLRRDIKRHLCLALVKKVPLFKEMDEQLLDAICTRLKPVLYTEKSHIFREGDPVDEMLFIMRGQVSTVTTNGGRTGFFNSSFLVAGQFCGEELLTWALDPNSSSNLPISTRTVETVSEVEAFALMADDFKIVASQFRRLSSKQLQHAFRFYSLQFRTWGACFIQAAWRRYWKRKIERSLHVKEDKLQDALTNDDGSTLSLGATIYASRFAANALRNLRENNRQNRTQQRLLPLLPPKPAEPDFTSLKH

SEQ ID NO: 38518 - protein, 458 aa, Bacteroides fragilis NCTC 9343
MKQYDAIIIGFGKGGKTLTAELAKRGWKVALIERSAMMYGGTCPNIACVPTKRLIHEAEKVSWLYPTDYEKQAEAYKAAIARKNEMTAASRGNMFNKLSSLPNVTIYTGMASFVSKDVVKVTLPDEVIELQGKKIFINTGSTSIIPAIDGLKDSKRVYTSTSLMELDVLPRHLIIVGGGYIGLEFASMYASFGSKVTVLEGGNKFIAREDRDIADAVKETLEKKGIEIRLNARAQSIQDTADGVTLTYTDTADGKPVTIEGDAILVATGRKPMTEGLNLQAAGVEVDSHGAIVVNGYLHTTAPNIWAMGDVKGGLQFTYISLDDYRIIRDDLFGNKERTADDRNPVAYSVFIDPPLSHVGLTEEEAIKRGYSFKVSRLPASALPRARTLQQTDGILKAIVDSHSGRIMGCTLFCAESSEVINVVNMAMKTGQHYTFLRDFIFTHPSMGEGLNDLFSID

SEQ ID NO: 38519 - protein, 320 aa, Deinococcus radiodurans R1
MFRSLGRRLYPVSMQIPVIVVGGFLGAGKTTLVNHLIRSLPRRLGIIVNEFGQTGVDGSLIERLDDDVTELAAGCLCCTGRDDLLRALMEISMREHKPDALIVELSGVADPTPVLTTLLERSVRAAFRLTTLVAVVDARHVMQTLQDHPEAARQLAYANLVVINKTDAADPARLDHAEGVLRGLNPLAEVVRVEQGQIDAEKLLARRDFDPSVLTGAGAVEHTPGLSSFTLRTDRPLDPYAWQRFMTSFILARPAEVLRVKGFLTLHGYPQRVLFQAVRDLFTADAWDDDLGGSELVFIGRGLDRAEFEMAFAACALPEG

SEQ ID NO: 38520 - protein, 566 aa, Phaseolus vulgaris
IFQFRTGFIAPSSRVFGRGVLVEDSWAIARRYLSSYFLVDILAVLPLPQVVILVIIPKMSGFKSLNTKNLLKFVVFFQYVPRLLRVIPLYREVTRASGILTETAWAGAAFNLFLYMLASHVVGAFWYLFSIERETTCWQEACRSNTTVCNKADMYCNDYWGGLSKISTFLNTSCPIQKEDKNLFDFGMFLDALQSGVVESRDFPQKFFYCFWWGLKNLSSLGQNLGTSPMFGKYALQFSFLYLVWVFSFLIGNMQTYLQSTTTRLEEMRVKRRDAEQWMSHPIASDGLRVRIRRYEQYKWQETRGVDEDNLVRNLPKDLRRDIKRHLCLALLMRVPMFEKMDEQLLDAMCDRLKPVLFTEESYIVREGDPVDEMLFIMRGKLLTITTNGGRTGFFNSEYLKAGDFCGEELLTWALDPHSSSNLPTSTRTVQTLSEVEAFALKADDLKFVASQFRRLHSKQLRHTFRFYSQQWRSWAACFIQAAWRRYSKRKLEESLVEDENRLQNVLAKSGGSSPSLGATIYASRFAANALTLLRRNGAKKGRVAERLPPMLFQKPAEPDFTADEE

SEQ ID NO: 38521 - protein, 239 aa, Thermosynechococcus elongatus BP-1
MMTTSLATKLREGTKKAHTMAENVGFVRCFLKGTVEKSSYRKLVASLYHVYSAMEQEMERLKDHPIVGKIYFPELNRKSSLERDLTYYFGSNWREEIPPSPATQAYVARIHEVANTAPELLVAHSYTRYLGDLSGGQILKGIAERAMNLQDGEGTAFYRFESISDEKAFKQLYRQRLDELPVDEATADRIVDEANAAFGMNMKIFQELEGNLIRAIGQLLFNTLTRRKQRGSTELATAD

SEQ ID NO: 38522 - protein, 398 aa, Pseudomonas fluorescens PfO-1
MSLFSAVEMAPRDPILGLNEAFNADTRTNKVNLGVGVYCNEEGRIPLLRAVIEAETIRAAQHASRGYLPIDGIAAYDQAVQKLLFGNDSPLLAAGRVITTQAVGGTGALKIGADFLKQLLPNAVVAISDPSWENHRALFETAGFPVQNYRYYDAATHDVNRAGLLEDLNALPNGSIVVLHACCHNPTGVDLSPADWNNVLEAVKAKGHVPFLDMAYQGFGDGIAEDAAAVRLFAESGLTFFVSSSFSKSFSLYGERVGALSIISESKEESARVLSQVKRVIRTNYSNPPTHGASIVAAVLNSPELRAQWEAELAEMRLRIRGMREQMVALLAKKAPQRDFSFVGRQRGMFSYSGLTTEQVHRLRNEFGIYALDTGRICVAALNQSNIEAVTDAIVQVI

SEQ ID NO: 38523 - protein, 467 aa, Arabidopsis thaliana
MSSSYNTIALSSTPTFLLSSAAAGPGPNNFNRQEAAMTMVQQQPTSSVAPPPKKRRNQPGNPNPDAEVIALSPKTIMATNRFLCEVCNKGFQREQNLQLHRRGHNLPWKLKQKSNKEVRRKVYLCPEPSCVHHDPARALGDLTGIKKHYYRKHGEKKWKCDKCSKRYAVQSDWKAHSKTCGTKEYRCDCGTIFSRRDSYITHRAFCDALIQESARNPTVSFTAMAAGGGGGARHGFYGGASSALSHNHFGNNPNSGFTPLAAAGYNLNRSSSDKFEDFVPQATNPNPGPTNFLMQCSPNQGLLAQNNQSLMNHHGLISLGDNNNNNHNFFNLAYFQDTKNSDQTGVPSLFTNGADNNGPSALLRGLTSSSSSSVVVNDFGDCDHGNLQGLMNSLAATTDQQGRSPSLFDLHFANNLSMGGSDRLTLDFLGVNGGIVSTVNGRGGRSGGPPLDAEMKFSHPNHPYGKA

SEQ ID NO: 38524 - protein, 210 aa, Oryza sativa
MVRSRGRPSLGRQRIEIRRIDNSGRRQVTFSKRRNGLFKKASELSTLCGASVAVVAFSSAGNVFAFGQPTVDAVVRRFDPLHADGADPAPAAVEDGGGGGDDVVVADPEELDALRRAEEQTKAQVAAEQARMRDVGDKVTQAMAGRALWWEADVEALGEAELPEFVRALERLRDSVHRHASTLASTATPLPPPPEQEEEVPELDVSDYSF

SEQ ID NO: 38525 - protein, 217 aa, Arabidopsis thaliana
MSKLQSEAVREAISSIITHCKETKPRNFTETIELQIGLKNYDPQKDKRFSGSVKLPHVPRPKMKICMLGDAQHVEEAEKIGLESMDVEALKKLNKNKKLVKKLAKKFHAFLASESVIKQIPRLLGPGLNKAGKFPTLVSHQESLESKVNETKATVKFQLKKVLCMGVAVGNLSMEEKQIFQNVQMSVNFLVSLLKKNWQNVRCLYLKSTMGPPNRVF

SEQ ID NO: 38526 - protein, 220 aa, Xylella fastidiosa 9a5c
MHSLEHLLQNNRNWCERINQEDPEFFARLSKQQSPEYLWIGCSDSRVPANQIIDMAPGEVFVHRNVANVVVHTDLNCLSVIQFAIDVLKVKHILVVGHYGCGGVLASLTRARLGLVDNWIRHVTDVAEKHNSYLETIVALPDQHARLCELNVLEQVLNVCRTSIVRDAWSRTQPLTVHGWVYSLSNGLVHDLGIDVDRFEMLPSCYADALARIQADQVVH

SEQ ID NO: 38527 - protein, 668 aa, Geobacter sulfurreducens PCA
MAAVSLTNEDARLGADTLRMLAVDAVEAAASGHPGLPMGAADYAFLLWHSHLRFDPADPEWPGRDRFILSAGHGSMLLYGLLHLFGFDLPLDELKRFRQWGSRTPGHPEYGHTPGVEVTTGPLGQGFAMGVGMALAARMGSARFADERFDPCAHHIYALVSDGDLMEGVSQEAASLAGHLKLGNLVYLYDDNRITIEGSTDLAFSEDTAGRFAALGWHVQAVDGHDVRQVDEALWRARVERERPSLIIARTHIAQGSPGKHDSAAAHGSPLGAEEAAATRRSLGWPDELFHVPERIRELCEQRREALAEARAAWQDELRRWRRRNSDKGRLWDLMAEKGVPRDLESRLLAAVGAEAGATRSLAGKVLQAAAAVVPSLVGGSADLEPSTNTRIKDSSSVLPGSYGGRNLHFGVREHAMAAIMNGMARHGGFIPYGATFLVFADYCRPAIRLAALMKQQAVYVFTHDSLFVGEDGPTHQPVEQLSSLRLIPNLRVIRPADGPETALAWAAALRRTDGPTALVLTRQKVPAIAREETLDPRTFAKGGYVVRSGGAAPAVVLMASGSEVGLALAAAEIMAGNGVAARVVSIPCMEAFLAQPESYRRRCLPGRVPRVAVEAGHGGLWWRLLGPAGLFIGLETFGASAPEKVLAEQYGFTPELVARRVAEFVER

SEQ ID NO: 38528 - protein, 590 aa, Mycobacterium bovis AF2122/97
MICQHRYDVVIVGAGGAGMRAAVEAGPRVRTAVLTKLYPTRSHTGAAQGGMCAALANVEDDNWEWHTFDTVKGGDYLADQDAVEIMCKEAIDAVLDLEKMGMPFNRTPEGRIDQRRFGGHTRDHGKAPVRRACYAADRTGHMILQTLYQNCVKHDVEFFNEFYALDLALTQTPSGPVATGVIAYELATGDIHVFHAKAVVIATGGSGRMYKTTSNAHTLTGDGIGIVFRKGLPLEDMEFHQFHPTGLAGLGILISEAVRGEGGRLLNGEGERFMERYAPTIVDLAPRDIVARSMVLEVLEGRGAGPLKDYVYIDVRHLGEEVLEAKLPDITEFARTYLGVDPVTELVPVYPTCHYLMGGIPTTVTGQVLRDNTSVVPGLYAAGECACVSVHGANRLGTNSLLDINVFGRRAGIAAASYAQGHDFVDMPPNPEAMVVGWVSDILSEHGNERVADIRGALQQSMDNNAAVFRTEETLKQALTDIHALKERYSRITVHDKGKRFNTDLLEAIELGFLLELAEVTVVGALNRKESRGGHAREDYPNRDDVNYMRHTMAYKEIGADKEGPELRSDVRLDFKPVVQTRYEPKERKY

SEQ ID NO: 38529 - protein, 289 aa, Brassica napus
MATQGSAQKEADIKMMCAAEVHLGTKNCNYQMERYVFKRRNDGIYIFNLGKTWEKLQMAARVIVAIENPQDIIVQSARPYGQRAVLKFAQYTGANAIAGRHTPGTFTNQMQTSFSEPRLLILTDPRTDHQPIKEGALGNIPIIAFCDTDSPMRFVDIGIPANNKGKHSIGCLFWLLARMVLQMRGTIRPAQKWDVMVDLFFYREPEEAKPEDEDEVAPQAEFGLPAPEYGGGDQWTTAAIPDAAWPGEAQAPISAAPAAGSWNDSAAPAAAEGGWDAAVPPTTAVTNWE

SEQ ID NO: 38530 - protein, 585 aa, Thermoactinomyces vulgaris
MLLEAIFHEAKGSYAYPISETQLRVRLRAKKGDVVRCEVLYADRYASPEEELAHALAGKAGSDERFDYFEALLECSTKRVKYVFLLTGPQGEAVYFGETGFSAERSKAGVFQYAYIHRSEVFTTPEWAKEAVIYQIFPERFANGDPSNDPPGTEQWAKDARPRHDSFYGGDLKGVIDRLPYLEELGVTALYFTPIFASPSHHKYDTADYLAIDPQFGDLPTFRRLVDEAHRRGIKIILDAVFNHAGDQFFAFRDVLQKGEQSRYKDWFFIEDFPVSKTSRTNYETFAVQVPAMPKLRTENPEVKEYLFDVARFWMEQGIDGWRLDVANEVDHAFWREFRRLVKSLNPDALIVGEIWHDASGWLMGDQFDSVMNYLFRESVIRFFATGEIHAERFDAELTRARMLYPEQAAQGLWNLLDSHDTERFLTSCGGNEAKFRLAVLFQMTYLGTPLIYYGDEIGMAGATDPDCKRPMIWEEKEQNRGLFEFYKELIRLRHRLASLTRGNVRSWHADKQANLYAFVRTVQDQHVGVVLNNRGEKQTVLLQVPESGGKTWLDCLTGEEVHGKQGQLKLTLRPYQGMILWNGR

SEQ ID NO: 38531 - protein, 307 aa, Chlorobium tepidum TLS
MSEHHHDHSHDHGHAGHQYHAVGSIQIAFFMNFGFTILEAIGGVMTNSTAILANAVHDFGDSIAVGQAWYFEKLSGRTGDKRYSYGYQRFSIFGALVSALMMLASSFLVLVEAVPRLLHPEHPNAKGMVAFALVGVAVNALAMLRLKGQAGMNARVIALHLLEDVLGWLSVLLVSVVLLFTSLPILDPLLAIVITLYILTGVVKNLRAMVPVFLQAVPSELSLDKVVADIQQTEHVTGVHHAHLWSLDGQRTVFTAHLEIGCDVNPAEYASIKEEIRKLVARHGIYHSTVELEYPGEVCRNESHKDG

SEQ ID NO: 38532 - protein, 118 aa, Campylobacter coli RM2228
MKKLNKEEARVILNKGTEAPFSGKYNNFYEKGIYLCKQCGSKLYRSEDKFKSGCGWPSFDDEIKGAIKRLPDKDGIRTEIVCANCNGHLGHVFEGEGFSAKNIRHCVNSISLEFVKGE

SEQ ID NO: 38533 - protein, 661 aa, Vibrio cholerae O1 biovar eltor str. N16961
MTSRVSGVISTDEIIVILSVFVRYDVEQPSKLDRVRADYNVHYWSQGFFGIDDQGEVYVSPRKDKAHQTQLSSIVKQLEARDLNLPVLVRFPQILHQRVHNICDAFNQAIEEYDYPNKYLLVYPIKVNQQKEVVDEILASQAELEHKQLGLEAGSKPELLAVLAMAQQASSVIVCNGYKDREYIRLALIGEKLGHKVFIVLEKLSELDLVLKEAKSLGVKPRLGLRIRLASQGAGKWQSSGGEKSKFGLAASQVLTVINRLKAENQLEALQLVHFHLGSQMANIRDVRNGVNEAVRFYCELRELGAHIDFFDVGGGLAVDYDGTRSQSSNSMNYGLHEYARNIVSTVSDVCNLYGQPRPVIISESGRSITAHHAVLITNVIGTEAYSPEEIPAPGADAPMLLKNMWRGFEEVQHGTDDRALIEIYNDTQSDLSEAHSQFATGVLNLEHRAWAEQLSLRIYHELRQKMSNKNRFHRPILDELQERLADKFFVNFSLFQSLPDAWGIDQVFPVLPLSGLEEMNDRRAVMLDITCDSDGAVEQYVEGQGIESTLPVPAWTSDKPYLMGFFLVGAYQEILGDMHNLFGDTHSAVVNINDNGESEIAFINEGDTVEDMMRYVHIDVDKIRTNYRQLVSQRVAKEEQETVLAELELGLSGYTYLEDF

SEQ ID NO: 38534 - protein, 227 aa, Frankia sp. EAN1pec
MSEDSTAGTTPLHLRGRDAVIAASTDARWRDGAPPDYRFSREVMPGERTVHHTPGSLADVVEQLVQVFEMELSYKSDPTQWVSMVSDRIRVSMNGGPAADSAELTERGSYNVLIGENPYYSATAETFESSHETFHRAFPGGFFWEVLEVYSPPPVIAFKWRHWGTFAGPYQGHQPTGERMELFGVTVARCAPDLRLLAVENFYDNTTFLGRLAGADEPGTAGHPGRA

SEQ ID NO: 38535 - protein, 532 aa, Pseudomonas syringae pv. syringae B728a
MISAAVKTQKGESFNQPVGELTHLPVFSTKSVPVLQMPTSTVQPQPTMSQVNRRKVLFVTSELADLVKTGGLGDVSAALPRAMRHLHDVRVLIPGYPQVINSGNPIHIISQLGGHAALPPCKVGRMDMKDGLVIYVLICPELYEREGTPYADSNGRDWSDNHIRFARLGLAAAEFAAGEVKSQWCPELVHAHDWPAGLAPAYMRWRGQSTPSIFTVHNLAYQGTVSTASSRELGIPDSAITPEGMEFYGQLSFIKAGMAFASHITTVSATYAREITTPEFGCGLEGFLQSKANKGQLSGIPNGIDESWDAATDEHLICHFAPNEWTRKEINADYVRELFELDASTGPLFAVVSRLVYQKGLDLTIGVAEHIVNNGGQIAIIGRGEPEEEEAMRELAARFPGRVGVRIGFNETDARRMFAGSDFLLMPSRYEPCGLSQMYAQRFGSLPVARNTGGLADTIEDGVTGFLFNESTVESYTQALDRAFQVFAHPELLNAMRCRAMAAPFNWHQAVEPYADLYRDLLKKNVSVSSNY

SEQ ID NO: 38536 - protein, 638 aa, Bradyrhizobium japonicum USDA 110
MNMIVTPASPATPNGTTRPQVRIVIVGHVDHGKSTLVGRLLHETGSLPDGKLEMLKAVSARRGMPFEWSFLLDALQTERDQGITIDTTQIRFRTNSRDIVLIDAPGHAEFLRNMITGASQADGAVLIIDALEGVRDQTRRHGYLLHLLGVKQVAIVVNKMDRVDFSADRFQAISDEISAHLNGLGVTPTAVIPISARDGDGVATRTDRIGWYKGPTVVEALDQLEPARPLEALALRLPVQAIYKFDDRRIVAGRIESGSLVAGDEIVIMPAGKIAKIKTVESWPATPIAGRQGAGRSVGITLDRELFIERGDIVAHAGSAPRETRRLRARIFWLHDKPLAKGDQLLVRCGPKESRATVVAIEKAVDPGELSSVENKAIGRNHVGEIDISLSNPIATDPYTENPRTGRLVIEVSGRIAGGGLVLSVDAGQRAVPVDIVPVESALRPDERSARYQHNGAVVWLTGLPASGKSTLAKALERRLFTNGGSPILLDGDTLRAGLNNDLGFSASDRSENIRRLAEVATHLARNGHIAIVAAVSPAREDRATARRIADTAFREIHVATPAGVCEERDPKGHYKKARAGALASFTGIGNDYETPQAAELVIDTSTRTVTEAADEIEQMLKTTGVLFDEVVDLAANI

SEQ ID NO: 38537 - protein, 96 aa, Vibrio cholerae O1 biovar eltor str. N16961
MNIRPLHDKLIVERLEVENKSEGGIVLTSQSVKKSNRGKVVAVGLGRPLKNGDRARMEVKTGDQIIFNDGYGVKTEKVDGKEYLILSESDVLAIVE

SEQ ID NO: 38538 - protein, 675 aa, Neurospora crassa
MLRQSIIAASHCPNAPVAGITIPPTRAATRSLVRTPPGPSSGPFEPLTPPSPSKLGAPYPARSYTRTRRWSRRLLILSSLIGVAYLTDKYVYASGLARSLRTFGVGLVVAADYKLNFRPEPLSIPWIGIPEGIPELHRRNAERLSDLLRHNGGLYLKIGQAIAMQSAVLPPEFQAMFSRMFDDAPQDSWEEVEQVIREDFGGRSVEEVFGVSFSGAEGRGVMERTARASASVAQVHWARLPDGREVAIKIQKPEIERQIGWDLWAFKVVTWVYTWWFDLPLYSLVPFISERLRLETDFENEAKNSEIMRQLVENEPSLRGRVYIPPVYPELSSKRVLTTEWIEGIRLWDKDAMTRPWLDGYGKGSAGVHGAQLDPPDMPAIRRELRKNTQGYTFMIKPERTEWKGRRGKGGLGLSTKDVMTTMVDLFSAQIFKWGVVHCDPHPGNVFIRRLPNGRAELVLIDHGLYVYMSDKFRHEYGEFWKALMTFDNNKIKEITDEWGIKAVDLFASATLLRPYEGGDDGGFQAKLMKHLDGNKTASERSYEMQARMKQGIRDVLADEDKWPKELIFIGRNMRIVQGNNQYLGSPVNRIKMMGEWASRSSFQDPNLPLGQRLVNYWHHFLFKCVLALTDVAFYFFRVRQLLHRGGGMEDELEARMRDVAKEFGVELQHNVFEG

SEQ ID NO: 38539 - protein, 530 aa, Vibrio cholerae O1 biovar eltor str. N16961
MAAKHVLFSTDARQKMLSGVNLLANAVKVTLGPKGRHVVLNKSYGAPTITKDGVSVAKEIELADKFENMGAQMLKQVASKANDEAGDGTTTATVLAQALINEGMKAVAAGMNPMDLKRGIDKAVSAAVEKLHQLAKPCSDTQSITQVGAISANSDHAIGEIIAQAMEKVGRNGVITVEEGQALQNELSVVEGMQFDRGYLSPYFINQPKAGCVELENPYVLLVDKKISHIRELLPILESVAKASRSLLIIAEDVDGDALATLVVNSMRGIIKVAAVKAPGFGEQRKAMLEDIAALTAGRVISEEIGLELEKVTLDDLGSAKKVTINKDNTTIVDGAAEPSALQDRIAQIQHQLEHTTSQYDRDKLQQRIAKLSGGVAVIKIGAATEVEMKEKKDRVDDALHATRAAVEEGIVAGGGVALLKIANELSNLQGDNDDQNVGIRIALRAMEEPLRQIAINAGDEASVIANQVKTGDEHYGYNAATGQFGNMLEMGILDPAKVTRSALQFAASIAGLMITTEAMVSEVDKESAA

SEQ ID NO: 38540 - protein, 405 aa, ASPERGILLUS NIDULANS FGSC A4
MPVTDWADICVHCAELLTSVPLSIIIAAICATVAGVFVSFYAFLTLVAPTPREPLPEETTYRTISKDGSITEPQSLPSWQRPGSNKADPGEAELFMSLVVPAYNEEDRLGGMLEEAVNYLERMYGTLASSRSEGKPLRQRKTANGHANGIANSNTETTPHRKGWEIIIVSDGSTDNTEEMAFSFARDHQLSLHPKGHAGPWTPEPREGVHIPPGTIRVVTLAKNRGKGGAVTHGMRHVRGQYVIFADADGATNFADLGKLVTACQEVEDSHGRGVAVGSRAHMVGSDAVVKRSKLRNFLMHSFHLILWLLTPAKTAMIKDTQCGFKLFSRASLPAIVPYMHSEGWIFDVEMLMLAEFARIPVAEVPVDWREVGGSKLNVIRDSVGMAWSLAVLRAAWLLGVYRRT

SEQ ID NO: 38541 - protein, 210 aa, Campylobacter lari RM2100
MKKGYFKVDFERKNPQSAYEKFIQIIKRSLNTELFVGLYVVLREMLKKNNSATIKYPMEKVSLDNRYRAVHRLMRFIESENECCIGCGLCEKICISNCIRMETSLGEDGRKKVENYSINLGRCIYCGFCADVCPELAIVHGKEYENAAEQRSYFGQKQDFLTPIDELKNQVIFEGSGSLRKDADDLVKKTPNYYEIDLQRQQDTPKEENV

SEQ ID NO: 38542 - protein, 276 aa, Ustilago maydis 521
MSKVPAALNPTEEDISLLLAAQTHIGTKNADKQMAPYIYKRRADGIHLLNIGKTWEKIVFAARILAAIENPADICVISGRQYGHRAVLKFAAQTGATAIAGRFTPGSFTNYITRSFKEPRVIVVTDPRVDHQAIREASYVNIPCISFVDSDSPLKFVDVAIPGNVRGRHSVGLLWWLLCRTVLRIKGGDLSVMPDMFFYRDPEEVEREAQEAAAAAQAAKETAEPTTEGAADVQADVPLAVAANLATETGNVDWSAEGAQDWAADGAAEQATSSWE

SEQ ID NO: 38543 - protein, 784 aa, Oryza sativa
  misc_feature (729)..(729): Xaa can be any naturally occurring amino acid
  unsure (1)..(784): unsure at all Xaa locations
MAAILPDLATQVLVPAAAVVGIAFAVVQWVLVSKVKMTAERRGGEGSPGAAAGKDGGAASEYLIEEEEGLNEHNVVEKCSEIQHAISEGATSFLFTEYKYVGLFMGIFAVLIFLFLGSVEGFSTKSQPCHYSKDRMCKPALANAIFSTVAFVLGAVTSLVSGFLGMKIATYANARTTLEARKGVGKAFITAFRSGAVMGFLLAASGLVVLYIAINLFGIYYGDDWEGLFEAITGYGLGGSSMALFGRVGGGIYTKAADVGADLVGKVERNIPEDDPRNPAVIADNVGDNVGDIAGMGSDLFGSYAESSCAALVVASISSFGINHEFTPMLYPLLISSVGIIACLITTLFATDFFEIKAVDEIEPALKKQLIISTVVMTVGIALVSWLGLPYSFTIFNFGAQKTVYNWQLFLCVAVGLWAGLIIGFVTEYYTSNAYSPSCPSHLEFPLSSPVQDVADSCRTGAATNVIFGLALGYKSVIIPIFAIAFSIFLSFSLAAMYGVAVAALGMLSTIATGLAIDAYGPISDNAGGIAEMAGMSHRIRERTDALDAAGNTTAAIGKGFAIGSAALVSLALFGAFVSRAAISTVDVLTPKVFIGLIVGAMLPYWFSAMTMKSVGSAALKMVEEVRRQFNSIPGLMEGTTKPDYATCVKISTDASIKEMIPPGALVMLSPLIVGIFFGVETLSGLLAGALVSGVQIAISASNTGGAWDCARKCIEPGASEHARTLAPXGSDCHKAAVIGDTIGDPLKDTSGPSLNILIKLMAVESLVFAPFFATHGGILFKWF

SEQ ID NO: 38544 - protein, 287 aa, Suaeda maritima subsp. salsa
GVHTFTLINRSGKVTYVKFHWRPTCGEKNLLEDEAIRVGGENHSHATQDLYETIAAGNFPEWKLYIQTMDPADEDKFDFDPLDTTKTWPEDILPLQPVGRLVLNKNVDNFFTENEQLAFYPAHVVPGIYFSNDKMLQARTFAYADTHRYRLGVNYLQLPVNAPKCPHTNNHRDGAMTMIHRDEEIDYFPSRFDPVREAERHPIPTAIISGRREKQIIPKENNFKEPGDRYRSWDPARQERFVGRFVKALSDPRLTYEICSIWETYLSQADKSLGMKVASRLNVRPTM

SEQ ID NO: 38545 - protein, 461 aa, Pseudomonas putida KT2440
MSGNNSNDLAQGLKQRHVTMLSIAGVIGAGLFVGSGHAIAAAGPAVLLAYAAAGTLVVLVMRMLGEMAVASPDTGSFSTYADRAIGRWAGFTIGWLYWWFWVLVIPLEANAAAAILHAWFPAVDLWAFSLIITLALTLTNLCSVKNYGEFEFWFALLKVLAIIGFIAVGCAALFGFVPSSQVSGTSHLFDTQGFMPNGLGAVLAAMLTTMFSFMGTEIVTIAAAESKDPGKQISRATNSVIWRICLFYLVSIFLVVALVPWNDPALAETGSYQTVLSRIGVPNAKLIVDIVVLIAVTSCLNSALYTSSRMLFSLSKRGDAPAIAQRTTKAATPHVAVLLSTAAAFLCVFANFVAPAQVFEFLLASSGAIALLVYLVIAVSQLRMRAQREARGEKITFKMWLFPGLTWATIAFIVAILVVMALREDHRAEIIATALLSIGVVAAGLLVHRKREAAGRAALDS

SEQ ID NO: 38546 - protein, 323 aa, Clostridium thermocellum ATCC 27405
MFDVVAVGELLIDFLPAGTNENGMPLFSSNPGGAPANVLAMLSKLGAKTAFIGKVGKDGFGQFLKATLDNAGIDTSNLLMSSSEMTTLAFVHLNEKGDRSFSFYRKHCADVSLDAGELDKDLLRTCHFLHFGAVSLTDEPSRTATLEAARIAKEAGAIISYDPNYRPALWSNEHEARKYMLKAVEYADLVKVSEEELWLLAESEDFSKGAHKLLAMGPSVVFVTCGEKGSYVFTGSCKANHCGYDVKVVDTTGAGDAFVGAMLWQLRGMSLEEISQICEQKWGELLAFSNAAGTIVATKKGAIPAMPDLDTINTFMRQFLEEK

SEQ ID NO: 38547 - protein, 519 aa, Trametes versicolor
MGLQRFSFFVTLALVARSLAAIGPVASFVVANAPVSPDGFLRDAIVVNGVVPSPLIRAKKGDRFQLNVVDTLTNHSMLKSTSIHWHGFFQAGTNWADGPAFVNQCPIASGHSFLYDFHVPDQAGTFWYHSHLSTQYCDGLRGPFVVYDPKDPHASRYDVDNESTVITLTDWYHTAARLGPRFPLGADATVINGLGRSASTPTAALAVINVQHGKRYRFRLVSISCDPNYTFSIDGHNLTVIEVDGINSQPLLVDSIQIFAAQRYSFVLNANQTVGNYWVRANPNFGTVGFAGGINSAILRYQGAPVAEPTTTQTPSVIPLIETNLHPLARMPVPGTRTPGGVDKALKLAFNFNGTNFFINNASFTPPTVPVLLQILSGAQTAQELLPAGSVYPLPAHSTIEITLPATALAPGAPHPFHLHGHAFAVVRSAGSTTYNYNDPIFRDVVSTGTPAAGDNVTIRFQTDNLGPWFLHCHIDFHLEAGFAIVFAEDVADVKAANPVPKAWSDLCPIYDGLSEADQ

SEQ ID NO: 38548 - protein, 468 aa, Geobacter sulfurreducens PCA
MSDKHDLIILGSGSTAFAAALRAHSRGARVLMVEKSVLGGTCINWGCVPSKTLIHGALFYQEGRLGARLGLGECGNAVDLAPLMTRKEEVVKHLRTTRYLDILRNTPGLELAKGTGRFLGSGRLEVVDQVYRCDRYLVAVGGTPRIPKIPGLESTPFLTSRGALLLKRFPASLIIIGGGVIAVELGQMFQRLGTRVTILEHGPRILAPIEPEPALAIRNVLRDEGMEIICHSPVCAVSGDGSAVSVEVEREDGRRTYTAEKLLLAVGTTPATRGIGLELAGVETDGRGFVTVDERMRTTAPGIWAAGDCTGGMMIATVGAREGIIAVDDMFATGCGCAMDHLSVPMAIFTDPEVGAVGYTEQGARDAGLDPIVSILPVSAIPKAHVTGHTAGVIKLVAERATGRLLGAHLACHRGAELINEAALAIRLKATFEDLANALHVYPSIGEGLRLCAQGFTRDVSKLSCCAE

SEQ ID NO: 38549 - protein, 155 aa, Triticum aestivum
LYRTSLYKKAGWYRSGIPGISSTHASVPTGRFDVLSKADGVPLVAIRLKDSTNFSVFDISENLRRFGWIVPAYTMPADAEHVAVLRIVIREDFNRSLAQRLLADINKIVAELDAHAVHAIKLSNAAAAEGASKSTVDAVTEAFKGLAGNKKAGVC

SEQ ID NO: 38550 - protein, 481 aa, Streptococcus pyogenes
DHFENMGAKLVSEVASKTNDIAGDGTTTATVLTQAIVHEGLKNVTAGANPIGIRRGIETATATAVEALKAVAQPVSGKEAIAQVAAVSSRSEKVGEYISEAMERVGNDGVITIEESRGMETELEVVEGMQFDRGYLSQYMVTDNEKMVADLENPFILIMDKKVSNIQDILPLLEEVLKTNRPLLIIADDVDGEALPTLVLNKIRGTFNVVAVKAPGFGDRRKAMLEDIAILTGGTVITEDLGLELKDATMTALGQAAKITVDKDSTVIVEGSGSSEAIANRIALIKSQLETTTSDFDREKLQERLAKLAGGVAVIKVGAPTETALKEMKLRIEDALNATRAAVEEGIVAGGGTALITVIEKVAALELEGDDATGRNIVLRALEEPVRQIALNAGYEGSVVIDKLKNSPAGTGFNAATGEWVDMIKTGIIDPVKVTRSALQNAASVASLILTTEAVVANKPEPAAPAPAMPAGMDPGMMGGF

SEQ ID NO: 38551 - protein, 423 aa, Bacteroides fragilis YCH46
MKENISRFKIDYSVCKNSPGGSILEKVSNFQKELQLHEENSLHIYVKSPMVSGCGREVEVVDRKTNEVKKMLMFGSNSYLDATGIPSVVEKAVRVITDYGVGSGGVPLLSGTTIFQNELEKEIAKLTGFDDTILFSSGFTANIGVIVGLIRPNNLLVYDRLNHASLIDGALMSGAKMVRYKHNDPKALEKILKENAGQYKDGMMVVTDGVFSMDGDIADIPAILEITKKYNALLLIDDAHATGVIGGDGAGTLSYYDIKERENIIVTGTLSKAIGSIGGFITAKQNIIDYLRVYARSNMYSTSLPQSICAASLEVIKEMRNTDIQNALKRNAEYVRNGLKALGFNTLNSMTPIIPVIVGDEYILTQITKELYDRDIFTNAIFPPVVPPNMCRIRIGVMSSHTFEDCDRLINAFHEIGKKYGLI

SEQ ID NO: 38552 - protein, 559 aa, Schizosaccharomyces pombe
LTMCGILAVHHVAEDIEAFKPKALHLSKQLRHRGPDWSGKAIRNQTILCHERLAIVGVESGAQPLVSDDGKLVLTVNGEIYNHLKLRENLKGNYKFKTYSDCEVILYLYREHGPACANMLDGMFSWVLYDQDKDKVVAARDPIGITTLYQGFSSDSPDTAYFASELKALHPVCDKIIAFPPGHYYDSETKQTVRYFKPSWWDENKIPSNPVDYKLLRETLEASVRKRLMAEVPYGVLLSGGLDSSLIASIAARETEKLANSTSQSEEARTITAWPKLHSFAIGLPGSPDLLAARKVADFLHTFHHEHTFTIDEVLMLFVTLFTILRHMMLPLSVQVPPCIYYLVKSRLKVLKWFCLVRDLTKSLVDTYISVMPPLVRPSIPSVCVVLRTCTYPNACVLTSQLWLGVLRLVFLSWIRTFWKLLLTLILRRKCILTVVKKNIFFAKALDTTHDSSLQPYLPQDILWRQKEQFSDGVGYSWIDALKDTAELCISDDEFALPRREWGDDIPTTKEAFWYRKLFDEIFPRQCADTVMRWVPKAEWGCPEDPSGRYQAGHVAALK

SEQ ID NO: 38553 - protein, 195 aa, Triticum aestivum
MCKKREGGSSYQAIYLHSTAMAPTVMASSVTSVVPFQGLKSTAGLPVSRRSNGASLGSVSNGGRIRCMQVWPVEGVKKFETLSYLPPLSREALLKQVDYLIRSKWVPCLEFSKVGFIFREHNASPGYYDGRYWTMWKLPMFGCTDATQVINEVEEVNKEYPDAYVRIIGFDNMRQVQCVNFIAFKPPGCEESGKA

SEQ ID NO: 38554 - protein, 179 aa, Lactobacillus gasseri
PYYPAVTVAQAAAGNFPWSQVAPNIICQLLGAICGQLLVLAVYWPHFKESTNPDIVFSCFATSDCTNSKWNGFISEVVGTAVLMFVAIGLYKGMFFKQAVDIANIGVGFLITALVMALGGPTGPALNPARDFGPRLVYSLLPIPNKKGGAHWSYGWIPVVAPTLGAIIGIFLYKIPFGN

SEQ ID NO: 38555 - protein, 229 aa, Pediococcus pentosaceus ATCC 25745
MAKLVLIRHGQSQWNLSNQFTGWVDVDLSDEGVKQAQNAGKLIKEAGIEFDQAYTSVLTRAIKTLHYALEGSDQLWIPETKTWRLNERHYGALQGQNKAEAAEKWGDDQVHTWRRSYDVLPPLLDADDEGSAANDRRYANLDPRIIPGGENLKVTLERVIPFWEDEIAPKLIDGKNVIIAAHGNSLRALSKYIENISDEDIINLEMATGEPVVYDFNEKLEVQSKTKLN

SEQ ID NO: 38556 - protein, 206 aa, Arabidopsis thaliana
MATRRRTLLKVIVLGDSGVGKTSLMNQYVHKKFSMQYKATIGADFVTKELQIGEKLVTLQIWDTAGQERFQSLGAAFYRGADCCALVYDVNVLRSFDNLETWHEEFLKQASPSDPKTFPFIVLGNKIDVDGGSSRVVSDKKAADWCASNGNIPYFETSAKDDFNVDEAFLTIAKTALANEHEQDIYFQGIPDAVTENEPKGGGCAC

SEQ ID NO: 38557 - protein, 473 aa, Leptospira interrogans serovar Copenhageni str. Fiocruz L1-130
MKMNSFSASYKNLGRTVRTLHHLAHTFYRNIRPSLLNSMILKLAVPVVFGMLSQTVVWVTDTMMVGRLGKHSIASIGIGGIAHFTVLAFLMGFSMGIQVIVARRFGEKNDSEIGKIGVTALYLVIVFGSILSIGGATISEWLMNLLNKDEIVRRLSSEYLYFRFLGTIFFFLLFTTRAFTDGLGITTAGLASMIITCFTNIFLNWMLIYGNLGFEPMGVKGAAIASSLAGGAGLFAFPFYFYSKDLGKYFSHISWVFSWDHFREILKASTAPALAELLNNISFMIFTEFATIVGTTALAVTNMLFSTLSLSFLPGYAFGIAATTILGQALGAGKPKLAYHGAFRSAFFAACVMGSMGLVFIFWGKDMLSFYTKDQELIEEAYSPLLILGMIQVVDAYHMVIACALRGAGLQDFVFRAYTAASYLVFLPSAYFMGIYLGMGSAGLWSGIVAWVLVLASVFVVRFRRKDWVQNPV

SEQ ID NO: 38558 - protein, 447 aa, Chlorobium tepidum TLS
MSDSDHRNSLTIIDNRTGKSYELPIENGTIRTMDLRKIKESEDDFGLLGYDPAFLNTCSCKSTITFIDGDKGILRYRGYPIEQLAEKSSFLETAYLLIKGELPDKERLAVWTYNIRHHTMTHANLTKFMDGFRYDAHPMGILVGTLGALSTFYPDAKNVGEEESRKLQVRRLIGKMPTLAAMSFRHSLGFPYVLPDNDLSYAGNFLSMMFRMTEKNYKPNPVLEHALDVLFILHADHEQNCSTNAVRSVSSSMVDPYSAIAAGCAALYGPLHGGANEAVIHMLKQIGSVDKIPEFIKLVKSGEGRLMGFGHRVYKNYDPRARIIKKIAFDVFEETGRNPLLDIAIELERIALEDDYFIQRKLYPNVDFYSGLIYQAMGFPTEMFPVLFAIGRTPGWLAQWIEHVKDPEQKIARPRQIYLGEKCRDYVPIDERPRKGDDEQKFGICRL

SEQ ID NO: 38559 - protein, 385 aa, Yarrowia lipolytica CLIB122
MLFSTTLLASIVSLALAAPSTPKVVTFPVTKHHRDSKFAQAHLHTRQTPVSIANQQDYYSIALGLGTPVQNFNVLLDTGSSDLWVYNVTDTNDCKKGGCAFTGQYNDALSSSYVFLNDDYSIHYVSGSAYGNWGTETLTVGDITLEGFQFACANNAGGQVGVMGISVENDESIQPYQNTYPNFPVALQNAGYIDRLVYSLYLDSQTATSGTFLLGGIDYAKFSGSLVYLPLADSGGMDLNYNSISYNGKDYAGSGTATLDSGTSYTYIPDQAFQALASALKLGALSTGGTGLNYIDCDSDVTIEFGFEGVTIVAQSSQLVIPESDGKCVFGIQSDSQSEGYDLFGDTFLRNAYVVYDLQDSVIGLAQAEYTTSSNIQPVTGPLGN

SEQ ID NO: 38560 - protein, 345 aa, Arabidopsis thaliana
MASSTGEKGLIVSFGEMLIDFVPTVSGVSLSESPGFLKAPGGAPANVAIAVSRLGGRAAFVGKLGDDDFGHMLAGILRKNGVDDQGINFDEGARTALAFVTLRSDGEREFMFYRNPSADMLLRPDELNLELIRSAKVFHYGSISLITEPCRSAHMKAMEVAKEAGALLSYDPNLREPLWPSPEEARTQIMSIWDKADIIKVSDVELEFLTENKTMDDKTAMSLWHPNLKLLLVTLGEKGCTYFTKKFHGSVETFHVDAVDTTGAGDSFVGALLQQIVDDQSVLEDEARLRKVLRFANACGAITTTKKGAIPALPTDIEALSFLKDQKKRQTNLKFSKWCCTASPC

SEQ ID NO: 38561 - protein, 146 aa, Brassica napus
QKGLTLKETRQMEFLSQVVDETLRVITFSLTAFREAKTDVEMNGYLIPKGWKVLTWFRDVHMDPEVFPDPRKFDPSRWDKGFIPKTGAFLPFGAGSHLCPGNDLAKLEISIFLHHFLLKYRVKRSNTECPVMYLPHTRPTDNCLAR

SEQ ID NO: 38562 - protein, 693 aa, Streptomyces avermitilis MA-4680
MKMSTHTHDSFEWTDLDRRAVDTARLLAADAVQKVGNGHPGTAMSLAPAAYTIFQKVMRHDPADPEWTGRDRFVLSPGHTSLTLYTQLFLAGYELELDDLKAFRTHGSKTPGHPEYGHTAGVETTTGPLGQGAANAVGMAMAARYERGLFDPHAPEGESPFDHTIWAIVSDGDLEEGISAEASSLAGHQKLGNLVFLYDDNHISIEGDTATAFSEDVPKRYEAYGWHVQRIEPSADGDIDVHALHAALKAAQAETERPSFIAMRTIIAWPAPNAQNTEASHGSALGAEEIAATKRVLGSDPEQTFEVADEVLAHARRALDRGAEEHAAWDKRIAEWRTAQPERAKLFDRIVAGQLPEGWEQSLPVFEAGTSVATRAASGKVLQALGAVIPELWGGSADLAGSNNTTIDKTSSFLPKGNPLPEADPYGRTVHFGIREHSMAAEMNGIALHGNTRIYGGTFLVFSDYMRNAVRLSALMQLPVTYVWTHDSIGLGEDGPTHQPVEHLASLRAIPGLNIVRPADANETAIAWREILERHATHPAPHGLALTRQGVPTYEANEDAAKGGYVLQEASTGTPDVVLIATGSEVQLAVAARERLEAEGVGTRVVSMPSVEWFEEQSPEYRASVLPPSVKARVAVEAGIGLTWHRYVGDAGRIVSLEHFGASADAETLFAEFGFTAENVAAAARESITAARG

SEQ ID NO: 38563 - protein, 378 aa, Streptomyces avermitilis MA-4680
MITVSNTVENLERLSDEGVSIWLDDLSRKRITSGNLAELIAHKHVVGVTTNPSIFQAAIGSGEGYEEQLADLAVRGVTVDEAVRMMTTADVRAAADILRPVYDATGGRDGRVSIEVDPRLAHDTEATIAEAKQLAWLVDRPNVMIKIPATKAGLPAITEVIGLGISVNVTLIFSLERYREVMDAYLAGLERAQAAGIDLAGIHSVASFFVSRVDSEIDKRLAKAGTDDAQALKGKAALANARLAYEAYEEVFAGERWTALAPAGAHKQRPLWASTGVKDPAYKDTLYVDELVAPGTVNTMPEGTLNATADHGDIHGDTVTGGYAQARADLAAVERLGISYDEVVKQLEDEAVAKFEVAWGDLLEAVATSLRGKGADGE

SEQ ID NO: 38564 - protein, 478 aa, ASPERGILLUS NIDULANS FGSC A4
MSGLRFLDLIKPFTPLLPEVAAPETKVPFNQKLMWTGLTLLIFLVMSQMPLYGIVSSDTSDPLYWLRMMLASNRGTLMELGITPIISSGMVFQLLAGTHLIDVNLDLKTDRELYQTAQKLFAIILSFGQACVYVLTGLYGQPSDLGAGICVLLIVQLVVAGLVVILLDELLQKGYGLGSGISLFIATNICESIVWKAFSPTTINTGRGPEFEGAIIALFHLLFTWSDKQRALREAFYRQNLPNVMNLLATLVVFAAVIYLQGFRVEIPVKSSRQRGMRGSYPVRLFYTSNMPIMLQSALCSNIFLISQMLYSRFSDNILVKLLGVWEPREGSAQLHASSGVAYYMSPPLNFREALLDPIHTAVYITFMLVACALFSKTWIEVSGSAPRDVAKQLKDQGLVMAGHREQSMYRELKRIIPTAAAFGGACIGALSVASDLLGALGSGTGILLAVTIIYGYFEIAAREGDIGGGLKGLVPGN

SEQ ID NO: 38565 - protein, 339 aa, Nocardioides sp. JS614
MTRSSTVSTAEALVAPGKGILAADESTPTIAKRLAAIGVESTEPVRRAYRELLLTAPGLSEHISGVILYDETLRQRTDDGVPFGELVAGAGMIPGIKVDAGTADLAGFPSEVVTEGLDGLRRRCAEYVELGARFAKWRAVIKVGEGRPTRTCIEANAHALGRYAALAQEAGLAPIVEPEVLMDGSHTIDRCAEVTVAVLWAVYDQLAEQRVLLEGTLLKPNMVLPGAECPDQVDDETIATRTVTAMRESVPVAVPGIVFLSGGQTHQQATARLDAINRHGSQPWQLSFSFGRALQAPVLEAWGGDERNRDAAQAALLERAALNGAARYGSYRPEMERPR

SEQ ID NO: 38566 - protein, 339 aa, Zymomonas mobilis
MKVYYDSDADLGLIKSKKIAILGYGSQGHAHAQNLRDSGVAEVAIALRPDSASVKKAQDAGFKVLTNAEAAKWADILMILAPDEHQAAIYAEDLKDNLRPGSAIAFAHGLNIHFGLIEPRKDIDVFMIAPKGPGHTVRSEYVRGGGVPCLVAVDQDASGNAHDIALAYASGIGGGRSGVIETTFREEVETDLFGEQAVLCGGLTALITAGFETLTEAGYAPEMAFFECMHEMKLIVDLIYEAGIANMRYSISNTAEYGDIVSGPRVINEESKKAMKAILDDIQSGRFVSKFVLDNRAGQPELKAARKRMAAHPIEQVGARLRKMMPWIASNKLVDKARN

SEQ ID NO: 38567 - protein, 362 aa, Solanum tuberosum
  misc_feature (342)..(342): Xaa can be any naturally occurring amino acid
  unsure (1)..(362): unsure at all Xaa locations
MSKSILVTGGAGYIGSHTVLQLLLGGYKTVVIDSLDNSSEIAVKRVKEIAGEYGSNLSFHKVDLRDKPAVEEIFRSNKFDAVIHFAGLKAVGESVEKPLMYYDNNLIGTITLLEIMAAHGCKRLVFSSSATVYGWPKVVPCTEEFPLSAANPYGRTKLFIEEICRDVQNADSEWKIILLRYFNPVGAHPSGRIGEDPRGIPNNLMPFVQQVAVGRRKELTVYGTDYGTKDGTGVRDYIHVMDLADGHIAALQKLSDPSIGCEVYNLGTGKGTSVLEMVAAFEKASGKKIPMVMSGRRPGDAEIVYAATEKAERELKWKAKYGIEEMCRDQWNWAKKNPYGYXRNSQNLITVTDVYFNCIISS

SEQ ID NO: 38568 - protein, 445 aa, Wolbachia endosymbiont of Drosophila simulans
NITTGKIYHELLKKERRGDYLGKTVQVIPHVTDLIKSFIFNGTEGLDFVICEIGGTVGDIESQPFLEAIRQVNYTLGKQRVILIHLTLIPYLTAAQELKTKPTQHSVRELNSAGLQPDIILCRSEKEIFDNQREKIAKLCNVSLSNVIPAPDVSHIYELPVLYSQCGLDTQILEHFHLSKPKPSLTEWDQIVHSIRHPTQEVTVSIVGKYTEFPDAYKSLVEALNHGAISNKVKVKINWVNSREKEEKPINEKLIGEKLQNSHAILVPGGFGDDGVEGKILAINYARTNNIPFFGICLGMQLAIIEFARNVVKLEDAHSEEFRNCKHPIVKLAGDQDDDLGGTMRLGAYKCNINANSKMMDAYSNTTISERHRHRYIINSDYKDDLEKNGLLCSGISEDGTCIEAVELESHPWFIGVQFHPEFQSKPFSPHPLFVSFIEAAIDKK

SEQ ID NO: 38569 - protein, 253 aa, Arabidopsis thaliana
MLAIFQKAFAHPPEELNSPASHFSGKTPKLPGETLSDFLSHHQNNAFSMNFGDSAVLAYARQETSLRQRLFCGLDGIYCMFLGRLNNLCTLNRQYGLSGKNSNEAMFVIEAYRTLRDRGPYPADQVLRGLEGSFAFVVYDTQTSSVFSALSSDGGESLYWGISGDGSVVMSDDIQIIKQGCAKSFAPFPNGCMFHSETGLKSFDHPTNMMKAMPRIDSEGVLCGASFKVDACSKINSIPRRGSEANWALANSR

SEQ ID NO: 38570 - protein, 351 aa, ASPERGILLUS NIDULANS FGSC A4
MAMNKVPGYNIYIGGVFALKNKVAMSGANITHVLSVIRLRPKDDLFAGYQHHRIEVDDLDDENLLEHFPSAIKFIQSGLDAGGGVLVHWPLTASSAMGKSRSATVCIAYLLRRQRNALTPQSALALLRESRPLCEPNPGFMEQLNVYYQMGCPDDVTSHPLYSRWLYRREVEESVACGRAPEMDSVYFEDEQPHQNVATTGPATEIKCRKCRRKLAIAPFVVPHGSHGDVKGAIISECAHIFMSPLTWMRPSLFPDTPGDAPLSGRLTCPNSSCGSNIGKFAWQGMQCSCGDWVVPAIGLARARVDISEPVTIRRGPGLPSGIRLPPNMRPIIGAAGVKPESERDTAKGSL

SEQ ID NO: 38571 - protein, 544 aa, Neisseria meningitidis MC58
MTKFIFVTGGVVSSLGKGIAAASIAAILESRGLNVTMLKLDPYINVDPGTMSPFQHGEVFVTDDGAETDLDLGHYERFIDSTMTRRNSFSTGQVYENVIAKERRGDYLGGTVQVIPHITDEIKRRIHEGAAGYDVAIVEIGGTVGDIESLPFLEAIRQMRSQLGRNNTLFAHLSYVPYIAAAGEIKTKPTQHTVKEMLSIGLQPDILICRMDRTMPADERRKIALFCNVEERAIVGSYDVDSIYECPEMLHDQGIDNIITEQLQLNVQQADLTAWKKIVHAIQNPKHTVKIAMVGKYVDLTESYKSLIEALKHAGIHTETDVQITFVDSENIEKNKGDVSMLKDMDAILVPGGFGSRGVEGKIAAVRYARENNVPYLGICLGMQIALIEYARDVAGLKGANSTEFDLKCAAPVVALIDEWQTADGSVETRDESTDLGGTMRLGAQEVELKAGSLAAKIYGSGHIRERHRHRYEVNNNYVPTLEQAGLVIGGVSAGRERLVETIELPNHPWFFACQFHPEFTSNPRKGHPLFTAFVKAALNNKKA

SEQ ID NO: 38572 - protein, 755 aa, Zea mays
  misc_feature (190)..(190): Xaa can be any naturally occurring amino acid
  unsure (1)..(755): unsure at all Xaa locations
MRWWKRSSSPSCPASSSSASTPASPARASTPRLIGGWGSGPSSRRDGSGASNDPQPRLIRARRMRYVVDDLEVGVSALGVDSPARRDAAAGFALETVSSAPISWSPSNMEVAPARSSSTPVLLPHPLPLPGEGESPCRGPGRPLPPPVPRMLDGEGKGPAADAPGVLETGSQRMTPLLARRVAVQTLPKXHEHNDFRLNGTTCCQRRKAFKEKFQDKNCDETLNFRLNIPAKSAPSSGFSSPVQSPRRLSNVDFSSAAISIQDTNVWSARSLWSSDAMGSSPPCDSPDKFAGGQERSPLSSPLRSPVLKSRNPSAPPSPMHPKLFPENHVSRPDGNGSASFHPLPLPPASVSPKQTNASHQLVPKAEMPSVAGQWQKGKLLGSGTFGCVYEATNRHTGALCAMKEVNIIPDDAKSVESLKQLEQEIKFLSQFKHENIVQYYGSETIEDRFYIYLEYVHPGSIHKYVHQHCGSLTEAVIRNFTRHILKGLAFLHSQKIMHRDIKGANLLVDINGVVKLADFGMAKHLSTAAPNLSLKGTPYWMAPEVVRATLDKSAGYDLAVDIWSLGCTIIEMFTGKPPWSGLEGPAAMFKVLRTDPPIPDNLSPEGKDFLRCCFKRNPTERPTANKLLEHPFIQTLNHYSPHSVVHSFSGIKSPDTVHSSARDKVPWKSDSYMRGKHANGETSSARSSESLAYRLMTPLPNLGTNSLSPPPLSSASSSGSAAHTPNSMHFSVPYHQPSPLPKPNGKEAINLVSH

SEQ ID NO: 38573 - protein, 176 aa, Geobacter sulfurreducens PCA
MPILTDFKAIATGLFVTWKHIFRRPVTVEYPEVKRTPAPRYRARIVLTRDPDGGERCVACYLCSAACPVDCISMEAAEGEEGRRYARWFRINFSRCIFCGLCAEACPTLAIQMTPDYEICERDIMELVYEKEDLLIDGCGKDAGYNFYRHAGIGVAQPRGAGECEEEPVDVRGLMP

SEQ ID NO: 38574 - protein, 270 aa, Clostridium thermocellum ATCC 27405
KVLSDSKRIVIKVGTSTLTYENGEMNLARMEKLVRVISDLMNQGKDVVLVTSGAIGVGVSKLKLGSRPKELKDKQAVAAVGQCELMYMYSKLFLEYGHTVGQILLTRDVVENPTGKTNVINTFETLLEMRIIPIVNENDSVAVDEIESETNHVFGDNDTLSAIVATLVNADLLIILSDIDGFYDCDPRANECSKLISVIEKITPELEKCAGGVGSSRGTGGMVTKLSAAKIATLAGINMVLANGDNPNIVYDILAGKEVGSLFLAQKSDS

SEQ ID NO: 38575 - protein, 547 aa, Magnaporthe grisea 70-15
MSALKTTTNEKTSTGDKLRNFFKINNNRRRLPFGRSKTGHEAPQAKSTRADDSDGAQYTTHDDESQDANEPHSTPADSEAARRIRRVKSEPSQLGLIFGYLSGGRPATSGRGKEKTLLANKNASAVGLVGTSSSTPTPGPSSTGGGECVIPSAGGEIVVVPTPNAATPPHGGPKQKLVAYHRTYSSNSIKKGPVRVGPEDFEKLKLIGKGDVGKVYLVREKKRDKLFALKMLDKDEMIRRNKIKRTVTEQEILQVMNHPFIVSLHHSFQSQKYLYLCMEYCSGGEFFRALQSRPGKCISEEAARFYIAEVISALEYLHMNGLIYRDLKPENILLHESGHIMLSDFDLSKISGQDGMPTMIVGRNGTTTMLDTRSCLEGYRTNSFVGTEEYIAPEVIKGHGHSVAVDWWTVGILSFEMIYGVTPFKGKNRNATFANVMREDVHFPDDPELSPMGKSFIRKCLIKDENRRLGAIAGAAELKRHPWFRTTQWALLRHLTPPIIPDQGPDGNFRTLKDSQSVDIGGATRKVADDDPFSAFSSVTLHYGDDK

SEQ ID NO: 38576 - protein, 282 aa, Zea mays
MSSSISMMEARMPPGFRFHPRDDELVMDYLLQKLSGHGHHAGAAIVVDVDLNKCEPWDLPDSACVGGKEWYFFSLRDRKYATGQRTNRATHSGYWKATGKDRAVVAGGEVAVGMRKTLVFYRGRAPRGKKTEWVMHEFRLHPHAAPCLLAAAAPNKEDWVLCRVFYKSRTTSPRPESEDARDGTPSAEPQLPAALPLAPLADTYAAPTVAEQVYCFSGLPALPFRRPVSLGDLLEFDASEKESVTTAMTSVSNNTSSVLELAPNCNWNQENGMSRMWSPLGI

SEQ ID NO: 38577 - protein, 413 aa, Schizosaccharomyces pombe
HTSEREELFIKKLEQCNIIFDFNDPSSDLASKEIKREALLQMIDYVSENRGISSASLFPYVVNTFSLNVFRPISPALNDYSSDMFALDDEPFLEPAWPHLEEVYLLFIKFLESPDFRASKAKSLVDRRFFNRLLALFDTEDPRERELLKTTLHRIYGKFLNLRSYIRKSMNNVFLQFIYEREKFHGIAELLEILGSIINGFAVPLKEEHKIFLSKVLIPLHQTKSVFLYHPQLTYCIVQFIDKDPSLTKAVLTGILKYWPRINSFKELLFLNEIEDIFEVLEPSEFVNIMSPLFQQLARSISSMHFQVAERALCLWSNEYFTSLVSQNVVTLLPIIYPSLYKTANEHWNSTIQAIACNVLQIFVDMDADFFNGLVEDYKQAIIKQEEVMIIRKQQWCQIEALAAENKPTDYLR

SEQ ID NO: 38578 - protein, 376 aa, Triticum aestivum
  misc_feature (233)..(233): Xaa can be any naturally occurring amino acid
  misc_feature (268)..(268): Xaa can be any naturally occurring amino acid
  misc_feature (324)..(324): Xaa can be any naturally occurring amino acid
  unsure (1)..(376): unsure at all Xaa locations
MAATVAVDNLNPKVLKCEYAVRGEIVIHAQRLQQQLKTQPGSLPFDEILYCNIGNPQSLGQQPVTFFREVLALCDHPDLLKKEEIKTLFSADSISRAKQILALIPGRATGAYSHSQGIKGLRDAIASGIASRDGFPANADDIFLTDGASPGVHLMMQLLIRNEKDGILVPIPQYPLYSASIALHGGSLVPYYLNESTGWGLEISDVKKQLEDARSRGIDVRALVVINPGNPTXGQVLAEENQYDIVKFCKNEGLVLLADEVYQENIYXDNKKFHSFKEDSEILGDTAREDLPLVSYQSVSKGILWVSVGKRGWVTWEITGLQCXPLREQIYKIASVNLCSNITGQILASLVMNPPKASDESYASYKAEKEGPCTLL

SEQ ID NO: 38579 - protein, 216 aa, Thermotoga maritima MSB8
MEAVIFDMDGVLMDTEPLYFEAYRRVAESYGKPYTEDLHRRIMGVPEREGLPILMEALEIKDSLENFKKRVHEEKKRVFSELLKENPGVREALEFVKSKRIKLALATSTPQREALERLRRLDLEKYFDVMVFGDQVKNGKPDPEIYLLVLERLNVVPEKVVVFEDSKSGVEAAKSAGIERIYGVVHSLNDGKALLEAGAVALVKPEEILNVLKEVL

SEQ ID NO: 38580 - protein, 385 aa, Arabidopsis thaliana
MTTTLLMASLIVSFLLILYYTTIVVASSESRCRRYKSIISFGDSIADTGNYVHLSNVNNLPQAAFLPYGESFFHPPSGRYSDGRLVIDFIAEFLGLPYVPPYFGSQNVSFNQGINFAVYGATALDRAFLVKQGIKSDFTNISLSVQLNTFKQILPNLCASSTRDCREMLGDSLILMGEIGGNDYNYPFFEGKSINEIKELVPLIIKAISSAIVDLIDLGGKTFLVPGNFPIGCSTAYLTLFQTATVEHDPFTGCIPWLNKFGEHHNEQLKIELKQLQKLYPHVNIIYADYYNSLYGLFQEPAKYGFKNRPLAACCGVGGQYNFTIGKECGENGVSYCQNPSEYVNWDGYHLTEATYQKMAQGLLNGRYTTPAFDWSCLGSYDFSG

SEQ ID NO: 38581 - protein, 158 aa, Brassica rapa subsp. pekinensis
TMGISVKEFPWIKGFNFDVPHVVQVAQVLDGVENVGGDMFDSVPKCDAVLIKWVLHDWGDRDCIRILKNCKEAVPPNIGKVLIVESVIREKKKAMIVEDRDEKLEHVRLMLDMVMMAHTTTGKERTLKEWDFVLNEAGFARYEVRDIDDVQCVIIAYR

SEQ ID NO: 38582 - protein, 416 aa, Shewanella sp. ANA-3
MEELTKLGVTVSELRFALDTFYFLISGALVMWMAAGFAMLEAGLVRSKNTTEILTKNVVLYAIACVMYLLIGYNIMYVDNAEGGWLPSLGTLIGSQADDANHALESDFFFQVVFVATAMSIVSGAVAERMKLWAFLFFSVVMTGIIYPVEGYWTWGKGFISSLGFVDFAGSGIVHMTGAAAAIAGVLLLGARKGKYGPNGQVNPIPGSNLPMATLGMFILWMGWFGFNGGSQLMVSDAANASSVAKVFVNTNTAAAFGAISALVVCKMIWGKADLTMILNGILAGLVAITADPLSPSLLMAGVIGVVAGGLVVFSIVGLDRIKIDDPVGAISVHGVAGFLGLMCVPLSNADATITAQLTGAAIIFAWVFSASFAVWFVLKMTMGIRVTEEEEYNGMDASDCGIDAYPEFVTVKSAG

SEQ ID NO: 38583 - protein, 315 aa, Brassica napus
  misc_feature (115)..(115): Xaa can be any naturally occurring amino acid
  unsure (1)..(315): unsure at all Xaa locations
WPNALRYFELNTGAKIPSVGLGTWQASPGLVGDAVAAAVKIGYRHIDCAQIYGNEKEIGTVLKKLFEDNVVKREELFITSKLWCTDHDPQDVPEALKRTLQDLQLDYVDLYLMHXPVRMKKGSVGAKPENLLPVDIPSTWKAMEALHDSGKARAIGVSNFSTKKLADLMELARVPPAVVQVECHPSWRQTKLREFCKSKGLHLTAYSPLGSPGTTWLKSDVLKNPILNTVAKKLGKSAAQVALRWGLQMGNSVLPKSTNEGRIRENFEVFDWSIPDDLFSKFPEIEQARLLTAPFFVHETLSPYKSLEELWDGEI

SEQ ID NO: 38584 - protein, 535 aa, Bacillus anthracis str. A2012
MTKYIFVTGGVVSSLGKGITAASLGRLLKNRGLNVTIQKFDPYINVDPGTMSPYQHGEVFVTDDGAETDLDLGHYERFIDINLNKYSNVTTGKIYSSVLQKERRGEYLGGTVQVIPHITNEIKERVYRSGRETNADVVITEIGGTVGDIESLPFLEAIRQIKSDIGRDNVMYIHCTLIPYLKAAGEMKTKPTQHSVKELRSLGIQPNIIVVRTEMPVSQDMKDKLALFCDIDTKAVIEARDADTLYAVPLSLQEQNMDQIVCDHLKLDNPAADMTEWTALVEKVRNLSKKTKIALVGKYVELQDAYISVVEALRHAGYSFDTDVEVKWVNAEHVTAENVQELVGDTDGILVPGGFGDRGVEGKIVAIQYARENKVPFLGICLGMQLASIEFARNVLGLEGANSSEINPDTPYAIIDLLPEQKDVEDLGGTLRLGLYPCKLSEETNAYNAYNEPVVYERHRHRYEFNNQFRPDMEKAGFVFSGTSPDGRLVEIIELKDHPWFVAAQFHPELVSRPNRPQPLFHDFVKASLTNKESK

SEQ ID NO: 38585 - protein, 82 aa, Brassica rapa subsp. pekinensis
IGTIRYGLKTLNYQKPPGKKIVEDYDITKLPVNSNTTKGSGIYNFQLGRVVGVILQNSNVLNGRGSEIHPWHLHGHDFWVLG

SEQ ID NO: 38586 - protein, 134 aa, Brassica napus
TYRFQKGENLLDLSGAVDQRTESVFEKMAQSIGPRLYSCCNCRNHVGLHDDIISKAFQGRTGRAFLFSHAMNVVLGAKEDRNLLTGLHTVADISCADCNEPLGWKYERAYEASQKYKEGKFIFEKAKIVKEEDW

SEQ ID NO: 38587 - protein, 669 aa, Arabidopsis thaliana
MMNPSHGRGLGSAGGSSSGRNQGGGGETVVEMFPSGLRVLVVDDDPTCLMILERMLRTCLYEVTKCNRAEMALSLLRKNKHGFDIVISDVHMPDMDGFKLLEHVGLEMDLPVIMMSADDSKSVVLKGVTHGAVDYLIKPVRMEALKNIWQHVVRKRRSEWSVPEHSGSIEETGERQQQQHRGGGGGAAVSGGEDAVDDNSSSVNEGNNWRSSSRKRKDEEGEEQGDDKDEDASNLKKPRVVWSVELHQQFVAAVNQLGVEKAVPKKILELMNVPGLTRENVASHLQKYRIYLRRLGGVSQHQGNLNNSFMTGQDASFGPLSTLNGFDLQALAVTGQLPAQSLAQLQAAGLGRPAMVSKSGLPVSSIVDERSIFSFDNTKTRFGEGLGHHGQQPQQQPQMNLLHGVPTGLQQQLPMGNRMSIQQQIAAVRAGNSVQNNGMLMPLAGQQSLPRGPPPMLTSSQSSIRQPMLSNRISERSGFSGRNNIPESSRVLPTSYTNLTTQHSSSSMPYNNFQPELPVNSFPLASAPGISVPVRKATSYQEEVNSSEAGFITPSYDMFTTRQNDWDLRNIGIAFDSHQDSESAAFSASEAYSSSSMSRHNTTVAATEHGRNHQQPPSGMVQHHQVYADGNGGSVRVKSERVATDTATMAFHEQYSNQEDLMSALLKQV

SEQ ID NO: 38588 - protein, 417 aa, Enterococcus faecalis V583 [sequence omitted]

SEQ ID NO: 38589 - protein, 271 aa, Enterococcus faecalis V583
MRNKLQQAKRIVIKVGTSSLIYPNGNINLKAIDQLAFTLSDLSNQGKEIILVSSGAIGVGLNKLNLSVRPTTIPEQQAVAAVGQAELMNIYNQRFSTYSQQMAQVLLTRDVIEYPESRNNVTNTFEQLLKMNIIPIVNENDTVAIEELDHLTKFGDNDQLSAIVCQIVQADLLVMLSDIDGFFSDNPTVNKEATLFSEINEINEDLFQLAGGKGSRFGTGGMSSKLKAAERVLANQQAMILANGKQPKIIFEILEGKDIGTLFIKGGHESD

SEQ ID NO: 38590 - protein, 481 aa, Oryza sativa
RLASRGHHHHHHHHPPPLLPDPRSDPAAMASTAARRLRELQGQAGNKTCVDCAQRNPQWASVSYGVFMCLECSGKHRGLGVHISFVRSVTMDSWTEAQLRKMEAGGNDRLNAFLAARGVPKETPHVAKYNSNAAAAYRDRIVAVAEGRPWTDPPVVKETPGSGAPAPTRKPPLPAGGGGGGGGGWDDWDDDFRPDMRRNQSVGSFGESGAESGRQPPRSKSTQDMYTRQQLEASAANKDSFFARRMAENESKPEGIPPSQGGKYVGFGSSPAPSANRNGAAAQGDVMQVVSQGIGRLSLVAASAAQSAASVVQVGTKEFQSKMREGGYDQKVNETVNVVANKTAEIGSRTWGIMKGVMALASQKVEEYAKEGGNGWGDDWQRREQGSEPYHRFERETNGNGWNSSSHDGSSKNYNSNSWDDWDEPVKKDEPAKERQSSDSWAGWDDGKDDNFDSYNHSTPSKGSNQNGTTGGSYWTEGGFR

SEQ ID NO: 38591 - protein, 421 aa, Brucella melitensis [sequence omitted]

SEQ ID NO: 38592 - protein, 565 aa, Hordeum vulgare
VFLSMRNKTQLAKRRATNYETHRNSSRTSSPIVCSTGMPIIFVATEVHPWCKTGGLGDVVGGLPPALAAMGHRVMTIAPRYDQYKDTWDTNVLVEVIVGDRTETVRFFHCYKRGVDRVFVDHPMFLEKVWGKTGSKLYGPTTGTDFRDNQLRFCLLCLAALEAPRVLNLNNSEYFSGPYGENVVFVANDWHTAVLPCYLKSMYKQNGIYENAKVAFCIHNIAYQGRFPRADFELLNLPESFMPSFDFVDGHVKPVVGRKINWMKAGITECDVVLTVSPHYVKELTSGPEKGVELDGVLRTKPLETGIVNGMDVIDWNPATDKYISVKYNATTVAQARALNKEILQAEVGLSVDSSIPVIVFIGRLEEQKGSDILIAASPEFVEENVQIIVLGTGKKKMEEELMLLEVKYPQNARGIAKFNVPLAHMMFAGADFIIIPSRFEPCGLIQLQGMSYGVVPICSSTGGLVDTVREGVTGFHMGSFNVEFETVDPTDVAAVGSNVTRALKQYRTPVFHAMVQNCMAQDLSWKGPAKKWEEALLSLGVEGSQPGIEGEEIAPLAKQNVATP

SEQ ID NO: 38593 - protein, 192 aa, Arabidopsis thaliana
MTSSSGSLKLEIHTDDKTPGKWSVPLGDDVFRRFLSGGGGSEKAVFGEGSLFSPFLFGKYFDPSDAFPLWEFEAEVLLASLRSLGQCRVDWSQTDQAYVLKSDIPVVGKNNVQVYVDINGRVMEISGQWNSNKKAATNSDWRSGRWWEHGYVRRLELPSDADAKYSEAFLSNNDDYSFLEIRIPKINSKNKF

SEQ ID NO: 38594 - protein, 159 aa, Oryza sativa
MAEQTERAFLKQPKVFLCPKKSGKGKKPGKGGNRFWKNIGLGFKTPREAIEGTYIDKKCPFTGTVSIRGRIIAGTCHSAKMNRTIIVRRNYLHFVKKYQRYEKRHSNIPAHISPCFRVKEGDHVIIGQCRPLSKTVRFNVIKVIPAGSTGGGKKAFIAA

SEQ ID NO: 38595 - protein, 396 aa, Escherichia coli
MFENITTAPADPILGLADLLRADERPGKIDLGMGVYNDETGKTPVLTSVKKAEQYLLENETTKNYLGIDGIPEFGRCTQELLFGKGSALINDKRARTAQTPGGTGALRVAADFLAKNTSVRRVWVSNPSWPNHKSVFNSAGLEVREYAYYDAENHTLDFDALINSLNEAQAGDVVLFHGCCHNPTGIDPTLEQWQTLAQLSVEKGWLPLFDFAYQGFARGLEEDAEGLRAFAAMHKELIVASSYSKNFGLYNERVGTCTLVAADSETVDRAFSQMKAAIRVNYSSPPAHGASVVATILGNDALRAIWEQELTDMRQRIQRMRQLFVNTLQEKGANRDFSFTIKQNGMFFFGGLTKEQVLRLREEFGVYAVASGRLNVAGMTPDNLAPLCEAIVAVL

SEQ ID NO: 38596 - protein, 328 aa, Agrobacterium tumefaciens str. C58
MMKKKVLVVGGAGYIGSHTCLLLSERGYEPVVFDNLSNGHEEFVRWGPFEQGDIRDRARLDEVFAKHRPEAVLHFAALIEVGESVKQPVAFYDNNVIGSLNLLSAAIDAGVTSFVFSSTCATYGLPEQVPIDETHRQAPINPYGRTKWVVEQALKDYSTYEGLRSVMLRYFNAAGADFEGRIGEWHKPETHAIPLAIEAALGRRQGFKVFGTDYDTRDGTCVRDYIHILDLADAHVRAVDYLLDGGETVELNLGTGTGTTVKELLAAISEVSGRPFPVEYTGRRDGDSTTLVANNDKAREVLGWEPRYSLSDIIKSAWAWHSSRNAGD

SEQ ID NO: 38597 - protein, 394 aa, Pelargonium x hortorum
YFDGWKAYDRDPFHPSQNPNGVIQMGLAENQLSSDLIEDWVRSNPEASICTLEGVGKFKDVANFQDYHGLLEFRHAVAKFMSRGRGGKVTFDPHRVVMSAGATGANELIVFCLANPGDAFLLPSPYYPANDRDLQWRTGAQIIPVHCNSSNGFKITREALERSYAQAQESNINVKGVLLTNPSNPLGTILDRDTLKSIVSFVTDNNIHLVIDEIYAATVFVAPEFVSVSEILQEMDDTTCNPDLIHIVYSLSKDLGMPGFRVGIVYSFNDDVVSCARKMSSFGLVSTQTQHLLAAMLSDDVFVERFLAETRRRLGRRHGVFTKGLEELGIGCLKSNAGLYFWMDLRKLLEEETFEAEMVLWKVIINEVKLNVLLGSSFHCVGPGWFRVCFANMD

SEQ ID NO: 38598 - protein, 583 aa, Staphylococcus aureus
MMSRLNSVVIKLWLTIILIVTTVLILLSIALITFMQYYFTQETENAIREDARRISSLVEQSHNKEEAIKYSQTLIENPGGLMIINNKHRQSTASLSNIKKQMLNEVVNNDHFDDVFDKGKSVTRNVTIKEKGSSQTYILLGYPTKAQKNSHSKYSGVFIYKDLKSIEDTNNAITIITIITAVIFLTITTVFAFFLSSRITKPLRRLRDQATRVSEGDYSYKPSVTTKDEIGQLSQAFNQMSTEIEEHVDALSTSKNIRDSLINSMVEGVLGINESRQIILSNKMANDIMDNIDEDAKAFLLRQIEDTFKSKQTEMRDLEMNARFFVVTTSYVDKIEQGGKSGVVVTVRDMTNEHNLDQMKKDFIANVSHELRTPISLLQGYTESIVDGIVTEPDEIKESLAIVLDESKRLNRLVNELLNVARMDAEGLSVNKEVQPIAALLDKMKIKYRQQADDLGLNMTFNYCKKRVWSYDMDRMDQVLTNLIDNASRYTKPGDEIAITCDENESEDILYIKDTGTGIAPEHLQQVFDRFYKVDAARTRGKQGTGLGLFICKMIIEEHGGSIDVKSELGKGTTFIIKLPKPE

SEQ ID NO: 38599 - protein, 555 aa, ASPERGILLUS NIDULANS FGSC A4
MPGDERQQHSQAETNGHAEVESQHLLSDESKKENNDTLHPNISSSVPDEPPSRPTSFSPPDRERRPPRTQNRVRFDIADDSEEESRDNGVNRDSDDVLWLDEEDYVDRGRSGRHHAGQRIPLLTNIEAPSVTLATSEEFFPEEHLESARPRSGMRMAFMNMANSIIGAGIIGQPYALRQSGMVTGILLLVALTVTVDWTIRLIVVNSKLSGADSFQATMQHCFGKSGLIAISVAQWAFAFGGMIAFCIIVGDTIPHVLSSLFPSLREMSFLWLLTDRRAIIVLLVLGISYPLSLYRDIAKLAKASTLALVSMAVIVIAVVTQGFRVPQDSRGDVKNLLLLNTGFFQAVGVISFAFVCHHNSLLIYGSLKKPTLDRFAKVTHYSTGISLLMCLLMGVSGFLFFGSETQGNVLNNFPSDNILINIARLCFGLNMLTTLPLEAFVCREVMTTYYFPDEPFNMNRHLIFTSALVLTSVAMALLTCDLGAVFELIGATSAASLAYIFPPLCYIKLSNGSQKAKIPAYACIVFGVTVMGVSLLQAVGKMIKNEGGTATCST

SEQ ID NO: 38600 - protein, 337 aa, Neisseria meningitidis MC58
MQVYYDKDADLSLIKGKTVAIIGYGSQGHAHAANLKDSGVNVVIGLRQGSSWKKAEAAGHVVKTVAEATKEADVVMLLLPDETMPAVYHAEVTANLKEGATLAFAHGFNVHYNQIVPRADLDVIMVAPKGPGHTVRSEYKRGGGVPSLIAVYQDNSGKAKDIALSYAAANGGTKGGVIETTFREETETDLFGEQAVLCGGVVELIKAGFETLTEAGYAPEMAYFECLHEMKLIVDLIFEGGIANMNYSISNNAEYGEYVTGPEVVNASSKEAMRNALKRIQTGEYAKMFIQEGNVNYASMTARRRLNADHQVEKVGAQLRAMMPWITANKLVDQDKN

SEQ ID NO: 38601 - protein, 390 aa, Pelargonium x hortorum
YFDGWKAYDNNPFHLTQNPQGVIQMGLAENQLSFELIEQWVLNNPQASICTAQGLQEFKDTAIFQDYHGLPEFRYAVANFMGKVRGNRVTFNPDRIVMSGGATGAHEMIAFCLADPGDAFLVPTPYYPGFDRDLRWRTGVQLIPVVCESENNFRITRSALEEAYERAQEDNIRVKGLLITNPSNPLGTILDRETLVSLVSFINEKNIHLVCDEIYAATVFSQPAFVSIAEVIEQENVSCNRDLIHIVYSLSKDMGFPGFRVGIVYSYNDAVVNCARKMSSFGLVSTQTQHLIASMLSDDEFVDTFIVESAKRLARRYATFTRGLAQVHIGSLKSNGGLFIWMDLRRLLKEKTFEAEMALWRVIINEVKLNVSPGASFHCSEPGWFRVCFA

SEQ ID NO: 38602 - protein, 245 aa, Nocardioides sp. JS614
MPTARSTADRERHGLGRCWRLWIVTPTEGEPVFLTRKAQLVTPDQALPGRSERTFALPERHRVLDAPVFTEEIPAGYEVALFGLGCFWGAEEIYWQVPGVWSTSVGYAGGTTPNPSYEEVCTGATNHTEAVRIVFDPARVSFADLVKTFFEVHDPTQGFRQGNDVGTQYRSAIYFTTPEQERVARELTEVYGAELRRRRLGDVTTEIREAPTYYYAEDVHQQYLAKNPNGYRCHANTGIKFPETA

SEQ ID NO: 38603 - protein, 426 aa, Clostridium cellulolyticum
MIRKEMIAMLLAGGQGSRLGVLTKNVAKPAVLYGGKYRIIDFSLSNCTNSGIDTVGVLTQYQPLKLNAHIGIGKPWDMDRIEGGVTILSPYLKAEMGEWFKGTANAVYQNIQYIDKYSPHYVIILSGDHIYKMDYSKMLDFHKENHADATISVINVPYEEASRYGIMNCHENGKIYEFEEKPKNPKSTLASMGVYIFTWSTLREYLIKDNECSDSVNDFGKNIIPAMLGDGKSMWAYQYSGYWRDVGTIQAFWESSMDLVSRVPQFNLFDPEWRIYTPNPVKPAHYIASSACVKKSIIAEGCSVHGTVINSILFPGAYIEEGAVIQDSIIMSNSRVCKNAYINRSIISEQAIIGEKARLGEGPDVPNEYKPGIYDSGITVVGEKSSIPADPVIGKNVMIDIGASAVDFTSLNVQSGKSVFKGGVAE

SEQ ID NO: 38604 - protein, 574 aa, Mucor circinelloides f. lusitanicus
MANTPHGGVLKDLYLRDAGKQESLAAEAATLPSVVLTDRQLCDLELLLNGGFSPLEGFLNQKDYEGVVENMRLANGLLWTIPITLDVSKEQIEESKIEPSKRIALLDPRDYEPLAILTVEDVYRPDKSKEAALVYGADDSAHPAVHYLHNIAKEFNVGGSLEAVQSPSHYDYVANRYTPTELRAHFKKLQWTRVVAFQTRNPMHRAHRELTVRAARQRKAHLLIHPVVGLTKPGDIDHYTRVRVYKALMPKYPNGMAELSLLPLAMRMGGPREAVWHALIRKNHGVTHFIVGRDHAGPGKNSQGVDFYGPYEAQELVEKYKSEIGIEIVPFQMVTYSPDTDEYIPADEVPEGVKTLNISGTELRRRLKTGLPIPEWFSYPEVVSVLRQSHPPRNQQGFTIFFTGLHASGKNAIARALQVSLNQESTRSVSLLASENTRAELSSELGFSKRDRDINIARQAFVAGELTRAGAAAIVAPIAPYAEARNAAKKTIEQFGGFYLVHVATPLEECIKRDRDGIYERAKRGEIKEFTGLDAPYEVPTNADLTIDITQQSVSQAVHEIILLLEKDGYIGSA

SEQ ID NO: 38605 - protein, 130 aa, Pinus koraiensis
MSKTIKRIGSRRNEHRVLKGVIYVQASFNNTIVTATDVRGQVISWSSAGACGFKGTRRGTPFAAQTAAENVIRTLMDRGIGRVEVMISGPGRGRDTALRTIRRSGILLSFVRDVTPMPHNGCRPPKKRRV

SEQ ID NO: 38606 - protein, 483 aa, Amanita muscaria
MSSGGLVSALSGFKKSLNFTWIGWPGFFIPPKDRPLVNKRLMDQYSCQAVYLDDDVADKHYNGFSYSILWPLFHYHPGEMNFDEENWLAYRQANLQFAEAVLQQLTPGAMVWVQDYHLMLLPMLLRGLIEGRDLGADLSITELSEIGEGAEEGIQNAKNLHGVKMGFFLHTPFPSSEIYRILPVRREILLGILYCDLIGFHTYDYARHFLSSCTRILGLPTMPNGVEFEGRMAHVGTFPIGIEPSSFIENLKKDSVTARITQLEHRFNGVKVIVGVDRLDYIKGVPQKLHALELFLTQHPEWIGKVVLVQLAVPSRQDVEEYQNLRSTVNELVGRINGRFGTVEFMPIHFMHKSLPFDELCALYAVSDVCLVSSTRDGMNLVSYEYVACQQARQGVMILSEFAGAAQSLNGSIVVNPWDSQQVADAIHEAVTMDAPTRSENHKKLFKYVNKYSAAFWGSSFIKEMARIKAIEVNKGAKEDAAV

SEQ ID NO: 38607 - protein, 315 aa, Rhodobacter sphaeroides 2.4.1
MRLLITRPLPDRILEAARARFEVTVRNSTKPLSPEELRRALAEHDAVLPTLGDLFRAEVFADVPQPRARILANFGVGTNHIDVAAATAAGIAVTNTPGAVTDATADIALTLMLMTARRAGEGERLVRRGAWEGWHPTQMLGLHMTGKRLGILGMGRIGKAIARRAHHGFGMEITFFNRSPVADPGVPARQVGLAEALDADIVVVAVPATPATHHLVDAAALSQMRPGAILVNIARGDIVDETALIAALAEGRLAGAGLDVYEFEPEVPAALRAMENVTLLPHLGTAALEVREGMGLMAVENLLAFADGRPLPNAV

SEQ ID NO: 38608 - protein, 224 aa, Zea mays
MEEDYVFKIVVVGDSAVGKTQLLGRFTRDEFFLDSKSTIGIEFQTRTVDIARHRVKAQIWDTAGQERYRAVTSAYYRGALGAMLVYDVTSRRTFDHVARWVAELRAHADKSIVVMLVGNKADLARDARRRAVDTDEAAAFAEEQGLFFSEASALSGDNVERAFLTLLREIHAIVSRKTLDAAAETGGTTDVLALKGTKLSLADEISIMETSALRTASGGSCSCT

SEQ ID NO: 38609 - protein, 150 aa, Lactobacillus delbrueckii subsp. lactis
  misc_feature (137)..(137): Xaa can be any naturally occurring amino acid
  unsure (1)..(150): unsure at all Xaa locations
NREIYNFKPLREELIKAGHTFSTKADTEVILHGYEEWGMDGILKRVRGMFAFIIWDDNTQTMYGARDFFGIKPMYYQDVDGHLLVGSELKSFLPFPHFKKELNTEAVKPYLMNQYNDLKETFFKGVYRFQPGHWFEXKDGKMKTHQYWDA

SEQ ID NO: 38610 - protein, 192 aa, Candida albicans SC5314
MEQSQNYNNPNLPVKSQTAREGRENQRYNSETGARIVAGCMCLNETKDKIIMISSSKHKNRWIVPKGGNELDESELETAVRETWEEAGVEGIIIKKLPVVLDSRGSQAPVIKGEFDPDVATPKSEFHFFELQVDQLSTSWPEMKKRQRRWCTYSEAKHELLKSKRPELVDALNMSSILKDTIDDENPKQDNY

SEQ ID NO: 38611 - protein, 393 aa, Clostridium thermocellum ATCC 27405
MCTLEIKEKCSEIMDEVIRIRRDIHKNPELGFNEYRTSSIASDFMKNLGFSVRTNVAKTGVVGVLEGERPGKTIAIRADMDAIPIAEENDFEYASQNKNVMHACGHDAHIAIALGTAKILYHFKDRISGNVKFIFQPAEEGLGGASFMIEEGALDNPATDAIIALHVSPLLKSGQISVGAGPVMASPAEFDIVIKGRGGHAAQPNKCVNPISIGANIINMFSSIIPKTLSPFKSAVLSVTCFEAGNTYNVIPSQAVIKGTVRAFDRETHNVIYNKMYSVIASLTSAEGADFSFDYNLGYPPVVNNAEIAKLVANAAKKIVGDDNVVENPEPSMLAEDFSYYALKIPGAIFNLGCRHPHDENFYNLHSSKFNLDESCIITGIQILSQCVLDFLG

SEQ ID NO: 38612 - protein, 338 aa, Synechococcus elongatus PCC 7942
MMSNTMRAVVLEMPGGPEQLQLQSLPWPAIAHPSEVLVQLQAAGLNPIDTKLRQRGSFDPDRRPAILGCDGAGWVAAVGSAVDRFAVGDAVYFCHGGLGLEPGTYADYAVVDQAWLAPKPERLSFVEAAGVPLALITAWEALYDRGRLQAAQTVLIHAGAGGVGHLAIQLAKLRGARVATTVSTPEKAAIAEHYGADFVIPYRDRDWVAAVLDWTDGKGVDLAFDTVGGAVLEQTFPAVRLYGDLVTILAPDAATNWKVARDRNLRISLELMLTPQLQRVTEARQHQTQILTTASRWFDQEQLHIHIGQVLPISEISQAHQFLERQQGAGKIVIDLTA

SEQ ID NO: 38613 - protein, 214 aa, Mesorhizobium loti MAFF303099
MPHLPDHLLAGYRNFMNGRYLTESGRYRELAREGQAPETMIVACCDSRAAPEAIFDAGPGELFVLRNVGNLVPPYEPDGEFHSTSAALEFAVQSLKVKNIVVMGHGRCGGIRAALDPNAAPLSPGDFIGKWMSLIAPAAETVSSSTFMTAAERQTALERISIRYSIANLRTFPCVSILEGKGRLSLHGAWFDISTGELWVMNKETGDFERPVLE

SEQ ID NO: 38614 - protein, 390 aa, Schizosaccharomyces pombe
KNQTHIFREMSDDSHLETKVVTDGTTGEKKTISYEPCRVLGSGSFGVVIQAKLVGTPGFIAVKRVLQDKRYKNRELQIMRAISHPNIIKLIAFFHTHNPSKDETHLCLLLEYMPETVFDDMRWYTRRRKSIPNLSIKLYAFQLFRALAYLHSTGVCHRDIKPQNLLVDYKTGILKLCDFGSAKVLVPSEPNVSYICSRYYRAPELVFGATHYTTKIDVWSAACVIAELFIGPPLFPGDSSVEQLVEIIRVLGTPPYHEISAMNPTYVNHSLPNVRPHTLESVMPHNCTKSAMDLLHKMLTYVPSKRISAIEVLTHPFFDELRDPNCMYHCSRDEGTIERHLPPLFNFNLAELSIRPNLNKAILPPHVYESLDVDINNFEPIVVKQADADS

SEQ ID NO: 38615 - protein, 182 aa, Pseudomonas syringae pv. phaseolicola 1448A
MFKYIGDIVKGTGTQLRSLVMVFGHGFRKRDTLQYPEEQVYLPPRYRGRIVLTRDPDGEERCVACNLCAVACPVGCISLQKAETEDGRWYPDFFRINFSRCIFCGLCEEACPTTAIQLTPDFEMADFKRQDLVYEKEDLLISGPGKNPDYNFYRVAGMAIGGKPKGSAQNEAEPINVKSLLP

SEQ ID NO: 38616 - protein, 241 aa, Oryza sativa (japonica cultivar-group)
  misc_feature (53)..(53): Xaa can be any naturally occurring amino acid
  unsure (1)..(241): unsure at all Xaa locations
MGRGKIVIRRIDNSTSRQVTFSKRRNGLLKKAKELSILCDAEVGLVVFSSTGXLYEFSSTNMKTVIDRYTNAKEELLGGNATSEIKIWQREAASLRQQLHNLQESHKQLMGEELSGLGVRDLQGLENRLEISLRNIRMRKDNLLKSEIEELHVKGSLIHQENIELSRSLNVMSQQKLELYNKLQACEQRGATDANESSSTPYSFRIIQNANMPPSLELSQSQQREGECSKTAAPELGLHLP

SEQ ID NO: 38617 - protein, 359 aa, Yarrowia lipolytica CLIB122
MHFSLVLTLFATLVSVSAAPSNPGVLSFAVTKEPKDVAIAIKNPPGTYYRAKVSLGTPAQVFNVIFDTGSSDLWVPNYDSKASSSYKYLNSDFNVSYTAVNGILGDWATETLKLGPVTLENFQFGNVKGNHAGGGVFGVAFRAQEMVKPGDYYDNFPYAVKKAGYINKAAYSVFLDDPDTNEATFLLAGVDHAKFEGDLSWLNVSDPAAGALVQLKDISLGSKHMTVDAPVVLDTGTIFTSVPDPIYQELKKTLNLGKFNKFLGINYIDCDAKMSVAFNFPGATVLADEKSLVVPIGPFYGNDDKRCGFGIQSTTVFGGDPIMGDTVMRAAYVVYDLEDHRCGVAQAAYNDKSDVRPLQ

SEQ ID NO: 38618 - protein, 364 aa, Listeria monocytogenes str. 1/2a F6854
MRTIDSSSKKDGFRMPGEFEKHAGCYIIWPERPDNWRLGAKPAQKAFVDVATAISHFEPVTVVASSSQYVNARYMLPDEIRVVEMDNDDAWVRDSGPTFVVNDSGDVRGVDWSFNSWGGLVDGLYFPWDKDDQVAQKICELERKDRYRLADFVLEGGSIHVDGEGTLVTTEECLLSEGRNPQLSKQQIEMVLKEYLNLEKIIWLKRGIYLDETNGHVDNIFNYVRPGVVALAWTDDETDPQYEISKECFDILSNETDAKGRKLEVHKINVPKPILITDEESKGVDAVEGTLPREEGDRLAASYINYYTANGGVVFPLFGDPNDELAREKLQQLYPNCEVVGVKAREILLGGGNIHCITQQVPRG

SEQ ID NO: 38619 - protein, 482 aa, Pelargonium x hortorum
MENKSKQLLSKIATNDGHGENSPYFDGWKAYDRDPFHPSQNPNGVIQMGLAENQLSSDLIEDWVRSNPEASICTLEGVGKFKDVANFQDYHGLLEFRHAVAKFMSRGRGGKVTFDPDRVVMSGGATGANELIVFCLANPGDAFLLPSPYYPANDRDLQWRTGAQIIPVHCNSSNGFKITREALERSYAQAQESNINVKGVLLTNPSNPLGTILDRDTLKSIVSFVTDNNIHLVIDEIYAATVFVAPEFVSVSEILQEMDDTTCNPDLIHIVYSLSKDLGMPGFRVGIVYSFNDDVVSCARKMSSFGLVSTQTQHLLAAMLSDDVFVERFLAERRRLGRRHGVFTKGLEELGIGCLKSNAGLYFWMDLRKLLEEETFEAEMVLWKVIINEVKLNVSPGSSFHCVEPGWFRVCFANMDDETVHVALKRIRAFVRKKEVGPVKRKRFMDNLNLRLSFSSLRYDESVMLSPHIMVSTHSPLVRART

SEQ ID NO: 38620 - protein, 369 aa, Listeria monocytogenes str. 1/2a F6854
MGQLKGLPVEDGFRMPGEYEPHIGCFMIWPERPDNWRLGGKPAQQNYKEVAVAISNFEPVTMFVSPNQYKNARKELPDTIRVIEMSNDDAWIRDYGPSFLVDDKGDMRGVDWGFNAWGGLLDGLYFPWDKDNQIAKKVCELERIDYYSQKDFILEGCSIHVDGEGTLVTTEECLLSEGRNPNLTKIEIEQTLKKYFHAQKVIWLKHGFYLDETNGHVDNIFNFVAPGEVVLSWTDNKSDPQYEISRECYDILANKTDAKGRTFIIHKLHCPDPVLITQTESEGVEAINGTFPRQAGDRLAASYVNYYTANGAIIFPLFDDPKDKDAQELLEMLYPDRKIVGIKAREILLGGGNIHCITQHLPDKSTIRE

SEQ ID NO: 38621 - protein, 252 aa, Synechococcus elongatus PCC 7942
MLVCPVLDRIREVATRLEPRLLEIRRHLHAHPELSGHEHQTAAYVAGVLSSCGLQVREGVGRTGVVGDLPGTGRDRRCLALRTDMDALPIEEQTGLPFASRQQGIMHACGHDLHTTLGLGAAMVLSELGEPLPGDVRWLFQPAEEIAQGARWMVAAEALEGVDAILGVHVFPSIPAGVVGIRYGALTAAADDLEIVIQGESGHGARPHEAKDAIWIAAQIITMLQQAISRTQNPLRPVVLTIGQIQGGELLM

SEQ ID NO: 38622 - protein, 390 aa, Pelargonium x hortorum
YFDGWKAYDNNPFHLTQNPQGVIQMGLAENQLSFELIEQWVLNNPQASICTAQGLQEFKDTAIFQDYHGLPEFRYAVANFMGKVRGNRVTFNPDRIVMSGGATGAHEMIAFCLADPGDAFLVPTPYYPGFDRDLRWRTGVQLIPVVCESENNFRITRSALEEAYERAQEDNIRVKGLLITNPSNPLGTILDRETLVSLVSFINEKNIHLVCDEIYAATVFSQPAFVSIAEVIEQENVSCNRDLIHIVYSLSKDMGFPGFGVGIVYSYNDAVVNCARKMSSFGLVSTQTQHLIASMLSDDEFVDTFIVESAKRLARRYATFTRGLAQVHIGSLKSNGGLFIWMDLRRLLKEKTFEAEMALWRVIINEVKLNVSPGASFHCSEPGWFRVCFA

SEQ ID NO: 38623 - protein, 540 aa, Dubautia arborea
MKRSRERKKEAKTTSSVPDSGGMDELLEVLGYKVKSTDMADVAQKLEQLEMVMGEDGVLQLSDTVHYNPSDLSGWVQSMLSVLNENNNTPPSDHIVLSGDSSTTMIDFSNSSEIVVHGKQGSKMHEDDPYDLRAIAGGAIYGGESESSVRGNGNGNGIKRMKSTAVGSVDVQPESPRRVVLVDSQEAGIRLVHTLMACAEAIQHNDLKLADALVKHVGILVASQAGAMAKVATYFAGALAQRIYNIYPQNALETSCYEILQMHFYETCPYLKFAHFTANQAILEAFAGATRVHVIDFSLKQGMQWPALMQALALRSGGPPAFRLTGIGPPQPDNSDALQQVGWKLAQLADTIGVEFEFRGFVANSIADIDANMLNIRASETEVVAVNSVFEVHRLLARPGAVEKVLSGITKMKPKIVTLVEQESNHNGAVFMERFNEALHYYSTMFDSLESSALTLPNSQDDLVMSEVYLGRQICNVVACEGADRVERHETLTQWRVRMNSAGFEPVHLGSNAFKQASMLLALFAGGDGYRVEENDGCLM

SEQ ID NO: 38624 - protein, 386 aa, Pyrococcus horikoshii OT3
MEIMEFEEAFKEVYEMVKPKYKLFTAGPVACFPEVLEIMKVQMFSHRSKEYRKVHMDTVERLREFLEVEKGEVLLVPSSGTGIMEASIRNGVSKGGKVLVTIIGAFGKRYKEVVESNGRKAVVLEYEPGKAVKPEDLDDALRKNPDVEAVTITYNETSTGVLNPLPELAKVAKEHDKLVFVDAVSAMGGADIKFDKWGLDVVFSSSQKAFGVPPGLAIGAFSERFLEIAEKMPERGWYFDIPLYVKYLKEKESTPSTPPMPQVFGINVALRIIEKMGGKEKWLEMYEKRAKMVREGVREIGLDILAEPGHESPTITAVLTPPGIKGDEVYEAMRKRGFELAKGYGSVKEKTFRIGHMGYMKFEDIQEMLDNLREVINELKKQKGIN

SEQ ID NO: 38625 - protein, 410 aa, Campylobacter jejuni
MRNLLENIKKNSQKLLNLTPKDKEKIILKLAQILRENFKIILEANKKDMANFTKSGKMKDRLLLDEKRILALCEGLEKIAYIEDPIGKISKGWKNYAGLNIQKISIPLGLICVIYEARPSLSAEIAALMIKSSNACVFKGGSEAKFTNEAIFTLVNKVLKEFDLQDCFAMFTQRDEILQILAFDDLIDVIIPRGSSNMIQEIANNTKIPLIKQNKGLCHAFVDQSANLDMALKIILNAKCQRVSVCNALETLLIHEKIAKNFISLLIPEFEKFKVKIHAHENTLAYFNNSNLEIFKANENTFDTEWLDFALSVKLVKDCDEAIEHINKHSSLHSETIISNDASNIAKFQRLINSSCIYANASTRFSDGGEFGFGGEVGISTSKLHARGPMGIEDICTYKYIINGEGQIRE

SEQ ID NO: 38626 - protein, 538 aa, Dubautia arborea
MKRSRERKKEAKTTSSVPDSGGMDELLEVLGYKVKSTDMADVAQKLEQLEMVMGEDGVLQLSDTVHYNPSDLSGWVQSMLSVLNENTPPSDHIVLSGDSSTTMIDFSNSSEIVVHGKQGSKMHEDDPYDLRAIAGGAIYGGESESSVRGNGNGNGIKRMKSTAVGSVDVQPESPRRVVLVDSQEAGIRLVHTLMACAEAIQHNDLKLADALVKHVGILVASQAGAMAKVATYFAGALAQRIYNIYPQNALETSCYEILQMHFYETCPYLKFAHFTANQAILEAFAGATRVHVIDFSLKQGMQWPALMQALALRSGGPPAFRLTGIGPPQPDNSDALQQVGWKLAQLADTIGVEFEFRGFVANSIADIDANMLNIRASETEVVAVNSVFEVHRLLARPGAVEKVLSGITKMKPKIVTLVEQESNHNGAVFMERFNEALHYYSTMFDSLESSALTLPNSQDDLVMSEVYLGRQICNVVACEGADRVERHETLTQWRVRMNSAGFEPVHLGSNAFKQASMLLALFAGGDGYRVEENDGCLM

SEQ ID NO: 38627 - protein, 349 aa, Methanothermobacter thermautotrophicus
METTEVIEGKNITVERTGEENRKLIFQDCLCAVCGLCGEICPVSAIEVNPTGAMVRTEQDESKILIDENKCVLCGMCSSICPFQALDLQIDGTSIKELAEYPKILKSAEIDDETCIQCKACETACPQDAITITRELPERKDLITGEIEIDKDTCIYCGMCEEMCPVDAIEIEHQIPSSSSPTVATDINVDEDKCVHCGICKRICPVDAIMQVCRICPYGEYEIKVPEVTGTSYIDPELCVNCGWCQEICPVDAATVTKPFEGELIIDQDTCQACETCVMACPCNVLSFPKPEKSGEKPTKLYKDERFCIYCGACERSCPVNAIEVKRSRINTTPIKSKAWKNAFESLLK

SEQ ID NO: 38628 - protein, 536 aa, Dubautia ciliolata subsp. glutinosa
MKRSRERKKEAKTTSSVPDSGGMDELLEVLGYKVKSTDMADVAQKLEQLEMVMGEDGVLQLSDTVHYNPSDLSGWVQSMLSVLNDNTPPSDHMVLSGDSSTTMIDFSNSSKIVVHGKQGSKMHEDDPYDLRAIAGGAIYGGESESSVRGNGNGHKRMKSTAVGSVDVQPESPRPVVLVDSQEAGIRLVHTLMACAEAIQHNDLKLADALVKHVGILVASQAGAMAKVATYFAGALAQRIYNIYPQNALETSCYEILQMHFYETCPYLKFAHFTANQAILEAFAGATRVHVIDFSLKQGMQWPALMQALALRSGGPPAFRLTGIGPPQPDNSDALQQVGWKLAQLADTIGVEFEFRGFVANSIADIDANMLNIRASETEVVAVNSVFEVHRLLARPGAVEKVLSGITKMKPKIVTLVEQESNHNGAVFMERFNEALHYYSTMFDSLESSALTLPNSQDDLVMSEVYLGRQICNVVACEGADRVERHETLTQWRVRMNSAGFEPVHLGSNAFKQASMLLALFAGGDGYRVEENDGCLM

SEQ ID NO: 38629 - protein, 536 aa, Dubautia ciliolata subsp. glutinosa
MKRSRERKKEAKTTSSVPDSGGMDELLEVLGYKVKSTDMADVAQKLEQLEMVMGEDGVLQLSDTVHYNPSDLSGWVQSMLSVLNDNTPPSDHMVLSGDSSTTMIDFSNSSEIVVHGKQGSKMHEDDPYDLRAIAGGAIYGGESESSVRGNGNGHKRMKSTAVGSVDVQPESPRPVVLVDSQEAGIRLVHTLMACAEAIQHNDLKLADALVKLVGILVASQAGAMAKVATYFAGALAQRIYNIYPQNALETSCYEILQMHFYETCPYLKFAHFTANQAILEAFAGATRVHVIDFSLKQGMQWPALMQALALRSGGPPAFRLTGIGPPQPDNSDALQQVGWKLAQLADTIGVEFEFRGFVANSIADIDANMLNIRASETEVVAVNSVFEVHRLLARPGAVEKVLSGITKMKPKIVTLVEQESNHNGAVFMERFNEALHYYSTMFDSLESSALTLPNSQDDLVMSEVYLGRQICNVVACEGADRVERHETLTQWRVRMNSAGFEPVHLGSNAFKQASMLLALFAGGDGYRVEENDGCLM

SEQ ID NO: 38630 - protein, 569 aa, Saccharomyces cerevisiae
MKLKTVRSAVLSSLFASQVLGKIIPAANKRDDDSNSKFVKLPFHKLYGDSLENVGSDKKPEVRLLKRADGYEEIIITNQQSFYSVDLEVGTPPQNVTVLVDTGSSDLWIMGSDNPYCSSNSMGSSRRRVIDKRDDSSSGGSLINDINPFGWLTGTGSAIGPTATGLGGGSGTATQSVPASEATMDCQQYGTFSTSGSSTFRSNNTYFSISYGDGTFASGTFGTDVLDLSDLNVTGLSFAVANETNSTMGVLGIGLPELEVTYSGSTASHSGKAYKYDNFPIVLKNSGAIKSNTYSLYLNDSDAMHGTILFGAVDHSKYTGTLYTIPIVNTLSASGFSSPIQFDVTINGIGISDSGSSNKTLTTTKIPALSDSGTTLTYLPQTVVSMIATELGAQYSSRIGYYVLDCPSDDSMEIVFDFGGFHINAPLSSFILSTGTTCLLGIIPTSDDTGTILGDSFLTNAYVVYDLENLEISMAQARYNTTSENIEIITSSVPSAVKAPGYTNTWSTSASIVTGGNIFTVNSSQTASFSGNLTTSTASATSTSSKRNVGDHIVPSLPLTLISLLFAFI

SEQ ID NO: 38631 - protein, 186 aa, Oryza sativa
  misc_feature (12)..(12): Xaa can be any naturally occurring amino acid
  misc_feature (57)..(57): Xaa can be any naturally occurring amino acid
  misc_feature (96)..(96): Xaa can be any naturally occurring amino acid
  misc_feature (123)..(123): Xaa can be any naturally occurring amino acid
  misc_feature (138)..(138): Xaa can be any naturally occurring amino acid
  misc_feature (174)..(174): Xaa can be any naturally occurring amino acid
  unsure (1)..(186): unsure at all Xaa locations
MGLFNNIPTDPXIEVFHLTELFNQDANPSKVNLGIGVYQDENSKTLTLPVVRSVEQXMAQDLTLTKTYLKGTGLDAFCTACLKLVLGEQSPAIVEXRACSIQSLSGTGALRIGLDFLYRMVSXVAYVSAPTWGNHDSXLQTVGFEVRKYRYWDKEKLGLNIDGLIADLKPAPEXSVVILHACAHNP

SEQ ID NO: 38632 - protein, 73 aa, Allium sativum
MSCSCGSSCNCGSSCNCGKMYPDLEEKSTGAQATVVLGVAPEQKVQLEAATESGETAHACGCGANCKCDPCNC

SEQ ID NO: 38633 - protein, 408 aa, Pediococcus pentosaceus ATCC 25745
MGRRVVVTGMGALTPLGNDRESFIQGLNSSKVGIDKITHFDAELTGITVAGEVKDFDPTVRIERKIAKRMDAFSQYALYSAVEAMEQADFKEGELDPYQVGVIYGSGIGGLTTIQEQVIKMDHKGPRRVSPLFVTNSITNMAAGNISMYFNAKNTSQAIVTACASANNAIGNAFHHIKNGYADVMITGGSESSINEIGIAGFASLTALTASEDRLRASIPFDKDRNGFVMGEGAATLILEDYDHAKARGANILAEIVGYGMTSDAFHMTQPDPEGRGAIRAMQMAMDEGGIKANDIDYINAHGTSTHANDSAESKAIESIFTENDHYKVSSTKSMTGHLLGAAGAIEAVATIAALQNGIMPVNVGLETKDPEVNIPLVTEDNRKASVNYALSNSFGFGGHNAVLAFKR

SEQ ID NO: 38634 - protein, 434 aa, Solibacter usitatus Ellin6076
MSFGGSRVATSTLPVSISLENEKNPWLAAAARFEEAAKRLKLDDGMRKVLGTPSKELTVHIPVQLDDGRIEVFTGYRVQHSVARGPAKGGIRFAPDVTLDEVRALASWMTWKCAVVNIPFGGGKGGVICDPHILSDTELEKLTRRYTAEIIDFIGPERDVPAPDVNTNEKVMAWMMDTYSMHARHTVTAIVTGKPMALGGSRGRPEATGRGCMMVTQRALNRMGKRPEDTSVVIQGFGNVGGMAAKLMSAVGFKIIAIVEYDGAAYNPNGLDIAALQLHRKETGSITGFSGGEDMDKTEAMFLECDVLIPAATENVITSQNAHRVRCRILCEGANGPTTPLADDILAEKKVFVIPDILANAGGVTVSYFEWVQDRQGFFWNEQLVNERLQEIMDESFDAIVAYAEAHQVNNRIAAYMVALDRVAQAIKLRGIYA

SEQ ID NO: 38635 - protein, 372 aa, Dechloromonas aromatica RCB
MNPTRLANAKRLVVKVGSALVTNNGTGLDLSAINDWARQIAVLRQQDKEVVLVSSGAIACGMQRLGWAKRPKSVHELQAAAAVGQMGLVQVYEGAFAKHGLHTAQILLTHDDLADRKRYLNARSTLNTLLELGVVPIINENDTVVTDEIKFGDNDTLGALVANLIEADALIILTDQQGLYTADPRKDPSATLINEATAGDETLEGMAGGAGTRIGTGGMITKVIAAKRAARSGAHTAIASGRETDPIIRLANGEPVGTLLVSQTQPLAARKQWLADHLQLAGRLILDAGAVNALHAGKSLLPIGVIAAEGEFERGAAVACISPDGREIARGLSNYGSGEARLIARKTTQEIENTLGYVDEPEIIHRDNLILS

SEQ ID NO: 38636 - protein, 634 aa, Saccharomyces cerevisiae
MLSLKKGITKSYILQRTFTSSSVVRQIGEVKSESKPPAKYHIIDHEYDCVVVGAGGAGLRAAFGLAEAGYKTACLSKLFPTRSHTVAAQGGINAALGNMHPDDWKSHMYDTVKGSDWLGDQDAIHYMTREAPKSVIELEHYGMPFSRTEDGRIYQRAFGGQSKDFGKGGQAYRTCAVADRTGHAMLHTLYGQALKNNTHFFIEYFAMDLLTHNGEVVGVIAYNQEDGTIHRFRAHKTVIATGGYGRAYFSCTSAHTCTGDGNAMVSRAGFPLEDLEFVQFHPSGIYGSGCLITEGARGEGGFLLNSEGERFMERYAPTAKDLASRDVVSRAITMEIRAGRGVGKNKDHILLQLSHLPPEVLKERLPGISETAAVFAGVDVTQEPIPVLPTVHYNMGGIPTKWTGEALTIDEETGEDKVIPGLMACGEAACVSVHGANRLGANSLLDLVVFGRAVANTIADTLQPGLPHKPLASNIGHESIANLDKVRNARGSLKTSQIRLNMQRTMQKDVSVFRTQDTLDEGVRNITEVDKTFEDVHVSDKSMIWNSDLVETLELQNLLTCATQTAVSASKRKESRGAHAREDYAKRDDVNWRKHTLSWQKGTSTPVKIKYRNVIAHTLDENECAPVPPAVRSY

SEQ ID NO: 38637 - protein, 688 aa, Chlorobium tepidum TLS
MTVRVRPISLNLRNNPIMTRTRSIDEEAVATIRLLAVDMVEKAKSGHPGLPLGAAPMAYTLFTKIMRFNPANPEWPNRDRFVLSAGHGSALLYSMLHLCGYGLGMDELKQFRQLGSRTPGHPEYGHTPGVETTTGPLGQGIATAVGMAAAERFLATKLNTAERALIDHFTYVICGDGDLMEGISSEASSLAGHLRLGRLICLYDSNHISIEGSTGLAFTEDVARRYEAYGWHVLSHIDGNDLAAIEQAVRNAQEIDDRPSLIIVNTTIGYGSPHKQGTASAHGEPLGPEETKLVKQAFGFDENESFVVSDRVYDHFHAIAERGAALEAEWQTQWQSFRQEEPGLASALTDLLAGRFPESWLPEMPKFTTGEKLATRQASKSVLAKIAEKAPLLAGGSADLAPSNGTLIGAAFEAGSYGGSTFHFGVREHAMGALVNGMALSKMMIPYGATFLVFADYMKPALRIAAMMQSPSIFIFTHDSIGLGEDGPTHQPIEQLAMLRAMPGFDVYRPADANETAAAWLLALKRRKPAALVLTRQGLPVLDDADGRLRNGVTKGGYVLAEWADTDDDDDRRIIIVATGSEVHPALEAKTLIEQEGFAARVVSMPSRELFAEQPAEYRAAVLPPTVRARAVVEAAATFGWHDIAGDGGIVIGIDRFGMSAPSSQVMEHFGFTAENIAARALELLNRK

SEQ ID NO: 38638 - protein, 267 aa, Chlorobium tepidum TLS
MTAMTHWISEPLDALLEKAVAFITDTAYRAVAERGRFTLVLSGGNTPRALHQKLARGIREERYLELGYKLPEEARRCTRNPDVIVPPWTHTLLFQGDERYLPPSHPDSNYGMARQTLIRNVCLKPSNIHRMPTESGDPEADAQRYEMLLKGLFHKRNSNNAPPSFDLILLGLGDDGHTASLMPDDKGALEEKERWVIAVNAPNGKPPGIRLTLTLPVINEARAVLFLVPPSRHELARSISNGERPELPAGMVKPRSGDVWWFVEGVV

SEQ ID NO: 38639 - protein, 94 aa, Bacillus subtilis
MLKPLGDRVVIELVESEEKYASGIVLPDSAKEKPQEGKIVAAGSGRVLESGERVALEVKEGDRIIFSKYAGTEVKYEGTEYLILRESDILAVIG

SEQ ID NO: 38640 - protein, 544 aa, Bacillus subtilis
MAKEIKFSEEARRAMLRGVDALADAVKVTLGPKGRNVVLEKKFGSPLITNDGVTIAKEIELEDAFENMGAKLVAEVASKTNDVAGDGTTTATVLAQAMIREGLKNVTAGANPVGVRKGMEQAVALAIENLKEISKPIEGKESIAQVAAISAADEEVGSLIAEAMERVGNDGVITIEESKGFTTELEVVEGMQFDRGYASPYLVTDSDKMEAVLDNPYILITDKKITNIQEILPVLEQVVQQGKPLLLIAEDVEGEALATLVVNKLRGTFNAVAVKAPGFGDRRKAMLEDIAVLTGGEVITEDLGLDLKSTQIAQLGRASKVVVTKENTTIVEGAGETDKISARVTQIRAQVEETTSEFDREKLQERLAKLAGGVRVIKVGAATETELKERKLRIEDALNSTRAAVEEGIVSGGGTALVNVYNKVAAVEAEGDAQTGINIVLRALEEPIRQIAHNAGLEGSVIVERLKNEEIGVGFNAATGEWVNMIEKGIVDPTKVTRSALQNAASVAAMFLTTEAVVADKPEENGGGAGMPDMGGMGGMGGMM

SEQ ID NO: 38641 - protein, 267 aa, Zea mays
  misc_feature (62)..(62): Xaa can be any naturally occurring amino acid
  misc_feature (70)..(70): Xaa can be any naturally occurring amino acid
  misc_feature (232)..(232): Xaa can be any naturally occurring amino acid
  misc_feature (255)..(255): Xaa can be any naturally occurring amino acid
  unsure (1)..(267): unsure at all Xaa locations
PHLLSFCSERTHRPVSDLRSPIPSSDLKIADLSTRLSLRKTITLQVESSDTIDNVNANIQDXESIPPHQXRLIFPDKQFEDGRTLADYNIQKESTLHLVLRLWGGMQIFHKTLTGKTITLHVESSDTIDNVKAKIQDKEGIPPDQQRLIFAGKQLEDGRTLDDYNIHKESTLHLVMRLMRGMHIFMKTLTGKTITLEAKSSDTIDNVKANIHDNEGIPPDHQSLVLAGKQLXDGRTLADYNIHNESTHHLTLRLXSGMQIIVKTLTG

SEQ ID NO: 38642 - protein, 701 aa, Pirellula sp. 1
MKNRTNIKTTNPQAIRMTTATNVNLPKPPPLPEPESAPAETMNAMLTNALMHAVRNGVKDSRAQSALNRLLPKLESFWEVENVSQQEADEIQLRIVQHWDDLFGYLLHLYGDQWDFFYHLEQILLTIIRGWRMRPEQLKQDDEHRINNPEWYQSEKLVGGALYVDLFSENLGELRKQIPYFQDLGLSYLHLMPLFAVRPGNNDGGYAISNYRSVDPRVGTIDDLRLLADDLREAGILLVLDFVFNHTADDHYWAQQAQSGNEEYQKYYFIFPDREVPDQYERTLREIFPTVRRGNFTWHDGMQQWVWTTFNSFQWDLNYRNPEVFRAMLSEMLFIANTGVDLLRLDAVAFIWKQMGTNCENLPEAHTLIRAFNSCVRIAAPGLVFKSEAIVHPDDVVRYISHKECQTSYNPTLMALMWESLATRDTKLLRRSLARRHKLPERTTWVNYLRCHDDIGWTFDDADAAAVGIDAFGHRQFLNAFYTGQFEGSFARGVPFQHNPDNGDMRISGTLASLAGLEQAIESDRDDWKELAIRRILLLNAMMLSVGGIPLVYLGEEWGALNDYDFVKDPAKAGDTRWVHRPKMQWKFLEELGDDGSIRGRIYRSIRKLIAIRKMTPAFGGLDMELLVLESPHLLGYVRQHEGNRVIVIANFCEHAQEIDSNRLRTAGMGRFFEDLYSGQTITTSHPLTLGPYEFMWLHRV

SEQ ID NO: 38643 - protein, 438 aa, Ashbya gossypii ATCC 10895
MDYRGGKRSSISFGSYQRPMEQFQNAGGGIYQRQSPMLYHPRSLEVGAPHAYCADLPSPQFAVDWDACDRVAIGSYKEDAFNKLTVLQATPDLSHWDSVAQASVIYPLSKIQWMPKGTGKLATCSDSLRIRSVEEQLHEQLNLSLVKYGKSLGEVSNGRMLGQLPPVTSFDWNALDTNLILFSSIDTTCTVWDLQASNYVKTQLIAHDSEVFDAKFLTQSSNLFASCGGDGSVRVFDLRCLAHSTIIYEPQQQVQGQTPSQTQVHTLAAHEQDGQLQKNSQSSALSSSASSSLGALDNCALLRLEPSPFDPNILATIQQDSNVVIILDMRYPGSPMLLLEGHAAPVNQLKWHPSKPNVLATCGDDCQILYWDLLELLSASQVWTGLTQQRWSTTSTVRTLETPQMSYTAQYEVNNFVWRPSGDWIGYTAGKRFYNIRM

SEQ ID NO: 38644 - protein, 252 aa, Brassica napus
MSLLSKLRCITVDVTGTLIAYKGELGDYYCMAAKAVGLPCPDYTRVHEGFKIAYTDMAQKYPCFGFSKMPNIAWWKTCVRDSFVKAGYDYDEETFEKVFRRIYSTFGSAAPYSVFQDSRPFLRWAREKGLIVGLVSNAEYRYQEVILPALGLNKGEWDFGVFSGMEGIEKPDPRIYKLALERAGNNIAPEQVLHIGDSMRKDYVSAKSIGMHALLLDRFETEAAKDWREAGAVVLPDLVAVQQLLESDKLKC

SEQ ID NO: 38645 - protein, 308 aa, Pseudomonas syringae pv. phaseolicola 1448A
MTSKLDQLKKFTTVVADTGDFGAIKSLEPEDATTNPSLLLKAASDVNNAQMLADAFSGAKGDIGLACDRFAVAIGQEILKVVPGRVSTEVDARLSFDTNALIERSERLIGLYDAAGIKRDRVLIKLAATWEGIRAAEKLEKDGIQTNLTLLFSFAQAIACAEAGVFLISPFVGRIYDWYKKSSGTDYVGAEDPGVQSVTRIYNYYKANDFKTVVMGASFRNLNQIEQLAGCDRLTISTDLLKKLAEDTGTLERKLAPGNAGEARQSLTESQFRWASNEDAMATEKLAEGIRQFARDQEKLEALLSAKA

SEQ ID NO: 38646 - protein, 390 aa, Sulfolobus shibatae
LDTLEALSQPERVIQVKIQIRGSDGKLKTFMGWRSQHNSALGPYKGGVRYSPNVTQDEVIALSMIMTWKNSLLLLPYGGGKGGIRVDPKKLTLKELEDLSRKYVQLIHNYLGSDVDIPAPDINTNPQTMAWFLDEYIKITGEVDFAVFTGKPSELGGIGVRLYSTGLGVATIAREAANKFIGGIEGSRVIIQGFGNVGSFTAKFLNEMGAKIIGVSDIGGGVISDDGIDVNKALEVVQSTGSVVNYPEGKKVTNEELLTSDCDILIPAAVENVINKFNAPKVKAKLIVEGANGPLAADADEIIKQRGIVVIPDILANAGGVVGSYVEWANNKSGGIISDEEAKKLIIDRMTNAFNALYEFHKRKFADQDLRTVAMALRVDRVVGMKARAI

SEQ ID NO: 38647 - protein, 752 aa, Zea mays
MGCVSSKQFHGGDDHGDGKPRRRPSSNSLKRLVSYSSSKRHEELEEEDEVGAAVAATSSSGGRRAGNDASTARLIRKPPALVVEAVPALSEEAATLAVGVVDAERAVAAATGNRKRPPADVHINGAAEQGLSSVGVRTEGEAKPRIRDVPNGVQGEHVVAGWPRWLTEVAAEAVRGWQPRRAESFEKLDKIGQGTYSSVYKARDLENGKIVALKKVRFANMDPESVRFMAREIHILRRLDHPNVIKLEGLVTSRMSSSLYLVFEYMEHDLAGLAATPGLKFSEPQVKCYMQQLLSGLDHCHNRGVLHRDIKGANLLLDNNGILKIADFGLATFFNPNQKQHLTSRVVTLWYRPPELLLGSTNYGAAVDLWSAGCILAELLSGKPIMPGRTEVEQLHKIFKLCGSPSEDFWANLKLSRATIFKPQHPYRRCVNDVYKDFPTTALTLLDYLLAVEPGNRGTAASALDSEFFTTKPYACDPSSLPKYPPSKEYDAKLRDEEARRQRAAAKGQEAEAGRRKQPPAPDGNSGLQHRRVQVNSKNSTYKFTPKEDVSGFPIDPPARAAADNGYPQRVPLMQAGRSSSTLGRSSGMDPKAQRFHTSQIVTTEMSNQSTASGQRGNAPKMSNLGESARRQYFREHRSSSRYSQLTAADPSDRPEWNHQFQERPSSSHRKDDAAVNKEHTVVNGTKKNRIHYSGPLMPPGVNMDEILREHERQIQQAVRRARLDKGKGKHSGERDQSESLLCTTGNLRADR

SEQ ID NO: 38648 - protein, 492 aa, Homogyne alpina
MDPYKQRPASAYNSPFLTTNAGLPVYNNTASLTVGNRGPILLEDYHLIEKLANFTRERIPERIVHARGASAKGFFEVTHDITHLTCADFLRAPGVQTPTIVRFSTVIHERGSPETIRDPRGFATKFYTREGNFDIVGNNFPVFFTRDAMAFPDVIHAFKPNPKSHIQEDWRILDFLSHHPESLNTMTFWLDDIGIPTDYRHMEGSSVNALTLVNKEGKMHYVKFTWKPTCGVKCLMDEEAIKIGGANHSHATQDLYDSIQAGNFPEWKLFLQVIDPDHEDRLDFDPLDGTMTWPDDIIPLQPVGRMVLNKNIDNFFAENEQLALNPGLVVPGIYYSDDKMLQGRIFAYSDTQRHRLGPNYLQLPVNAPKCAHRNNHYDGNMNFMHRDEEVDYFPSRYDRVQHAQKYPISPAKVTGTRDRTVIPKANDFKQPGERYRSWEPDRQERFIIRMVKMLSDPRVTHELRSIWISYWTQADQSLGQKIASRLNVRPNY

SEQ ID NO: 38649 - protein, 378 aa, Nostoc sp. PCC 7120
MMVCEYKPGLEGIPAAQSSISYVDGQKGILEYRGIRIEDLAQQSTFLETAYLLIWGELPTKEELQVFEEEVRLHRRIKYRIRDMMKCFPESGHPMDALQASAAALGLFYSRRDLHNRCYIRDAVVRLIATIPTMVAAFQLMRKGNDPVKPRDDLDYSANFLYMLNEKEPDALAAKIFDICLILHVEHTMNASTFSARVTASTLTDPYAVVASAVGTLGGPLHGGANEEVIQMLEEIGSVENVRSYVEERLQRKDKLMGFGHRVYKVKDPRATILQGLAEQLFAKFGADKYYDIAQEMERVVEEKLGHKGIYPNVDFYSGLVYRKMGIPTDLFTPIFAIARVAGWLAHWKEQLEENRIFRPTQVYNGKHSVTYTPIDQR

SEQ ID NO: 38650 - protein, 656 aa, Wolinella succinogenes
MKVQYCDSLVIGGGLAGLRAAVATQQKGLSTIVLSLIPVKRSHSAAAQGGMQASLGNSKMSDGDNEDLHFMDTVKGSDWGCDQKVARMFVNTAPKAIRELAAWGVPWTRIHKGDRMAIINAQKTTITEEDFRHGLIHSRDFGGTKKWRTCYTADATGHTMLFAVANECLKLGVSIQDRKEAIALIHQDGKCYGAVVRDLVTGDIIAYVAKGTLIATGGYGRIYKNTTNAVVCEGTGTAIALETGIAQLGNMEAVQFHPTPLFPSGILLTEGCRGDGGILRDVDGHRFMPDYEPEKKELASRDVVSRRMIEHIRKGKGVQSPYGQHLWLDISILGRKHIETNLRDVQEICEYFAGIDPAEKWAPVLPMQHYSMGGIRTDYRGEAKLKGLFSAGEAACWDMHGFNRLGGNSVSEAVVAGMIVGEYFAEHCANTQVDLETKTLEKFVKGQEAYMKSLVESKGTEDVFKIKNRMKDVMDDNVGIFRDGPHLEKAVKELEELYKKSKNVGIKNKRLHANPELEEAYRVPMMLKVALCVAKGALDRTESRGAHNREDYPKRDDINWLNRTLASWPNPEQTLPTLEYEALDVNEMEIAPGYRGYGAKGNYIENPLSVKRQEEIDKIQSELEAAGKDRHAIQEALMPYELPAKYKARNERLGDK

SEQ ID NO: 38651 - protein, 538 aa, Dubautia raillardioides
MKRSRERKKEAKITSSVPDSGGMDELLEVLGYKVKSTDMADVAQKLEQLEMVMGEDGVLQLSDTVHYNPSDLSGWVQSMLSVLNDYNNTPPSDHIVLSGDSSTTMIDFSNSSEIVVHGKQGSKMHEDDPYDLRAIAGGAIYGGESESSVRGNGNGIKRMKSTAVGSVDVQPESPRPVVLVDSQEAGIRLVHTLMACAEAIQHNDLKLADALVKHVVILVASQAGAMAKVSTYFAGALAQRIYNIYPQNALETSCYEILQMHFYETCPYLKFAHFTANQAILEAFAGATRVHVIDFSLKQGMQWPALMQALALRYDGPPAFRLTGIGPPQPDNSDALQQVGWKLAQLADTIGVEFEFRGFVANSIADIDADMLDIRASETEVVTVNSVFEVHRLLARPGAVEKVLSGITKMKPKIVTLVEQESNHNGAVFMERFNEALHYYSTMFDSLESSALTLPNSQDDLVMSEVYLGRQICNVVACEGADRVERHETLTQWRVRMNSAGFEPVHLGSNAFKQASMLLALFAGGDGYRVEENDGCLM

SEQ ID NO: 38652 - protein, 280 aa, Hibiscus grandiflorus
GLPPAMAAKGHRVMTVSPRYDQYKDAWDTSVVVELKVGDKVETVRFFHCYKRGVDRVFVDHPMFFEKVWGKTASKIYGPRAGVDYKDNQLRFSLLCQAALLAPRVLNLNSSKYFSGPYGENVVFIANDWHTALLPCYLKSMYQSRGIYMSAKVVFCIHNISYQGRFAFADFSLLNLPDRFKSSFDFIDGYNKPVKGRKINWMKAGILESDRAMTVSPYYAQELVSGEDKGVELDNFIRKTGITGIVNGMDVQEWNPATDKYTCVKYDATTVMDAKPLLKE

SEQ ID NO: 38653 - protein, 215 aa, Arabidopsis thaliana
MASSASKFIKCVTVGDGAVGKTCMLICYTSNKFPTDYIPTVFDNFSANVVVEGTTVNLGLWDTAGQEDYNRLRPLSYRGADVFVLSFSLVSRASYENVFKKWIPELQHFAPGVPLVLVGTKLDLREDKHYLADHPGLSPVTTAQGEELRKLIGATYYIECSSKTQQNVKAVFDSAIKEVIKPLVKQKEKTKKKKKQKSNHGCLSNVLCGRIVTRH

SEQ ID NO: 38654 - protein, 458 aa, Xanthomonas campestris pv. vesicatoria str. 85-10
MSDPSAPDHLQRSLSNRHLQLIAIGGAIGTGLFMGSGKTISLAGPSILFVYLIIGAMLFFVMRAMGELLLSNLEYKSFIDFSTDLLGPWAGFFCGWTYWFCWIITAIADVIAIAAYAQFWFPGLAPWIPAILCVLLLLSLNLVTVKLFGEMEFWFALIKIIAIAALIITGAGLVAWGFRSPSGNVASLSNLWNDGGMFPMGIGGFFAGFQIAVFAFVGIELVGTTAAETADPRRNLPKAINSIPVRILIFYVLALIAIMAVTPWRQVVADKSPFVELFVLAGVPAAASLINFVVLTSATSSANSGIFSTSRMLYGLAEEQHAPKGFAKLSGAAVPARGLLFSCLCLLLGAMLVYLIPNLVTAFTLVTTLSAVLFMFVWSLILCAYIAYRRKRPEQHAASAFKMPGGVLMCYVCLAFFAFVIVLLTLQDDTRQALLASPVWFLLLAIGYAVKRRGNRQH

SEQ ID NO: 38655 - protein, 276 aa, Hibiscus grandiflorus
AMAAKGHRVMTVSPRYDQYKDAWDTSVVVELKVGDKVETVRFFHCYKRGVDRVFVDHPMFLEKVWGKTASKIYGPRAGVDYKDNQLRFSLLCQAALLAPRVLNLNSSKYFSGPYGENVVFIANDWHTALLPCYLKSMYQSRGIYMSAKVVFCIHNISYQGRFAFADFSLLNLPDRFKSSFDFIDGYNKPVKGRKINWMKAGILESDRVMTVSPYYAQELVSGEDKGVELDNFIRKTGITGIVNGMDVQEWNPATDKYTCVKYDATTVMDAKPLLKE

SEQ ID NO: 38656 - protein, 162 aa, Frankia sp. CcI3
MAFPVRSSQRPAPVIRWDPFREIEDAWTRMGSLLDEVVGGAEGRPVGLLAAAVIPVDIEETDDAYIVELELPGVRGRDVSIDLQDNELRVTGEIKERERKGVLRRQTRRVGRFEHRIVLPGEVDPESVSASLDDGVLTIRLAKSRKSQPRHIEVTGGSGGGS

SEQ ID NO: 38657 - protein, 418 aa, Triticum aestivum
  misc_feature (269)..(269): Xaa can be any naturally occurring amino acid
  unsure (1)..(418): unsure at all Xaa locations
MVDLQAAALVISVVAAEVRHLTGKFLDRLKAKALSSSFKMQIFVKTLTGKTITLEVESSDTIDNVKAKIQDKEGIPPDQQRLIFAGKQLEDGRTLADYNIQKEPTLHLVLRLRGGMQIFVKTLTGKTITLEVESSDTIDNVKAKIQDKEGIPPDQQRPIFAGKQLEDGRTLADYNIQKESTLHLVLRLRGGMQIFVKTLTGKTITLEVESSDTIDNVKAKIQDKEGIPPDQQRLIFAGKQLADGRTLADYNIQKESTLHLVLRLRGGQXKCVIAASVSGLQGLVSSGVLNVVFNIQDKEGIPPDQQRLIFAGKQLEDGRTLADYNIQKESTLHLVLRLRGGMQIFVKTLTGKTITLEVESSDTIDNVKAKIQDKEGIPPDQQRLIFAGKQLEDGRTLADYNIQKESTLHLVLRLRGGQ

SEQ ID NO: 38658 - protein, 538 aa, Argyroxiphium kauense
MKRSRERKKEAKTTSSVPDSGGMDELLEVLGYKVKSTDMADVAQKLEQLEMVMGEDGVLQLSDTVHYNPSDLSGWVQSMLSVLNDNNNTPPSDHIVLSGDSSTTMIDFSNSSEIVVHGKQGSKMHEDDPYDLRAIAGGAIYGGESESSVRGNGNGIKRVKSTAVGSVDVQPESPRPVVLVDSQEAGIRLVHTLMACAEAVQHNDLKLADALVKHVGILVALQAGAMAKVATYFAGALAQRIYNIYPQNALETSCYEILQMHFYETCPYLKFAHFTANQAILEAFAGATRVHVIDFSLKQGMQWPALMQALALRSGGPPAFRLTGIGPPQPDNSDALQQVGWKLAQLADTIGVEFEFRGFVANSIADIDANILDIRAPETEVVAVNSVFEVHRLLARPGAVEKVLSGITKMKPKIVTLVEQESNHNSAVFMERFNEALHYYSTMFDSLESSALTLPNSQDDLVMSEVYLGRQICNVVACEGADRVERHETLTQWRVRMNSAGFEPVHLGSNAFKQASMLLALFAGGDGYRVEENDGCLM

SEQ ID NO: 38659 - protein, 354 aa, Zymomonas mobilis subsp. mobilis ZM4
MALKALVVGSTGIVGQNLSNRLVAEGWTVYGLARHPFDIVSGVLPVAADIFDREALQQALADISVSHVFFCAWSRRPTEKENCIVNSEMITHIFQALPHPEKIKHSALITGMKHYLGSFENYAKGGAIETPFRESMPRLDLENFYYNQEDALFKASKQYGFSWSVHRPHSIIGYALGNVMNMGTTLAVYATICRETGRPFIFPGSPEQWHALSDLTDARLLADHVLWASTRAEGQNEAFNVVNGDIFRWKWLWPKLAEWFGIEAAPYPEKITSLADTLSGDADLWQNIVKRYQLKNIGFEKLNSAWHTDADLDRPLETVTDMSKSRLGGFTGYQYTPHSFFDLFERLRAEHIIP

SEQ ID NO: 38660 - protein, 557 aa, Xanthomonas campestris pv. vesicatoria str. 85-10
MSSAAPPCCTSLLGLSLSMFVAPGTLTAAPLDPPVVNAPAPTPPTPDLAYPELFQAVQRGELFDDQKHFVDFLPLRDPALINADYLAQHDHPGFDLRKFVDANFEESPPVQTDAIRQDTALREHIDLLWPKLVRSQNHVPPHSSLLALPHPYVVPGGRFREVYYWDSYFTMLGLVKSGETTLSRQMLDNFAYLIDTYGHIPNGNRTYYLSRSQPPFFSYMVELQAGVEGEAVYQRYLPQLQKEYAYWMQGSDDLQPGQAARHVVRLADGSVLNRYWDERDTPRPEAWLHDTRTAAEVKDRPAAEVYRDLRAGAESGWDYTSRWLADGQNLRTIRTTAILPIDLNSLLYHLERTLAQACAQAGAECTRDYAALAQQRKQAIDAHLWNAAGYYADYDWQTRTLSNQVTAAALYPLFAGLASDDHAKRTASTVRKTLLRPGGLATTAVKTGQQWDEPNGWAPLQWVAVDGLRRYGEDALARTIGERFLAQVQALFAREHKLVEKYGLETDAAGGGGGEYALQDGFGWTNGVTLMLLNLYPGKDAKAAPAKRVRKPEAAAR

SEQ ID NO: 38661 - protein, 222 aa, Pseudomonas putida KT2440
MVLRSEILVNKNVMPTAEQALPGRDTPMSLPEFHYVFKDTPLLGPFFEGAIDFAIFGLGCFWGAERRFWQREGVVSTVVGYAGGFTPHPTYEEVCSGLTGHTEVVLVVFDKDKVSYRELLAMFWELHNPTQGMRQGNDIGTQYRSAIYCTSPEQLEQAKASRDAFQAELSKAGFGEITTEIDQAPTVYFAEAYHQQYLAKNPDGYCGIGGTGVCLPPSLQGN

SEQ ID NO: 38662 - protein, 538 aa, Argyroxiphium sandwicense subsp. macrocephalum
MKRSRERKKEAKTTSSVPDSGGMDELLEVLGYKVKSTDMADVAQKLEQLEMVMGEDGVLQLSDTVHYNPSDLSGWVQSMLSVLNDNNNTPPSDHIVLSGDSSTTMIDFSNSSEIVVHGKQGSKMHEDDPYDLRAIAGGAIYGGESESSVRGNGNGIKRMKSTAVGSVDVQPESPRPVVLVDSQEAGIRLVHTLMACAEAIQHNDLKLADALVKHVGILVASQAGAMAKVATYFAGALAQRIYNIYPQNALETSCYEILQMHFYETCPYLKFAHFTANQAILEAFAGATRVHVIDFSLKQGMQWPALMQALALRSGGPPAFRLTGIGPPQPDNSDALQQVGWKLAQLADTIGVEFEFRGFVANSIADIDANMLDIRPSETEVVAVNSVFEVHRLLARPGAVEKVLSGITKMKPKIVTLVEQESNHNGAVFMERFNEALHYYSTMFDSLESSALTLPNSQDDLVMSEVYLGRQICNVVACEGADRVERHETLTQWRVRMNSAGFEPVHLGSNAFKQASMLLALFAGGDGYRVEENDGCLM

SEQ ID NO: 38663 - protein, 458 aa, Pediococcus pentosaceus ATCC 25745
MKEDLPQLKRSLTSNQMQMIALGGTIGVGLFMGSSSTIKWTGPSVLLAYGFAGLILYLVMRALGEILYVNPSTGSFADYATNYIHPLAGYLTMWSNIFQFIVVGISEVVAVSQYLNYWWPNLPGWVSSVVVIATLTLANLVSTKAYGAIEFYFALIKVLTIILMIIIGVLVIFMGLGNHWRPVGLSNLWAHGGFFTGGVKGFLFALSIVVGSYQGIELLGITAGEAANPKKAIVASVKSIVWRILIFYLGAIFVIVAIFPWNQLATVGSPFVETFSKVGITGAAGIINFVVLTAAMSGTNSGIYSASRMLYKLSQEGKVPKIFGKLSSHRVPSVAILTISFGILLGIILNIFLSSFKGGAVNLFVLIYSSSVLPGMVPWFVILLSELRFRRANPEIIQNHPFVMPLYPMSNYLAIISLLLIVVFMFINPDTRASVTVGFVFLMVLTINFIIKFRRKRG

SEQ ID NO: 38664 - protein, 324 aa, Rhodobacter sphaeroides 2.4.1
MTDHAIVATRPGGPDVLEWAERPAGRPGPGEVRLRQTAVGLNFIDCYFRSGLYPWPADELIPGGEAAGVVEELGEGVSGFAPGDRVAYTMPNGACRTARVLPADRLVRLPEGVTDEVAASIMLKGLTAQYLIHSSFRVEAGHHVLVHAAAGGVGQLLGQWLKAKGAITYGTVGGAAKAEMARASGFDHVIDYEATDFAEAVRELTGGRGCDVVYDSVGRTTWRGSLKSLRPRGSFVCFGQSSGPLDEFRFSDLAAGSFTANRPSLFHYIATRDELEARAADLFALVAEGRIVPRIGQTFALKDTAEAHRALEGRRTTGATVLLP

SEQ ID NO: 38665 - protein, 175 aa, Triticum aestivum
MAPTVMASSATSVAPFQGLNSTVGLPVSRRSNGASLGSVSNGGRIRCMQVWPIEGIKKFETLSYLPRLITEALLKQVDYLIRSKWVPCLEFSKVGFIFREHNTSPGYYDGRYWTMWKLPMFGCTDATQVINEVEEVKKEYPDAYVRIIGFDNMRQVQCVSFIAFKPPGCEESDKA

SEQ ID NO: 38666 - protein, 331 aa, Thermotoga maritima MSB8
MIKNQWYVVLSSRELKKGQLIGVTRFGEKLAFWRDSNGKVHCISDICCHRGASISHGKVLSNGERVMCPFHGFEYDSQGRVRTIPANGRNTPVPENFRVKSYPTYELADFIWIWYGDREPEKPPKYFDDITDELVYTEFKEVWNVHYSRAIENQLDPIHLPFVHYNTIGRGNRTVVDGPIVEWKDDEMFYFYVFNRIDDGTPARKPEEMDPKRKSKVYLEFKFPNIWQNHISEKIRVTAAFTPIDDDHTMIYLRFYVGLTGIKFLDKLIAVLGKPFNKIVLHQDKRVVETQIPKRSELRMGENLIPGDAPILEYRKKREALKSMQQNNRVK

SEQ ID NO: 38667 - protein, 816 aa, Hordeum vulgare subsp. vulgare
MGETAGERALSRVHSVRERIGHSLSAHTNELVAVFSRLVNQGKGMLQPHQITAEYNAAIPEAEREKLKNTPFEDLLRGAQEAIVIPPWVALAIRPRPGVWEYVRVNVSELGVEELSVLRYLQFKEQLANGSTDNNFVLELDFGPFNASFPRPSLSKSIGNGVQFLNRHLSSKLFHDKESMYPLLNFLRAHNYKGMTMMLNDRIRSLGTLQGALRKAETHLSGLPADTPYTEFHHRFQELGLEKGWGDCAQRASETIHLLLDLLEAPDPSSLEKFLGTIPMVLNVVILSPHGYFAQANVLGYPDTGGQVVYILDQVRAMENEMLLRIKQQGLDITPKILIVTRMLPDAHGTTCGQRLEKVLGTEHTHILRVPFKTEDGIVRKWISRFEVWPYLEAYTDDVAHEIAGELQANPDLIIGNYSDGNLVACLLAHKLGVTHCTIAHALEKTKYPNSDLYWKKFEDHYHFSCQFTADLIAMNHADFIITSTFQEIAGNKDTVGQYESHMAFTMPGLYRVVHGIDVFDPKFNIVSPGADMSIYFPYTEQQKRLTSLHTEIEELLFSDVENAEHKFVLKDKKKPIIFSMARLDRVKNMTGLVEMYGRNPRLQELVNLVVVCGDHGKVSKDKEEQVEFKKMFDLIEKYNLSGHIRWISAQMNRVRNGELYRYICDMKGAFVQPAFYEAFGLTVIEAMTCGLPTFATAYGGPAEIIVNGVSGYHIDPYQNDKASALLVGFFGKCQEDPSHWNKISQGGLQRIEEKYTWKLYSERLMTLSGVYGFWKYVSNLDRRETRRYLEMLYALKYRKMAATVPLAVEGETSGE

SEQ ID NO: 38668 - protein, 162 aa, Oryza sativa
  misc_feature (44)..(44): Xaa can be any naturally occurring amino acid
  unsure (1)..(162): unsure at all Xaa locations
MSLIRRSNVFDPFSLDLWDPFDGFPFGSGGSSSGSIFPCVPARXASSETAAFAGARIDWKETPEAHVFKADVPGLKKEEVKVEVDDGNILQISGERNKEQEEKTDQWHRVERSSGKFLRRFRLPDNAKPEQIKASMENGVLTVTVPKEEAKKPDVKSIQISG

SEQ ID NO: 38669 - protein, 734 aa, Thermotoga maritima MSB8
MKAYAFGFPKIGEKREFKKALEDFWKGKITEEQFEEEMNKLRMYMVENYRKNVDVIPSNELSYYDFVLDTAVMVGAVPERFGEYRGLSTYFDMARGGKALEMTKFFNTNYHYLVPEIETEEFYLLENKPLEDYLFFKSKGIETAPWVIGPFTFLYLSKRNGEWIRRPNQMEKLLESLVSVYKEVFEKLVENGCKEILVNEPAFVCDLEKAHWDLILNVYRELSEFPLTVFTYYDSVSDYEACVSLPVKRLHFDFVSNEENLKNLEKHGFPEDKKLVAGVINGRQPWKVDLRKVASLVEKLGASAISNSCPLFHLPVTLELENNLPGGLKEKLAFAKEKLEELKMLKDFLEGKTFDLPNVSFEDFAVDLQAVERVRNLPEDSFRREKEYTERDRIQRERLNLPLFPTTTIGSFPQTPEVRKMRSKYRKGEISKEEYEAFIKEQIKKAIELQEEIGLDVLVHGEFERTDMVEFFAEKLNGIATTQNGWVLSYGSRCYRPPIIYGTVTRPEPMTLKEITYAQSLTEKPVKGMLTGPVTIMSWSYYREDIPEREIAYQIALAINEEVKDLEEAGIKIVQIDEPAFREKAPIKKSKWPEYFEWAINAFNLAANARPETQIHAHMCYSDFNEIIEYIHQLEFDVISIEASRSKGEIISAFENFKGWIKQIGVGVWDIHSPAVPSINEMREIVERVLRVLPKELIWINPDCGLKTRNWDEVIPSLRNMVALAKEMREKFES

SEQ ID NO: 38670 - protein, 807 aa, Hordeum vulgare subsp. vulgare
MAAKLTRLHSLRERLGATFSSHPNELIALFSRYVHQGKGMLQRHQLLAEFDALFESDKEKYAPFEDILRAAQEAIVLPPWVALAIRPRTGVWDYIRVNVSELAVEELTVSEYLAFKEQLVDEHASRKFVLELDFEPFNASFPRPSMSKSYGKGVQFLNRHLSSKLFQDKESLYPLLNFLKAHNYKGTTMILNDRIQSLRGLQSALRKAEEYLVSIPEDTPSSEFNHRFQELGLEKGWGDTAKRVHDTIHLLLDLLEAPDPASLEKFLGTIPMMFNVVILSPHGYFAQSNVLGYPDTGGQVVYILDQVRALENEMLLRIKQQGLDITPKILIVTRLLPDAVGTTCGQRLEKVIGTEHTDILRVPFRTENGIRKWISRFDVWPYLETYTEDVANELMREMQTKPDLIIGNYSDGNLVATLLAHKLGVTQCTIAHALEKTKYPNSDIYLDKFDSQYHFSCQFTADLIAMNHTDFIITSTFQEIAGSKDSVGQYESHIAFTLPDLYRVVHGIDVFDPKFNIVSPGADMTVYFPYTETDKRLTAFHSEIEELLYSDVENDEHKFVLKDRNKPIIFSMARLDRVKNMTGLVEMYGKNAHLKDLANLVIVAGDHGKESKDREEQAEFKRMYSLIEEYKLKGHIRWISAQMNRVRNGELYRYICDTKGAFVQPAFYEAFGLTVIEAMTCGLPTIATCHGGPAEIIVDGVSGLHIDPYHSDKAADILVNFFEKSTADPSYWDKISQGGLKRIYEKYTWKLYSERLMTLTGVYGFWKYVSNLERRETRRYLEMFYALKYRSLAAAVPLAVDGESSGN

SEQ ID NO: 38671 - protein, 456 aa, Oryza sativa
  misc_feature (107)..(107): Xaa can be any naturally occurring amino acid
  misc_feature (358)..(358): Xaa can be any naturally occurring amino acid
  unsure (1)..(456): unsure at all Xaa locations
APVICRRFGSPPLAVVSSAPAAEECLGPHDLAFADKPRLPSGEILSYEWSTMGTARYGPYWRHIRRITVTELLSAHRVQHFAGVNAREVRAMARRLYRRAAAAAASXRVELKSRLFELFMNIMMAMICDRTFYGDGDDEVSEEARWFRSVVKETMELSGASTAWDFLPAAARWLFARRLTRRMRELSDSRTRFYQRLITDHRTKEKTDDDNAAAGDHSPAPRRRTMIGVLLSLQSKDPDACPDQLIRALCIGSLQAGTETSAAVVEWAMSLLLNNPGAMARARGEIDACVGQPAARLLEAADLPKLHYLRCVVMETLRLYPPVPLLAHESSADCDVAGFHVRKGTMLLVNTFAIHRRXPSVWDEPESFFPDRFADGQNEAKMVIPFGMGRRGCPGENLAMQMVGLTLGTLIQCFDWERVGEELVDMGESSGITMPKKLPLEAFYQPRACMVHLLSS

SEQ ID NO: 38672 - protein, 586 aa, Hordeum vulgare
EFNHRFQELGLEKGWGDTAKRVHDTIHLLLDLLEAPDPASLEKFLGTIPMMFNVVILSPHGYFAQSNVLGYPDTGGQVVYILDQVRALENEMLLRIKQQGLDITPKILIVTRLLPDAVGTTCGQRLEKVIGTEHTDILRVPFRTENGILRKWYSRFDVWPYLETYTEDVAKQLMREMQTKPDLIIGNYSDGNLVATLLAHKLGVTQCTIAHALEKTKYPNSDIYLDKFDSQYHFSCQFTADLIAMNHTDFIITSTFQEIAGSKDSVGQYESHIAFTLPDLYRVVHGIDVFDPKFNIVSPGADMTVYFPYTETDKRLTAFHSEIEELLYSDVENDEHKFVLKDRNKPIIFSMARLDRVKNMTGLVEMYGKNAHLKDLANLVIVAGDHGKESKDREEQAEFKRMYSLIEEYKLKGHIRWISAQMNRVRNGELYRYICDTKGAFVQPAFYEAFGLTVIEAMTCGLPTIATCHGGPAEIIVDGVSGLHIDPYHSDKAADILVNFFEKSTADPSYWDKISQGGLKRIYEKYTWKLYSERLMTLTGVYGFWKYVSNLERRETRRYLEMFYALKYRSLAAAVPLAVDGESSGN

SEQ ID NO: 38673 - protein, 1228 aa, Candida albicans SC5314
MSILSENNPTQTSITDPNESSHLHNPELNSGTRVASGPGPGPEVESTPLAPPTEVMNTTSANTSSLSLGSPMHEKIKQFDQDEVDTGETNDRTIESGSSDIDDSQQSHNNNNNNNNNESNPESSEADDEKTQGMPPRMPGTFNVKGLHQGDDSDNEKQYTELTKSINKRTSKDSYSPGTLESPGTLNALETNNVSPAVIEEEQHTSSLEDLSLSLQHQNENARLSAPRSAPPQVSTSKTSSFHDMSSVISSSTSVHKIPSNPTSTRGSHLSSYKSTLDPGKPAQAAAPPPPEIDIDNLLTKSELDSETDTLSSATNSPNLLRNDTLQGIPTRDDENIDDSPRQLSQNTSATSRNTSGTSTSTVVKNSRSGTSKLTSTSTAHNQTAAITPIIPSHNKFHQQVINTNSTNSSSSLEPLGVGINSNSSPKNGKKRKSGSKVRGVFSSMFGKNKSTSSSSSSNSGSNSHSQEVNIKISTPFNAKHLAHVGIDDNGSYTGLPIEWERLLSASGITKKEQQQHPQAVMDIVAFYQDTSENPDDAAFKKFHFDNNKSSSSGWSNENTPPATPGGSNSGSGGGGGGAPSSPHRTPPSSIIEKNNVEQKVITPSQSMPTKTESKQSENQHPHEDNATQYTPRTPTSHVQEGQFIPSRPAPKPPSTPLSSMSVSHKTPSSQSLPRSDSQSDIRSSTPKSHQDISPSKIKIRSISSKSLKSMRSRKSGDKFTHIAPAPPPPSLPSIPKSKSHSASLSSQLRPATNGSTTAPIPASAAFGGENNALPRQRINEFKAHRAPPPPPSASPAPPVPPAPPANLLSEQTSEIPQQRTAPSQALADVTAPTNIYEIQQTKYQEAQQKLREKKARELEEIQRLREKNERQNRQQETGQNNADTASGGSNIAPPVPVPNKKPPSGSGGGRDAKQAALIAQKKREEKKRKNLQIIAKLKTICNPGDPNELYVDLVKIGQGASGGVFLAHDVRDKSNIVAIKQMNLEQQPKKELIINEILVMKGSSHPNIVNFIDSYLLKGDLWVIMEYMEGGSLTDIVTHSVMTEGQIGVVCRETLKGLKFLHSKGVIHRDIKSDNILLNMDGNIKITDFGFCAQINEINSKRITMVGTPYWMAPEIVSRKEYGPKVDVWSLGIMIIEMLEGEPPYLNETPLRALYLIATNGTPKLKDPESLSYDIRKFLAWCLQVDFNKRADADELLHDNFITECDDVSSLSPLVKIARLKKMSESD

SEQ ID NO: 38674 - protein, 255 aa, Mesorhizobium loti MAFF303099
MGERLAGKVAIISGGATGMGGAASELFAAEGAKVAIIDRNGEAAAATAAAIRARGRVAEHFVADVSDEAQVQAAVKGATEKLGPVTVLFNHAGTIVIKPFLETTVQEWDWLHAVNVRSMFLMTRAVLPGMIAAGGGSIVCTSSISAVAATPMEVLYDTTKGACHMFARAIAVEFRDRNIRCNAVCPGFIRTPHGLREVADLGKLGVDVSDAALAAQQGRIGEPEEVAKAALYLASDESSFVNGAHLFVDNGFTAM

SEQ ID NO: 38675 - protein, 409 aa, Zea mays
MQFALALDTNSGPHQIRSCEGDGIDRLEKLSIGGRKQEKALRNRCFGGRVAATTQCILTSDACPETLHSQTQSSRKNYADANRVSAIILGGGTGSQLFPLTSTRATPAVPVGGCYRLIDIPMSNCFNSGINKIFVMSQFNSTSLNRHIHRTYLEGGINFADGSVQVLAATQMPEEPAGWFQGTADSIRKFIWVLEDYYSHKSIDNIVILSGDQLYRMNYMELVQKHVEDDADITISCAPVDESRASKNGLVKIDHTGRVLQFFEKPKGADLNSMRVETNFLSYAIDDAQKYPYLASMGIYVFKKDALLDLLKSKYIQLHDFGSEILPRAVLDHSVQACIFTGYWEDVGTIKSFFDANLALTEQPSKFDFYDPKTPFFTAPRCLPPTQLDKCKMKDAFISDGCLLRECNI

SEQ ID NO: 38676 - protein, 401 aa, Pyrococcus horikoshii OT3
MTLMIRASKRALSIEYAIRDVVLPARELEKKGIKVIRLNIGDPVKFDFQPPEHMKEAYCRAIQEGHNYYGDSEGLIELREAIVKREKEKNGVDITPDDVRVTAAVTEALQLIFGALLDPGDEILIPGPSYPPYTGLVKFYGGKPVEYRTIEEEGWQPDIDDLRKKISERTKAIAVINPNNPTGALYDKKTIEEIINVAGEHDLVVLSDEIYDLMTYEGKHISPGSLTKDVPVIVMNGLSKVYFATGWRLGYMYFVDPEGKLSEVREAIDKLARIRICPNTPGQFAAIAGLTGSMDYLKEYMKKLKERRDFIYKRLNEIPGISTTKPQGAFYIFPRIEEGPWKSDKEFVLDVLHNAHVLFVHGSGFGEYGKGHFRIVFLPPIEILEEAMDRFEKFMRERLSS

SEQ ID NO: 38677 - protein, 280 aa, Hibiscus moscheutos subsp. moscheutos
GLPPAMAAKGHRVMTVSPRYDQYKDAWDTSVVVELKVGDKVETVRFCHCYKRGVDRVFVDHPMFLEKVWGKTASKIYGPRAGVDYKDNQLRFSLLCQAALLAPRVLNLNSSKYFSGPYGENVVFIANDWHTALLPCYLKSMYQSRGIYMSAKVVFCIHNISYQGRFAFADFSLLNLPDRFKSSFDFIDGYNKPVKGRKINWMKAGILESDRVMTVSPYYAQELVSGEDKGVELDNFIRKTGITGIVNGMDVQEWNPATDKYTCVKYDATTVMDAKPLLKE

SEQ ID NO: 38678 - protein, 537 aa, Argyroxiphium sandwicense subsp. macrocephalum
MKRSRERKKEAKTTSSVPDSGGMDELLEVLGYKVKSTDMADVAQKLEQLEMVMGEDGVLQLSDTVHYNPSDLSGWVQSMLSVLNDNNTPPSDHIVLSGDSSTTMIDFSNSSEIVVHGKQGSKMHEDDPYDLRAIAGGAIYGGESESSVRGNGNGIKRMKSTAVGSVDVQPESPRPVVLVDSQEAGIRLVHTLMACAEAIQHNDLKLADALVKHVGILVASQAGAMAKVATYFAGALAQRIYNIYPQNALETSCYEILQMHFYETCPYLKFAHFTANQAILEAFAGATRVHVIDFSLKQGMQWPALMQALALRSGGPPAFRLTGIGPPQPDNSDALQQVGWKLAQLADTIGVEFEFRGFVANSIADIDANMLDIRPSETEVVAVNSVFEVHRLLARPGAVEKVLSGITKMKPKIVTLVEQESNHNGAVFMERFNEALHYYSTMFDSLESSALTLPNSQDDLVMSEVYLGRQICNVVACEGADRVERHETLTQWRVRMNSAGFEPVHLGSNAFKQASMLLALFAGGDGYRVEENDGCLM

SEQ ID NO: 38679 - protein, 535 aa, Madia sativa
ERKKEAKTTSSVPDSGGMDELLEVLGYKVKSTDMADVAQKLEQLEMVMGEDGVLQLSDTVHYNPSDLSGWVQSMLLVLNEDNNNTLDDDVSDHILLPGNSSTTMIDFSSSRTETVNRKHGSKMLEDDPYDLRAIAGGAIYRPESEGIGNGMKRMKTTAAGSEVVDVQPESPRPVVLVDSQEAGIRLVHTLMACAEAIQHNDLKLADALVKHVGILVASQAGAMAKVATYFAGALAQRIYNIYPQNALETSCNENLQMHFYETCPYLKFAHFTANQAILEAFAGATRVHVIDFSLNQGMQWPALMQALALRSGGPPAFRLTGIGPPQPDNSDALQQVGWKLAQLADTIGVEFEFRGFVANSIADIDANMLDIRASETEVVAVNSVFEVHRLLARPGSVEKVLSSITGMKPKIVTLVEQESNHNGAVFMERFNEALHYYSTMFDSLESSALTLPNSQDDLVMSEVYLGRQICNVVACEGTDRVERHETLTQWRVRMNSAGFEPVHLGSNAFKQASMLLALFSGGDGYRVEENDGCLM

SEQ ID NO: 38680 - protein, 280 aa, Hibiscus moscheutos subsp. palustris
GLPPAMAAKGHRVMTVSPRYDQYKDAWDTSVVVELKVGDKVETVRFFHCYKRGVDRVFVDHPMFLEKVWGKTASKIYGPRAGVDYKDNQLRFSLLCQAALLAPRVLNLNSSKYFSGPYGENVVFIANDWHTALLPCYLKSMYQSRGIYMSAKVVFCIHNISYQGRFAFADFSLLNLPDRFKSSFDFIDGYNKPVKGRKINWMKAGILESDRVMTVSPYYAQELVSGEDKGVELDNFIRKTGITGIVNGMDVQEWNPATDKYTCVKYDATTVMDAKPLLKE

SEQ ID NO: 38681 - protein, 763 aa, ASPERGILLUS NIDULANS FGSC A4
MGKLRDLKKATEAYWGEKISRDELLSEGKRLRAEHWKIQKDAGVDIIPSNDFAFYDQVLDHIQLFGVVPERYSKYNLHPLDEYFAMGRGLQKPAKDGQPAIDVPSLEMVKWFDSNYHYVKPTLQDNQTFKLAANPKPVVEFLEAKEAGIVTRPVILGPVSFLTLAKADRGQTLDPISKIDELLPLYVELLTKLKEAGVEDVQIDEPVLVFDLPLKSKNAFKPAYEKLGSLGAQAPRLVLATYFGDIVHNIDVLPALHNIYGIHIDLVRNPEQLDSVIGALGPKQVLSAGVVDGRNIWKTNFKAAIEKVELAIQKLGKDRVIVSTSSSLLHVPHTLASEKNLDPEVQDWFSFAVEKTSEVVVIAKAVTEGPAAVREQLEANAKSVQARASSKRTNDPKVKERQAAVTPEQHNRKSPFPVRIAEQTKSIKLPLFPTTTIGSFPQTKEIRIQRNKFTKGEITAEEYEKFIEKEIAEVVKIQEELGLDVLVHGEPERNDMVQYFGERLTGYVFTTHAWVQSYGSRCVRPPIIVGDISRPAPMTVKESKYAVSISSKPMKGMLTGPITCLRWSFPRDDVHQSVQAQQLALALRDEVVDLEAAGVKVIQVDEPALREGLPLRAGKEREDYLQWAVAAFRLSTSGVSDGTQIHSHFCYSEFQDFFHAIAALDADVLSIENSKSDAKLLKVFIDEAYPRHIGPGVYDIHSPRVPSEQEIKDRVEEMLAYLRPEQLWINPDCGLKTRQWPETKAALSNLVQAAKYFREKYAK

SEQ ID NO: 38682 - protein, 227 aa, Neisseria meningitidis MC58
MELVFIRHGQSEWNAKNLFTGWRDVKLSEQGLAEAAAAGKKLKENGYEFDIAFTSVLTRAIKTCNIVLEESDQLFVPQIKTWRLNERHYGQLQGLDKKQTAEQYGDEQVRIWRRSYDTLPPLLDKDDEFSAHKDRRYAHLPADVVPDGENLKVTLERVLPFWEDQIAPAILSGKRVLVAAHGNSLRALAKHIEGISDEDIMGLEIPTGQPLVYKLDDNLKVIEKFYL

SEQ ID NO: 38683 - protein, 216 aa, Oryza sativa
MAGGEKVDYVFKVVLIGDSAVGKSQILARFARNEFSIDSKATIGVEFQTRTLLIDHKSVKAQIWDTAGQERYRAVTSAYYRGALGALLVYDITKRQSFDHIPRWLEELRGHADKNIVIMLVGNKSDLEDERAVSTEDAKEFAEKENLFFLETSALQATNVENAFQTVLSEIFKIHSKKNMAADPKANGAAPSLAGKKVVVPGPAQEIPKSKCCSSM

SEQ ID NO: 38684 - protein, 510 aa, Ustilago maydis 521
MTVVHSNPASRQQSTEPGTINGRYDAKRRKLASSDLAKESTVEANMSTDLSDESAELTGVEAVEPTANGEDALQEAKKGAANESKSAVCASADADTAEFGQTKVKAEEAVDLEEAMQPAPKSAASAVEEGVAQKKERPAVIEERTGLIQFRVVTNDDDHESMILLTGLKNIFQRQLPKMPREYISRLVFDRNHQSVAIVKRGLQVVGGITYRPFKQRKFAEIVFCAITSTEQVKGYGSHLMNHVKDHVKASSPVMHFLTYADNYAIGYFKKQGFTKEISLDRSIWVGYIKDYEGGTLMQCSMVPRVKYLEVSDMLAAQKEAILAKIRSISRSHVVHKGLQAMHDRDRLIKLKGLIENPDGTVAKPERAAKRDQNHGEEDPTATFLVNPSEVPGLKESGWTPEMDELSRRPKRGPHFAVMRHILVELNGHGSAWPFVNPVNGDEVTDYYDVIKNPMDLSTMEAKLENNQYANLIFDNCRSYNPASSPYAKSATKLEKFLKETLLPKVQSSL

SEQ ID NO: 38685 - protein, 334 aa, Oryza sativa
MADASSRTDTSIVVDNDDKNHQLENGHSGAVMASNSSDRSDRSDKLMDQKTIRRLAQNREAARKSRLRKKAYVQQLESSKLKLAQLEQELQKARQQGIFISSSGDQTHAMSGNGALTFDLEYTRWLEEQNKQINELRTAVNAHASDSDLRLIVDGIMAHYDEVFKVKGVAAKADVFHILSGMWKTPAERCFLWLGGFRPSELLKLLANHLEPLTEQQLLGLNNLQESSQQAEDALSQGMEALQQSLADTLAGSLGSSGSSGNVANYMGQMAMAMGKLGTLENFLCQADNLRQQTLHQMQRILTIRQASRALLAIHDYFSRLRALSSLWLARPRE

SEQ ID NO: 38686 - protein, 548 aa, Carlquistia muirii
MKRSREHKKEAKSTSSVPDSGGMDELLEVLGYKVKSTDMADVAQKLEQLEMVMGEDGVLQLSDTVHYNPSDLSGWVQSMLLVLNDDNNNNNTADDSDHIFLPGNSLTTMIDFSNSTETVVHGKQRSKLHEDDPYDLRAIAGGAIYRSESESSMRGNGNPNGNGMKRMKTTAAGSEVVDVQPESPRPVVLVDSQEAGIRLVHTLMACAEAIQHNDLKLADALVKHVGILVASQAGAMAKVATYFAGALAQRIYNIYPQNAIETSCYEILQMHFYETCPYLKFAHFTANQAILEAFAGATRVHVIDFSLNQGMQWPALMQALALRSGGPPAFRLTGIGPPQPDNSDVLQQVGWKLAQLADTIGVEFEFRGFVANSIADIDVSMLDIRAPDTEVVAVNSVFEVHRLLARPGAVEKVLSSITGMKPKIVTLVEQESNHNGAVFMERFNEALHYYSTMFDSLESSALTLPNNQDDLVMSEVYLGRQICNVVACEGTERVERHETLTQWRVRMNSAGFEPVHLGSNAFKQASMLLALFAGGDGYKVEENDGCLM

SEQ ID NO: 38687 - protein, 605 aa, Escherichia coli O157:H7 EDL933
  misc_feature (334)..(334): Xaa can be any naturally occurring amino acid
  unsure (1)..(605): unsure at all Xaa locations
MMLNAWHLPVPPFVKQSKDQLLITLWLTGEDPPQRIMLRTEHDNEEMSVPMHKQRSQPQPGVTAWRAAIDLSSGQPRRRYSFKLLWHDRQRWFTPQGFSRMPPARLEQFAVDVPDIGPQWAADQIFYQIFPDRFARSLPREAEQDHVYYHHAAGQEIILRDWDEPVTAQAGGSTFYGGDLDGISEKLPYLKKLGVTALYLNPVFKAPSVHKYDTEDYRHVDPQFGGDGALLRLRHNTQQLGMRLVLDGVFNHSGDSHAWFDRHNRGTGGACHNPESPWRDWYSFSDDGTALDWLGYASLPKLDYQSESLVNEIYRGEDSIVRHWLKAPWNMBGXRLDVVHMLGEAGGARNNLQHVAGITEAAKETQPEAYIVGEHFGDARQWLQADVEDAAMNYRGFTFPLWGFLANTDISYDPQQIDAQTCMAWMDNYRAGLSHQQQLRMFNQLDSHDTARFKTLLGREVARLPLAVVWLFTWPGVPCIYYGDEVGLDGKNDPFCRKPFPWQVEKQDMALFALYQRMIALRKKSQALRRGGCQVLYAEDNVVVFVRVLNQQRVLVAINRGEACEVVLPASPFLNVVQWQRKEGHGQLTDGILALPAISATVWMN

SEQ ID NO: 38688 - protein, 548 aa, Carlquistia muirii
MKRSRERKKEAKTTSSVPDSGGMDELLEVLGYKVKSTDMADVAQKLEQLEMVMGEDGVLQLSDTVHYNPSDLSGWVQSMLLVLNDDNNNNNTADDSDHIFLPGNSLTTMIDFSNSTETVVHGKQRSKLHEDDPYDLRAIAGGAIYRSESESSIRGNGNPNGNGMKRMKTTAAGSEVVDVQPESPRPVVLVDSQEAGIRLVHTLMACAEAIQHNDLKLADALVKHVGILVASQAGAMAKVATYFAGALAQRIYNIYPQNAIETSCYEILQMHFYETCPYLKFAHFTANQAILEAFAGATRVHVIDFSLNQGMQWPALMQALALRSGGPPAFRLTGIGPPQPDNSDVLQQVGWKLAQLADTIGVEFEFRGFVANSIADIDVSMLDIRAPDTEVVAVNSVFEVHRLLARPGAVEKVLSSITGMKPKIVTLVEQESNHNGAVFMERFNEALHYYSTMFDSLESSALTLPNNQDDLVMSEVYLGRQICNVVACEGTERVERHETLTQWRVRMNLAGFEPVHLGSNAFKQASMLLALFAGGDGYKVEENDGCLM

SEQ ID NO: 38689 - protein, 489 aa, Pasteurella multocida subsp. multocida str. Pm70
MYIGIDCGTQGTKVIVVDSQQRQVIGVGYAPHAIIENSEGRREQQPQWWTDALVSAYQQAIKLAQIEPHLIKGIGVSGQQHGLVLLDDNDQPLYNAKLWCDTETAAENAEFIRLLGGQEKAFSQLGIMPQTGYTASKILWFRKQYPEQYRRIAKIMLPHDYLNYWLTGHFCMEYGDASGTGYFDVVQRQWHLEAFKLLAPELDPHQVLPLLRSAQQKIGKVRAEIAALLGLSENVIVSTGGGDNMMGAIGTGNIQQGIVTMSLGTSGTLYAYTDKPLTDLPMEIANFCSSTDGWLPLVCVMNMTSANKNLMDLLQIDVAKFNELIQQSSIGAEGITILPFFNGERVPPLPQAKASILGLDAANFTQPNLCRAMMEAASFTLRYGLDLFRQAGLSTSQIRLIGGGAKSAVWRQMIADIMNTEVVCLKEDEAAALGGAIQAMWANGEGDLADLCHAFVHLDTTSLVQPNPKSAVEYERVYQRYLVLLQQHY

SEQ ID NO: 38690 - protein, 336 aa, Deinococcus radiodurans
MSAKMYYDRDVDTQVLENKLIAIIGYGSQAHAHAQNLRDSGFNVVVGLREGSSSKAKAEQAGLRVASIEDATKEADVVMLLIPDEQQPAVYEKSIAPHLTAGKALAFGHGFNVHFGRIKPPADVDVFLVAPKGPGHMLRRVYTDGAGMPGIFAVQQDASGKARDIALAYARGIGCTKAGVLETTFKEETETDLFGEQSVLCGGVTHLIQAGFETLVEAGYQPEIAYFETLHEVKLIVDLIYEKGFEGMRHSISNTAEFGDYVTGPRIITDQTKAEMKNVLGDIQSGKFAESFIKDAESGFPYMNEQRSKMRDHTVEKVGKELRDQMPFINKKELEV

SEQ ID NO: 38691 - protein, 384 aa, Nostoc punctiforme PCC 73102
MNDKLMLMIPGPTPVPEAALLALAKHPIGHRTSEFSNILAEVTENLKWLHQTQTDVLTLNVSGTGAVEAGIINFLSPGDRILVGSNGKFGERWVEVGQAYGLNVEEVKVEWGKPLDPAVFAEKLQADTQKQIKAVIITHSETSTGVLNDLESINRHVKAHGEALIIVDAVTSLGAFNLPVDAWGLDIVASGSQKGYMIPPGLGFVSVSPKAWEAYKTAKLPKYYLDLGKYRKATAKNTTPFTPPVNLIVALHTTLRIMKEEGLESIFARHERLKNATRAAIQGLNLPLFAADSSASPAITAVAPQGIESDKIRSLMKKRFDIALAGGQDHLSNKIFRIGHLGFVSDRDILSCIASLEVTLTELGYEDFTPGSGIAAAVKVFSQS

SEQ ID NO: 38692 - protein, 248 aa, Silene latifolia subsp. alba
MEFSSQITREEGSPSSQRKLGRGKIEIKRIENTTNRQVTFCKRRNGLLKKAYELSVLCDAEVALIVFSSRGRLYEYANHSVKGTIDRYKKASSDNSGASSAAEANAQYYQQEAAKLRNQIRTVTENNRHLMGEGLSSLNMKDLKSLENKLERGISRIRSKKNELLFAEIEFMQKREVELHNNNQYLRAKIAENERAQQSMSLMPGGSSEYELAPPPQSFDSRNYFQVNALQPNNTHYSRPDQTTLQLN

SEQ ID NO: 38693 - protein, 960 aa, Mesembryanthemum crystallinum
MASIDAQLRLLVPAKVSEDDKLVEYDALLLDRFLDILQDLHGEDIRETVQECYERSAEYEGKHDPKKLDELGSVLTSLDAGDSIVVAKSFSHMLNLANLAEEVQIAYRRRIKKLKKGDLSDENSATTESDIEETFKRLVAELGKSPEEIFDALKNQTVDLVFTAHPTQSVRRSLLQKHGRIRNCLAQLYAKDITPDDKQELDEALQREIQAAFRTDEIRRTPPTPQDEMRAGMSYFHETIWKGVPKFLRRVDTALKNIGINERVPYNAPLIQFSSWMGGDRDGNPRVTPEVTRDVCLLARMMAANLYFSQIEDLMFELSMWRCTDELRARADELHSSSRRDAKHYIEFWKHIPPNEPYRVILGDVRDKLYNTRERSRQMLSHGVSDIPEDATYTSLEQFLEPLELCYGSLCACGDRPIADGTLLDFLRQVFTFGLSLVRLDIRQESDRHTDVMDAITQHLEIGSYKEWSEEKRQEWLLSELSGKRPLFGSDLPQTEEIADVLDTLHVLAELPSDCFGAYIISMATSPSDVLAVELLQRECRVKQPLRVVPLFEKLADLEAAPAAVARLFSIDWYKNRINGKQEVMIGYSDSGKDAGRLSAAWALYKAQEELVQVAKEYGVKLTMFHGRGGTVGRGGGPTHLAILSQPPETVNGSLRVTVQGEVIEQSFGEEHLCFRTLQRFTAATLEHGMHPPISPKPEWRALLDEIAVVATEKYRSIVFKEPRFVEYFRLATPELEYGRMNIGSRPSKRKPSGGIESLRAIPWIFAWTQTRFHLPVWLGFGAAFGYAIQKDVKNLSVLQKMYNEWPFFRVTIDLVEMVFAKGDPGIAALYDKLLVSEELWPFGERLRADFEETKGLILKIAGHKDLLEGDPYLRQRLRLRDSYITTLNALQAYTLKRIRDPNYNVQLRPHISKEYMDSTSNKPAAELVKLNPSSEYAPGLEDTLILTMKGIAAGMQNTG

SEQ ID NO: 38694 - protein, 280 aa, Hibiscus laevis
GLPPAMAAKGHRVMTVSPRYDQYKDAWDTSVVVELKVGDKVETVRFFHCYKRGVDRVFVDHPMFLEKVWGKTASKIYGPRAGVDYKDNQLRFSLLCQAALLAPRVLNLNTSKYFSGPYGENVVFIANDWHTALLPCYLKSMYQSRGIYKSAKVVFCIHNISYQGRFAFADFSLLNLPDRFKSSFDFIDGYNKPVKGRKINWMKAGILESDRVMTVSPYYAQELVSGEDKGVELDNFISKTGITGIVNGMDVQEWNPATEKYTCVKYDATTVMDAKPLLKE

SEQ ID NO: 38695 - protein, 781 aa, Leptospira interrogans serovar lai str. 56601
MKNRIANRIVLILFLGINLPLFSESPALELSKTVDPIWLILCAALVFFMQAGFLMLETGLSRLKNTINVAVKNLMDYIVGTIAFFSVGFALMFGLSYEGWIGTNHFFLTGLKTGKDFSFFLFQVAFMGTAATIVSGAVAERIKFSAYLIVSVVVSLFIYPVFGHWTWGGGWIAKIGFVDFAGSTVVHSLGGWIALAGVIVLGPRKDKFKEDGTPRKIHGHNLTFSVLGVFILWFGWFGFNGGSALSFTDQVPLIILNTSLAGSVGGIFAITFSWIFYRVASVEDCMNGVLGGLVAITAGCHAFQPYASLIVGALAGISVVITSWVLEKILKLDDVVGAFPVHGVCGIIGTLLLPILSENQDIRIYPQFIGVLTCSFWAFGLGMILFLLLKISIGIRVNEEFEEKGLNVTEHGAGSSWIDLIHSLKDLAKGGGDLTRKIHVDSGTEAGAIAFLMNRYLANLGQMIYTIKEKSIELEYSSSEISVAWGKMSQGIQQQAANLGEVTSIFDSFRESFQTISSSAAQQKEMETSASELLNELVFGFQKFDSDLKNSSEKSEESVKAIDLSRKELNQLETDINDIGSSAKKVEGLVKLLNDISAKLGMLSINASIEAARSGAAGKGFGVVAEEISKLASSTQESTKKASEILGEIQSTVSRGKTTVQTSVEFFKNLTEEFRFLAETYITIRKSSLHYSNLIGNLNRLNTSITNQSEIIMTDIDKRFSEIGNLYESVDLINGAFHEISAQSEELNATGEFLKQLAEILNSLVRNFRVEQNSSQELIPG

SEQ ID NO: 38696 - protein, 318 aa, Ashbya gossypii ATCC 10895
MYSLIGSLLLGGLLAAYTIVYLLSHSPRQAYPEELTYRTVGKDGVVAQHALESVLDEKAGTAGIELSVVVPSYNETGRIESMLQEAVDHLRKVHAGKWEILIVDDGSRDGTQEFCLELAQKLQLEREQMRVVKFTKNRGKGGAVRHGMLHIRGKYGLFADADGASRFSDVEKLLRAIKEGERIQPGNVSIGSRSHMVKTDAVVKRSFIRNFMMYGLHTLVYIFGIRTIGDTQCGFKLFDRKAVQAIFPHLHTEGWIFDVEILILAARKGMKISEIPISWHEVGGSKMVLVKDSINMAIDLVVIRLAYIFGIYGDKATH

SEQ ID NO: 38697 - protein, 153 aa, Microsporum canis
MQIFVKTLTGKTITLEVESSDTIDNVKTKIQDKEGIPPDQQRLIFAGKQLEDGRTLSDYNIQKESTLHLVLRLRGGMQIFVKTLTGKTITLEVESSDTIDNVKTKIQDKEGIPPDQQRLIFAGKQLEDGRTLSDYNIQKESTLHLVLRLRGGN

SEQ ID NO: 38698 - protein, 1555 aa, Wolinella succinogenes
MKKLFALVTLLLLGLTLHASTQKLSLRLQWKHQFEFAGFYTAIEKGYYQEAGLEVELKEYENGVNIIQEVLEGKSHFGIWGSGIIKEQMEGKPILLLANYFKRSPLAIVTSPEIKSPGDLKGKRLMLSEVNIDSANFTHMLQGFGLSMKDIQILSTSFNIHDFIDGKVDAYSIFLTNELFDLQRLGVRYNILDPSNYGVELYDENLFGAKEFVLKNPTLVKRFIDASNRGWQYALDHPEEIVDLILERYNTQNKTKEQLLFEARETAKMVLSRSYPIGSIDPHKVRKIGEIFAEARLAPPAKDYASFLFGQIRTSLDLTEAERAYILMRPTLRVQNESDFAPMNYHSDGGQPAGFSIDYIKLLASKVGLKVEYVSGPTWSEFLQMMRDGRLDAMVNIAKSPEREEYLLFTSPYSEIISAVFTKDSRAQEFSSLNDLKGKKLAVVKGFFEEALLKKHYPEIEMVFAEDTLSALKMVAFGKADAAINSLQVGNFLIKKSGLSGMAPAFEVQDPQFRVNLHVATSSSNSTLRNLLEKAKEQVSDSELLLLTSKWFLQGNAPDKEKRITLSEKERAYLKARSTPFTLCVDPLWMPFEKLDSKGNYEGIAADLLKIVFERTGVEAKVLQTKDWVETLNAVKSGQCDILSFSNQTPAREEWLLFSDPLFQDPNVFITHADHPFITNPKSLEGKTIVLPKGTSIEEWVRRDYPWLKLILVETEEEVFKALLERKADLSIRSLTVAAYTIKKEGLFSLKIAGQLPEKDNHFRMGIKPKEPILRDILNQGIHTLTPEEIDRIANKFVSVNIQKGFDYSLLWKILIGMAGIFVGFFYWNRKLTEYNKALQAAKEKAEAATQEKSNFLANMSHEIRTPMNAIIGMTYLAQQTDLTPLQRDYLQKIEGSANALLGLINDILDFSKIEAGKLEIECIDFDLHSVIEHVSTLVELKATEKNLEFVVSYDQGMNMNLHGDPLRLGQILTNLANNAIKFTHEGEVGIYITKQELHRYRFEVRDTGIGLSPGQKEKLFRSFSQADTSTTRQYGGTGLGLAISKQLVEMMNGRIWVESEEGKGSSFIFEIELNEQENAPKESKAFSHKHVLIVDDTPSWQKILARLLKGFHIEVSVASSGEEALRLIKEQPGFYDLILMDWKMPQMDGIETTKLIKESCETPPPTIIMVSSYRQENIVNAAKEQGINVFLQKPINPSLLYNVLLEILGEGIKQSGVQKADSHSLKNELTTRAGSQILLVEDNAMNREIIMGMLQPFGIRIDIAQNGQEAVTLYQENPKRYELILMDIQMPVMDGYEATKILRAQGANLPIIALTANAMKSDIERTKAAGMDEHLNKPIVVEKLFGTLLAHLTPKCAPQENPSLAPQELQSSTLPTLVHTDTLKGIAHLAGDEALYRKLLRDFIEHYENLEIEPASQEGARILHTLKGLSANLGMDELSRLAKECEENPSLTSLASLTQALSQALQELKESGILSDSTPLIPQIAAPEGRVEEIWSELGSLLPKRRPPLCKPLLEELEGYALNERDRALFERLKPLVERYKFSEALKILEERLS

SEQ ID NO: 38699 - protein, 280 aa, Hibiscus dasycalyx
GLPPAMAAKGHRVMTVSPRYDQYKDAWDASVVVELKVGDKVETVRFFHCYKRGVDRVFVDHPMFLEKVWGKTASKIYGPRAGVDYKDNQLRFSLLCQAALLAPRVLNLNSSKYFSGPYGENVVFIANDWHTALLPCYLKSMYQPRGIYMSAKVVFCIHNISYQGRFAFADFSLLNLPDRFKSSFDFIDGYNEPVKGRKINWMKAGILESDRVMTVSPYYAQELVSGEDKGVELDNFIRKTGITGIVNGMDVQEWNPATDKYTCVKYDATTVMDAKPLLKE

SEQ ID NO: 38700 - protein, 310 aa, Orobanche ramosa
MVITLNNGFKMPIIGLGVWRTEGKDLKNLIINAIKIGYRHFDCAADYKNEAEVGEALEEALQTGLVKREDLFITTKLWNSDHGHVVEACTDSLKKLRLEYLDLYLVHFPVATKHTGVGTTDSALGDDGILDIDTTISLETTWHAMEDLVSLGLARSIGISNYDIFLTRDCLAYSKIKPAVNQIETHPYFQRESLVKFCQKHGICVTAHTPLGGALANTEWFGTVSCLDDPVIKGLTEKYKKKTVAQIALRWGIQRNTVVIPKTSKQDRLIENFQVFDFELSNEDMELLKTMERKYRTNQPAKFWGIDLFA

SEQ ID NO: 38701 - protein, 224 aa, Zea mays
MVRGKTELKRIENATSRQVTFSKRRNGLLKKAFELSVLCDAEVGLVVFSPRGKLYEFASAASLQKTIDRYRTYTRENVNNKTVQQDIQQVKADAVSLASRLEALEKTKRMFLGENLEECSIEELHNLEVKLAKSLHVIRGKKTQLLEQQISKLKEKERTLLQDNKELRDKQRNLQSPPEAPPDLNRCVPPWPRSLPAPSNDMDVETELYIGLPGRERSSNRDSD

SEQ ID NO: 38702 - protein, 542 aa, Oryza sativa
  misc_feature (90)..(90): Xaa can be any naturally occurring amino acid
  unsure (1)..(542): unsure at all Xaa locations
MYRAAASLASKARQAGSSARQIGSRLALHRNYAAKDIKFGVEARALMLRGVEELADAVKVTMGPKGRTVVIEQSFGAPKVTKDGVTVAKXSIEFSNRVKNVGASLVKQVANATNDTAGDGTTCATVLTKAIFAEGCKSVAAGMNAMDLRRGISMAVDEVVTNLKGMARMISTSEEIAQVGTISANGEREIGELIAKAMEKVGKEGVITITDGNTLYNELEVVEGMKLDRGYISPYFITNQKNQKCELDDPLILIHDKKVSNLHAVVKVLELALKKQRPLLIVAEDVESEALGTLIINKLRAGIKVCAVKAPGFGESRKANLQDLAILTGGEVITEELGMNLENFEPQMLGTCKKVTVSKDDTVILDGAGDKKAIEERAEQLRSAIELSTSDYDKEKLQERLAKLSGGVAVLKIGGASEAEVGEKKDRVTDALNATKAAVEEGIVPGGGVALLYASKDLDKLQTANFDQKIGVQIIQNALKTPVHTIASNAGVEGSVIIGKLLEQDNTDLGYDAAKGEYVDMVKSGIIDPLKVIRTALVVLLF

SEQ ID NO: 38703 - protein, 540 aa, Calycadenia multiglandulosa
ERKKEAKASTSSSSSMAPAAKAKDLQNPPDSGGMDELLEVLGYKVKSTDMDDVAQKLEQLEMVMGEDGILQLSDTVHYNPSDLSGWVQSMLSELNNSGGDSDIGIGIPAGGESSTTMIDFSNNKEKQPEDPYDLRAIAGGAIYGEGSESSGNGIKRMKMKSTAEGSGAVDVPPESPPRPVVLVDSQEAGIRLVHTLMACAEAVQNNDMKLAEALVKHVGILVASQAGAMAKVATYFAGALAQRIYKIYPQDGGLETSCWEILQMHFYESCPYLKFAHFTANQAILEAFAGAARVHVIDFSLNQGMQWPALMQALALRPGGPPAFRLTGIGPPQPDNTDALQQVGWKLAQLADTIGVEFEFRGFVAASIADIDAAMLDIRLDEVVAVNSVFELHRLLARPGAVEKVLSSITSMKPKIVTLVEQESNHNGVVFMDRFNEALHYYSTMFDSLESSALTQPNSQQDLVMSEVYLGRQICNVVACEGPDRVERHETLTQWRTRMISAGFEPVHLGSNAFKQASMLLALFAGGDGYRVEENDGCLM

SEQ ID NO: 38704 - protein, 65 aa, Bifidobacterium animalis
ASGLIIPDNAKEKPQQGEVLAVGPGRRDDKGERVPMDVKVGDKVLYSKYGGTEVHFKGEEYLIIS

SEQ ID NO: 38705 - protein, 342 aa, Arabidopsis thaliana
MFRSVSLWCCFDYLLRLLIWYMYADWFLLVLLFHFKMQIFVKTLTGKTITLEVESSDTIDNVKAKIQDKEGIPPDQQRLIFAGKQLEDGRTLADYNIQKESTLHLVLRLRGGMQIFVKTLTGKTITLEVESSDTIDNVKAKIQDKEGIPPDQQRLIFAGKQLEDGRTLADYNIQKESTLHLVLRLRGGMQIFVKTLTGKTITLEVESSDTIDNVKAKIQDKEGIPPDQQRLIFAGKQLEDGRTLADYNIQKESTLHLVLRLRGGMQIFVKTLTGKTITLEVESSDTIDNVKAKIQDKEGIPPDQQRLIFAGKQLEDGRTLADYNIQKESTLHLVLRLRGGSF

SEQ ID NO: 38706 - protein, 280 aa, Hibiscus dasycalyx
GLPPAMAAKGHRVMTVSPRYDQYKDAWDTSVVVELKVGDKVETVRFFHCYKRGVDRVFVDHPMFLEKVWGKTASKIYGPRAGVDYKDNQLRFSLLCQAALLAPRVLNLNTSKYFSGPYGENVVFIANDWHTALLPCYLKSMYQSRGIYKSAKVVFCIHNISYQGRFAFADFSLLNLPDRFKSSFDFIDGYHKPVKGRKINWMKAGILESDRVMTVSPYYAQELVSGEDKGVELDNFISKTGITGIVNGMDVQEWNPATDKYTCVKYDATTVMDAKPLLKE

SEQ ID NO: 38707 - protein, 380 aa, Anisocarpus madioides
MKRSRERKKEASSVPDSGGMDELLEVLGYKVKSTDMADVAQKLEQLEMVMGEDGILQLSDTVHYNPSDLSGWVQSMLLVLNDNNTTTTADDSGHILLPGDSSTTMIDFSSETVVHGKPGSKIHQDDDLRAIAGGAIYRSESESSMPGNANPNGNGVKRMKTTAAGSEVVDVQPESPRPVVLVDSQEAGIRLVHTLMACAEAIQHNDLKLADALVKHVGILVASQAGAMAKVATYFAGALAQRIYNIYPQNALETSCYEILQMHFYETCPYLKFAHFTANQAILEAFAGAKRVHVIDFSLNQGMQWPALMQALALRSGGPPAFRLTGIGPPQPDNSDALQQVGWKLAQLADTIGVEFEFRGFVANSIADIDANMLDIRLPE

SEQ ID NO: 38708 - protein, 247 aa, Nocardioides sp. JS614
MTHTLILLRHGESEWNAKNLFTGWVDVNLTEKGRAEAVRGGELMREAGVLPDVVHTSVQRRAINTACLALDAADRHWIPVRRSWRLNERHYGALQGKNKKETLEAYGEEQFMLWRRSFDVPPPPIEEDSEFSQFGLPQYAGLGDDMPHTECLKDVIARFLPYWESDIVPDLRAGHTVLIAAHGNSLRALVKHLDGISDEDIAGLNIPTGMPLVYELDDDFRPTVPHGRYLDPEAAAAAAAAVANQGR

SEQ ID NO: 38709 - protein, 143 aa, Anisocarpus madioides
RPGAVEKVLSAITKMKPKIVTLVEQESNHNGALFMERFNEALHYYSTMFDSLESSALTLPNSPDDLVMSEVYLGRQICNVVACEGTDRVERHETLTQWRVRMNSAGFEPVHLGSNAFKQASMLLALFADGDGYRVEENDGCLM

SEQ ID NO: 38710 - protein, 154 aa, Zea mays
MSLVRRSSVFDPFSMDLFDPFDSMFRSIVPSSSSAAAASETAAFASARIDWKETPEAHVFKADLPGVKKEEVKVEVEDGNVLLISGQRSREKEDKGDKWHRVERSSGQFVRRFRLPENAKTEEVRAALENGVLTVTVPKAEVKKPEVKSIQISG

SEQ ID NO: 38711 - protein, 542 aa, Argyroxiphium sandwicense subsp. macrocephalum
MKRSRERKKEAKTTSSVPDSGGMDELLEVLGYKVKSTDMADVAQKLEQLEMVMGEDGILQLSDTVHYNPSDLSGWVQSMLLVLNDNNNNTAHDSGHILLPGDSSTTMIDFSSEIVVHGKPGSKIHLDDDLRAIAGGAIYRSESESSMPGNGNPNENGVKRMKTTAAGSEVVDVQPESPRPVVLVDSQEAGIRLVHTLLACAEAIQHKDLKLADALVKHVGILVASQAGAMAKVATYFAGALAQRIYNIYPQNALETSCYEILQMHFYETCPYLKFAHFTANQAILEAFADATRVHVIDFSLNQGMQWPALMQALALRSGGPPAFRLTGIGPPQPDNSDALQQVGWKLAQLADTIGVEFEFRGFVANSIADINANILDIRAPETEVVAVNSVFEVHRLLARPGAVEKVLSSITGMKPKIVTLVEQESNHNGNVFMERFNEALHYYSTMFDSLESSALTLPNSQDDLVMSEVYLGRQICNVVACEGTDRVERHETLTQWRVRMNSAGFEPVHLGSNAFKQASMLLALFADGDGYRVEENDGCLM

SEQ ID NO: 38712 - protein, 541 aa, Argyroxiphium sandwicense subsp. macrocephalum
MKRSRERKKEAKTTSSVPDSGGMDELLEVLGYKVKSTDMADVAQKLEQLEMVMGEDGILQLSDTVHYNPSDLSGWVQSMLLVLNDNNNTAHDSGHILLPGDSSTTMIDFSSEIVVHGKPGSKIHLDDDLRAIAGGAIYRSESESSMPGNGNPNENGVKRMKTTAAGSEVVDVQPESPRPVVLVDSQEAGIRLVHTLLACAEAIQHKDLKLADALVKHVGILVASQAGAMAKVATYFAGALAQRIYNIYPQNALETSCYEILQMHFYETCPYLKFAHFTANQAILEAFADATRVHVIDFSLNQGMQWPALMQALALRSGGPPAFRLTGIGPPQPDNSDALQQVGWKLAQLADTIGVEFEFRGFVANSIADIDANILDIRAPETEVVAVNSVFEVHRLLARPGAAEKVLSSITGMKPKIVTLVEQESNHNGNVFMERFNEALHYYSTMFDSLESSALTLPNSQDDLVMSEVYLGRQICNVVACEGTDRVERHETLTQWRVRMNSAGFEPVHLGSNAFKQASMLLALFADGDGYRVEENDGCLM

SEQ ID NO: 38713 - protein, 644 aa, Pasteurella multocida subsp. multocida str. Pm70
MEQVTLTSDGTSSVFAENTVREVCNINYWGMRYYNVDEKGDIFVCPDPDKPQNRVSLAALAEKVQREQGAHLPTLFCFPQIIQHRLRSINQAFKRAREDFGYEGNYFLVYPIKVNQHRRIVESLISSGQPLGLEAGSKAELMAVLAHAGITQTVIVCNGYKDREYVRFALMGEKLGHKVYLVIEKLSEIQLVLEEAAKLNVKPRLGVRARLASQGSGKWQSSGGEKSKFGLSASQVLSLVQMLKEHECLDCLQLLHFHLGSQLGNIRDVATGVRESARFYVELHKLGVNIQCFDVGGGLGVDYEGNRTQSDCSVNYGLNEYADTVVWGIGQACREHGLPHPTIITESGRGVTAHHAVLVSNVIGVERYKFETLAAPAKDAPSVLHSMWETWVDIQSSREKRSLRSWIHESQFDLSDVHNQYNVGLLNLEQRAWAEQLYLNICHEVGQLFNEKHRSHRTIIDELQERFADKLYVNFSLFQSLPDAWGIDQLFPVCPISNLNQPVSRRAVLLDITCDSDGTIDHYIDGDGITTTMPMPHYEEDNPPLLGFFMVGAYQEILGNMHNLFGDTSTVDVLVHEQDKAYIVDYDEGNTVADMLEYVYLDPKKLLDRYREQIEHSNLPASEAIQFLNELEVGLNGYTYLEDE

SEQ ID NO: 38714 - protein, 368 aa, Malus x domestica
MGKGGQSCNGVVRDAKPVEQENMAAWLVDVNTIKILPFKLPAIGPNDVRIRIKAVGICGSDIHYLKTMKCGDFQVKDPMVIGHECAGIVDKVGSEVKHLVPGDRVAVEPGISCARCQQCKGGRYNLCPDMKFFATPPVHGSLANQIVHPADLCFKLPENVSLEEGAMCEPLSVGVHACRRANVDPETTVLIIGAGPIGLVSVLAARAFGAPRIVIVDMDDKRLAMAKSLGADEAVKVSTKMEDLDDEVAEIKEAMISEVDVTFDCVGFNKTVSTGLNATRPGGKVCLVGMGHGVMTVPLTPAAAREVDVVGVFRYQKTWPLCLEFLRSGKIDVKPLITHRFGFTEKEVEEAFATSARGGNAIKVMFKL

SEQ ID NO: 38715 - protein, 72 aa, Oryza sativa
MSCSCGSSCGCGSNCTCGKMYPDLEEKSSSAQATVVLGVAPEKAHFEAAAESGETAHGCGCGSSCKCNPCNC

SEQ ID NO: 38716 - protein, 578 aa, Triticum aestivum
PVRNFRVDPRVRNSLAQQIGDLFGNLSSLSELAAPPNKLTGDLPTSIGSLSNISSLYMQNNQLTGSVNVLSGLGLTTLNIANNNFSGWIPKEFSSIPDVILNGNSFLNGPAPPPPPFMPPPPRRPRSRPNRSGGSGNAPKGSESSTSQGGKNGLQTASLVGIIVGSILAALCVLLLLVLCIRKSRKRKDDSSTESKDFVGPLSVNIEEVSNREIPEQGLENTAMKVLPAEKMTPERVYGKTGSMRKTKVPITATPYTVASLQVATNSFCQDSLLGEGSLGRVYKADFPNGKVMAVKKVDSAAISLQEEDDFLEVVSSMSRLRHPNIVPLTGYCVEHAQRLLVYEYIGNATLHDMLHFSDEMSRRLTWNIRVRIALGTARALEYLHEVCLPSVVHRNFKSANILLDEEHNAHLSDCGLAALTPNTERQVSTEVVGSFGYSAPEFSMSGIYTVKSDVYSFGVVMLELLTGRKPLDSSRERSEQSLVRWATPQLHDIDALSKMVDPALNGMYPAKSLSRFADIIALCVQPEPEFRPPMSEVVQQLVRLMQRASIVRRQSGEELGFSYRAPEREGETRDISF

SEQ ID NO: 38717 - protein, 283 aa, Streptococcus equi
MEHKWKLLLLVFGALVFLGGVLMVFQRGYATSYHNNQVKLPAKGTSQLKKTANAKLPEKKKEIYLAGGCFWGVEEYFSNVDGVLDAVSGYANGRGDTTSYQLLHQTGHAETVQVVYDANRISLKELLLHYFRIIDPTSLNKQGNDRGSQYRTGIYYTDPSDLTTIDMVFQEKASDYKKKIVVEKAPLKSFTKAEEYHQDYLKKNPNGYCHINVNEASYPVIDKTKYPKPSKEEIKKKLSKDEYRVTQNNETEKAFSNRYWDSFEAGIYVDVVTGEPLFSSKDK

SEQ ID NO: 38718 - protein, 337 aa, Glycine max
MGVPERDPLAQLSLPPGFRFYPTDEELLVQYLCRKVAGHHFSLPIIAEVDLYKFDPWVLPGKAVFGEKEWYFFSPRDRKYPNGSRPNRVAGSGYWKATGTDKIITTEGRKVGIKKALVFYIGKAPKGSKTNWIMHEYRLLDSSRKHNLGTAKLDDWVLCRIYKKNSSSQKVEANFLAMECSNGSSPSSSSHVDDMLGSLPEINDRCFTLPRVNSLRTMHQQDEKFGSPNMGSGFFSDWVNSTDLDSISEFESGCQTQRMVNYDCNDFFVPSLPPLGHVDYMVDAPLEEEVQSGVRTRRVDGPGHFQPNPDTRLLPGSGDPFGFGFIMGQQVGFGVRE

SEQ ID NO: 38719 - protein, 306 aa, Schizosaccharomyces pombe
KTTLHHFKMGNVQSQEGETRAHAVPSQDATTTPDNANNVPKEPRAQSMISIAADDLNQEGEMSDDNQQEGGNNRTSQNGTSGSSGHTKRRSQTSGKKTHQPYSGPCVPTIIRWRGGGEVVYVTGSFSRWKKKIQLLKSEDYTVLLQLRPGTQRFKFLVDGIWCCSSDFPTATDAEGNLYNYLEVEANEKLGASIDERLSQVHTDLPMEEKSESEQYSTEIPAFLTSNTLQELKLPKPPSLPPHLEKCILNSNTAYKEDQSVLPNPNHVLLNHLAAANTQLGVLALSATTRYHRKYVTTAMFKNFDV

SEQ ID NO: 38720 - protein, 461 aa, Vibrio parahaemolyticus RIMD 2210633
MTNNTDIKNQTNPMSGDLLRQIIRLGFPVAIQSALVAILALADVLMVSDFGKEATAAVGIASKWHFVAIMIMAGLASANGTLVAQYWGRNDAVSAKTVTGIAIRFGLKVLIPVTLIITLGSELIMRLQTSDTRVIELGATYLWYAFPVLLLTHIVIVLEASMRSSGDTVTPLLMGAMTIVLNIGLNFWLIKGGFGIPAMGVAGAAFATTISRLFQVLAMIAYMRWRKHWLLEVKEGSERPSLWLSYRRLALPMTLGALLWAIGTMVYQMIFGHMGTTELAVFSMLGPFESLCYSIFFGISVACSVMIGQSLGRDAFEQAEHMAKFFIKAVFVFGISIGALLLLNRELIIAALNLDNPELYPLAAPAVMILCCAIWLRMLNMIIINGIIRAGGDNVFCLRMDFIAMWMTGLPLCAIAAFVLGWEFKYVYALMIAEEVVKLALCYRRYTQKYWIKNLTVVTTS

SEQ ID NO: 38721 - protein, 609 aa, Glycine max
MQIFVKTLTGKTITLEVESSDTIDNVKAKIQDKEGIPPDQQRLIFAGKQLEDGRTLADYNIQKESTLHLVLRLRGGMQIFVKTLTGKTITLEVESSDTIDNVKAKIQDKEGIPPDQQRLIFAGKQLEDGRTLADYNIQKESTLHLVLRLRGGMQIFVKTLTGKTITLEVESSDTIDNVKAKIQDKEGIPPDQQRLIFAGKQLEDGRTLADYNIQKESTLHLVLRLRGGMQIFVKTLTGKTITLEVESSDTIDNVKAKIQDKEGIPPDQQRLIFAGKQLEDGRTLADYNIQKESTLHLVLRLRGGMQIFVKTLTGKTITLEVESSDTIDNVKAKIQDKEGIPPDQQRLIFAGKQLEDGRTLADYNIQKESTLHLVLRLRGGMQIFVKTLTGKTITLEVESSDTIDNVKAKIQDKEGIPPDQQRLIFAGKQLEDGRTLADYNIQKESTLHLVLRLRGGMQIFVKTLTGKTITLEVESSDTIDNVKAKIQDKEGIPPDQQRLIFAGKQLEDGRTLADYNIQKESTLHLVLRLRGGMQIFVKTLTGKTITLEVESSDTIDNVKAKIQDKEGIPPDQQRLIFAGKQLEDGRTLADYNIQKESTLHLVLRLRGGF

SEQ ID NO: 38722 - protein, 222 aa, Nostoc punctiforme PCC 73102
MKYNSIDELFRNNQAWVAEKLAIDPTYFQELSKGQTPPFLYIGCSDSRLPLTNLTRTEPGELFVHRNIANQVSLTDINFLAVLEYAILHLKVEHIIVCGHYDCGGIKAALEGRTIGILDNWVNPIRELYLHKQEEIDALPTREERLNRLAEINVVAQVKNLYQTSIMRQALYERKAPMVHGWVLDIRTGLIKDLNVSTVQWQLHICPLLLEFRLYAMLKNES

SEQ ID NO: 38723 - protein, 433 aa, Bacillus anthracis str. A2012
MKEVDIMKTFLSALQWALFILAGSLIVPISVATSYGLDGAEAIAFVQRTLFVLGFAGLLQAIFGHKLPIQEGPAGLWWGIFSLYASLGVVLFGSSNETLKVLQYAFLLSGIICIILSVFGLIDKLVRYFTPTVIGTYLFLLVAQLSGAFLKGMFGLDGQHTEVQADVFILSLIVILLSFFIMKLPIIGQYSVLFSIVCGWILFACFGLSNPITPVTDIIRLPSLFVFGMPRIEWNMAITVVFVTLLLLTNMLASIRVVQKVVSKYEENATPDRFKQAGIITGINQLLGGLFSAIGPVAISGSAGFIATTNIYKRLPFMLGSSFIIVVSIFPKITSFFAAIPVAVGYAAIYPVFASMIGLAFREYDTVQNKERLFKVAGLSIFTGVGVMFVPAGAFSTLPPFLASFLSNGLVLGSVMAILLEILFSRSTEKQLS

SEQ ID NO: 38724 - protein, 318 aa, Listeria monocytogenes str. 1/2a F6854
MTASVFVAGKLLPETMEALSKWDVKAFSGEENITEAELIKNVTEVDAIICPLSSPISAKVLESAKNLKIVANIGAGFDNIDVKKAQELGIAVTNTPDVSTEATAELTLGLILDVARRISEGDRLCRETPEQFKGWAPTFFLGTELSGKTLGIIGLGRIGQAVAKRAAAFGMKIIYSGHHPKEVAKEWDAEFVSQAELLKRSDVVTIHAAYSPSLKHLLNETTLKTMKSSAFLINAARGPVVEEAALIKALEAGVIAGAALDVFEFEPKIGEGFAKLDNVVLTPHIGNATVETRVAMGKIAIANVEAVLAGKAPLHSVY

SEQ ID NO: 38725 - protein, 976 aa, Pisum sativum
MEHLKKSPSSSSSSSMRPSFPRDPRGSLEVFNPTSNSSSPVRSPSNLKNWTEIEEPRNELSEQHNEFSDEVTNTSWMAIKEGETGAAVQRAAEWGLMLTTDAETGKPQGVAVRNSGGDEPSVKLETKRNSNNTVRTSGESSDGDDPRGFPRVSEDLKDALSAFQQTFVVSDATKPDYPILYASAGFFKMTGYTSKEVIGRNCRFLQGADTDPDDVARIREALEGGKSFCGRLLNYKKDGTPFWNLLTISPIKDDDGNVLKLIGMLVEVNKHTEGSKEKKLRPNGLPESLIRYDARQKEKATSSVSELLEAMKRPRALSESGQRPFIRKSGGGGGSEEDEEAVENKSRRKSDSVASFRPKPQGKIRHSMERISELPENKQKNSRRGSFMGFMRKSDSIDESIDNEVIVDVSSGSEDDERDDSFEFDDKEKLREKRKGLDLATTLERIEKNFVITDPRLPDNPIIFASDSFLELTEYSREEILGKNCRFLQGPETDPATVRKIREAIDNQTEVTVQLINYTKSGKKFWNLFHLQPMRDHKGEVQYFIGVQLDGSQHVEPLHNCIAEDTAKEGELLVKETAENVGEAVKELPDANQKPDDLWMNHSKVVRPKPHRKDDDAWRAIQKVLENGEQVGLKHFRPIKPLGSGDTGSVHLVELEGTGQYFAMKAMDKGVMLNRNKVHRACTEREILDMLDHPFLPALYASFQTKTHVCLITDYYPGGELFLLLDQQPTKVLKEDSVRFYAAEVVIALEYLHCLGIIYRDLKPENVLIQSNGHVSLTDFDLSCLTSCKPQLILPAIEEKKKRKKKKNKGQQKNQQVPMFMAEPMRASNSFVGTEEYIAPEIITGSGHTSAVDWWALGILLYEMLYGYTPFRGKTRQKTFANILHKDLKFPKSKPVSPHGKQLIYWLLHRDPKNRLGSLEGANEIKNHPFFKNINWALVRCTKPPELDGPILLDNDEKKEAKEIDPGLDDLQKNIF

SEQ ID NO: 38726 - protein, 63 aa, Protea angolensis var. angolensis
MPGRWEYQVGPSVGIEAGDHIWCSRYLLERITEQAGVVLTLDPKPIEGDWNGAGCHTNYSTKS

SEQ ID NO: 38727 - protein, 398 aa, Rhodotorula mucilaginosa
CGGIDKRTIEKFEKEAAELGKGSFKYAWVLDKLKAERERGITIDIALWKFETPKYMITVIDAPGHRDFIKNMITGTSQADCAILIIASGTGEFEAGISKDGQTREHALLAFTLGVRQLIVAINKMDTCKYSQERYEEIIKETSNFIKKVGFNPKALPFVPISGWHGDNMIEATTNMPWYKGWKKETKSGEVTGKTLLDAIDAIEPPTRPTDKPLRLPLQDVYKIGGIGTVPVGRVETGTIKAGMVVVFAPANVTTEVKSVEMHHEQLEAGLPGDNVGFNVKNVSVKDIRRGNVCGDTKNDPPKEAASFKAQVIVMNHPGQIGNGYAPVLDCHTAHIACKFDTLLEKIDRRSGKSVEDLPKFIKSGDAAIVKMIPSKPMCVEPFSDYPPLGRFAVRDMR

SEQ ID NO: 38728 - protein, 556 aa, Nocardioides sp. JS614
MSSSSHPPLSRYAALARLLVRHRRSDLLSGLGLDGFPRDDDAPEGDEALAERFAADLEELGPTFIKLGQLLSTRFDLLPPAYTTALARLQDDAEPADFDSLREVVEAELGGRIGDLYGSFDPEPLAAASLGQVHRATLRNGREVVVKVQRPGVREQAREDMETLARLAGLADRHTDTGRRFGFEQLLAEFRRSLSGELDYRREARNLRRFRELTSDYDLLVVPAPVEELSTSRVLTMDRVDGRKVTDVGPLGLLDLDTRPMVEQLFGCYLDAMLRHGFLHADPHPGNMLVTDDDRLALLDLGMVTTVPPRLRDQVTKLLLALGDGDGDEAAAVLAALGHPLQDFDAAAFRADVGQLVSEATSAGSDVQAGSALVQLSQVSGRHGLRPPAEMSMVGKALLNLDQVTLHLDPTFDPAAAVRDSLVSLLRSGLSFSAAGMMSAALEAKEFTANLPRRGNRILEALSEGELSIRVHAVDEERLHTVLHRVANRLTFGIVIAATVIGAAMMMRVPTEHEVLGYPAVAMAFFVFAVLSGGGLIAWVLLTDRRVARERRQDPG

SEQ ID NO: 38729 - protein, 177 aa, Neisseria meningitidis MC58
MGIYDFQMKDAEGNAVDLSGYRGKVLLIVNTATRCGLTPQYEALQKLYAQYTAEGLEILDFPCNQFREQAPESSGEIAQVCMMKFGTKFKIFDKIEVNGANTAPLYAYLKSVKPQDKGNHLFKDFVLKLAALGEKRDEGDIKWNFTKFLVNRDGEVVERFAPSVTPEEIEADIRALL

SEQ ID NO: 38730 - protein, 542 aa, Argyroxiphium kauense
MKRSRERKKEAKTTSSVPDSGGMDELLEVLGYKVKSTDMADVAQKLEQLEMVMGEDGILQLSDTVHYNPSDLSGWVQSMLLVLNDNNNNTAHDSGHILLPGDSSTTMIDFSSEIVVHGKPGSKIHLDDDLRAIAGGAIYRSESESSMPGNGNPNENGVKRMKTTAAGSEVVDVQPESPRPVVLVDSQEAGIRLVHTLLACAEAIQHNDLKLADALVKHVGILVALQAGAMAKVATYFAGALAQRIYNIYPQNALETSCYEILQMHFYETCPYLKFAHFTANQAILEAFADATRVHVIDFSLNQGMQWPALMQALALRSGGPPAFRLTGIGPPQPDNSDALQQVGWKLAQLADTIGVEFEFRGFVANSIADIDANILDIRAPETEVVAVNSVFEVHRLLARPGAVEKVLSSITGMKPKIVTLVEQESNHNGNVFMERFNEALHYYSTMFDSLEGSALTLPNSQDDLVMSEVYLGRQICNVVACEGTDRVERHETLTQWRVRMNSAGFEPVHLGSNAFKQASMLLALFADGDGYRVEENDGCLM

SEQ ID NO: 38731 - protein, 544 aa, Argyroxiphium kauense
MKRSRERKKEAKTTSSVPDSGGMDELLEVLGYKVKSTDMADVAQKLEQLEMVMGEDGILQLSDTVHYNPSDLSGWVQSMLLVLNDNNNNNNTAHDSGHILLPGDSSTTMIDFSSEIVVHGKPGSKIHLDDDLRAIAGGAIYRSESESSMPGNGNPNENGVKRMKTTAAGSEVVDVQPESPRPVVLVDSQEAGIRLVHTLLACAEAIQHNDLKLADALVKHVGILVALQAGAMAKVATYFAGALAQRIYNIYPQNALETSCYEILQMHFYETCPYLKFAHFTANQAILEAFADATRVHVIDFSLNQGMQWPALMQALALRSGGPPAFRLTGIGPPQPDNSDALQQVGWKLAQLADTIGVEFEFRGFVANSIADIDANILDIRAPETEVVAVNSVFEVHRLLARPGAVEKVLSSITGMKPKIVTLVEQESNHNGNVFMERFNEALHYYSTMFDSLEGSALTLPNSQDDLVMSEVYLGRQICNVVACEGTDRVERHETLTQWRVRMNSAGFEPVHLGSNAFKQASMLLALFADGDGYRVEENDGCLM

SEQ ID NO: 38732 - protein, 534 aa, Dubautia arborea
ERKKEAKTTSSVPDSGGMDELLEVLGYKVKSTDMADVAQKLEQLEMVMGEDGILQLSDTVHYNPSDLSGWVQSMLLVLNDNNTNNTAHDSGHILLPGDSSTTMIDFSSEIVVHGKPGSKIHLDDDLRAIAGGAIYRSESESSMPGNGNGVKRMKTTVAGSEVVDVQPESPRPVVLVDSLEAGIRLVHTLMACAEAIQHNDLKLADALVKHVGILVASQAGAMAKVATYFAGALAQRIYNIYPQNALETSCYEILQMHFYETCPYLKFAHFTANQAILEAFAGATRVHVIDFSLNQGIQWPALMQALALRSGGPAAFRLSGIGPPQPDNSDALQQVGWKLAQLADTIGVEFEFRGFVANSIADIDANILDIRAPETEVVAVNSVFEVHRLLARPGAVEKVLSSITGMKPKIVTLVEQESNHNGNVFMERFNEALHYYSTMFDSLESSALTLPNSQDDLVMSEVYLGRQICNVVACEGTDRVERHETLTQWRVRMNSAGFEPVHLGSNAFKQASMLLALFADGDGYRVEENDGCLM

SEQ ID NO: 38733 - protein, 537 aa, Dubautia knudsenii
ERKKEAKTTSSVPDSGGMDELLEVLGYKVKSTDMADVAQKLEQLEMVMGEDGILQLSDTVHYNPSDLSGWVQTMLLVLNDDNNNTADDSGHILLPGDSSTTMIDFSSEIVVHGKPGSKIHLDDDLRAIAGGAIYRSESESLMPGNGNPNGNGVKRMKTTVAGSEVVDVQPESPRPVVLVDSQEAGIRLVHTLMACAEAIQRNELKLADALVKHVGILVASQAGAMAKVATYFAGALAQRIYNIYPQNALETSCYEILQMHFYETCPYLKFAHFTANQAILEAFAGATRVHVIDFSLNQGMQWPAFMQALALRYGGPPAFRLTGIGPPQPDNSDALQQVGWKLAQLANTIGVEFEFRGFVANSIADIDANILDIRAPETEVLAVNSVFEVHRLLARPGAVEKVLSSITGMKPKIVTLVEQESNHNGNVFMERFNEALHYYSTMFDSLESSALTLPNSQDDLVMSEVYLGRQICNVVACEGTDRVERHETLTQWRVRMNSAGFEPVHLGSNAFKQASMLLALFADGDGYRVEENDGCLM

SEQ ID NO: 38734 - protein, 265 aa, Aspergillus oryzae
MEQSTQSASQQQGRQQPVYDTRNGGHYGASAALSAQGYAPVAELYTGTWANVNQGLQGTARDILTTYWQHIINHLESDNHDYKIHQLPLARIKKVMKADPEVKMISAEAPILFAKGCDIFITELTMRAWIHAEDNKRRTLQRSDIAAALSKSDMFDFLIDIVPREEATSHAKRSSQAAGAPSGAPGPTGAAGQLPPSQHGVQHPSHHMAPPDYSLGQHGLQDQEYRQPAMYAGPVQSDPTAAYGQPQSQMFEGMYAAYPHLPPQQ

SEQ ID NO: 38735 - protein, 526 aa, Triticum aestivum
  misc_feature (295)..(295): Xaa can be any naturally occurring amino acid
  unsure (1)..(526): unsure at all Xaa locations
MDLPPLSHQALFAAVRSADADAVRRLLAGAEASGSTAPLAAAQTDAGESALYVAAEAGALEVVRLLLPLYDLEAAKLRSRLDLDAFHVAAKQGHTEVVKEFLGRWPELCSVCDSSNTCPLYSAAVKDHLDVVNAILDTDDSCIKIVRKNGKTSLHNAARIGYHGIVKALIERDPGIVAVKDRKGQTALHMAVKGKNIDVVEELLMADVSILNVRDKKANTALHIATRKWRPQMVQLLLAYDSLEVNAINSQNETAMDLAEKVPYAESKMEIIEWLSEAGAKNAVNVGKVDEASEXLRRTVSDIKHNVQAQLSENMKTNKRVTGIAKELRKLHREAVQNTINSVTLVATLIASIAFVSIFNLPGQYYQDTKHGGEIGEAYISKLTGFRVFCLLNAIALFISLAVVVVQITLVAWETGAQKQIIKIVNKLMWTACLSTCAAFVSLAYVVVGPQHAWMAFTISAVGGPIMIGTLLFLAYLLLRPRFTFGEDRQRRIRRGSGSKSFSWSVREGLSDLEAVEDHEKKIYAL

SEQ ID NO: 38736 - protein, 344 aa, Nostoc punctiforme PCC 73102
MVQERTLPTFNPATTQITKEEGLWLYEDMVLGRLFEDKCAEMYYRGKMFGFVHLYNGQEAVCTGVVQSMRPGEDYVCSTYRDHVHALSAGVPAREVMAELFGKATGCSKGRGGSMHMFSAEHRLLGGYAFVAEGIPVAAGAAFQSKYRREVLGDKNADQVTACFFGDGAANNGQFFETLNMAALWKLPILFVVENNKWAIGMSHERATSQPEIYKKASAFNMVGVEVDGMDVLAVRAVAQEAVARARAGEGPTLIEALTYRFRGHSLADPDEMRSKAEKEFWFARDPIKKLAAYLLEQNLANEGEIKAIDRKIQDVIDEAVKFAESSPEPDPSELYRFVFAEDE

SEQ ID NO: 38737 - protein, 236 aa, Arabidopsis thaliana
  misc_feature (49)..(49): Xaa can be any naturally occurring amino acid
  misc_feature (97)..(97): Xaa can be any naturally occurring amino acid
  unsure (1)..(236): unsure at all Xaa locations
YLCADLVSLAHVLQKKYALLRDLDKSLQENQRQNEQRCEKEIEDIRRGXRAGNITPNTSLTKFSEEALDEQKHSVRIADEKVTLAMQAYDLMIYCFXVDMHVQQLDQYMKKSGEVIRKEKEAAAATLELENNGKAGNAGEGGRGGRKKTRLATAASTAAASTGMTSSNMDLDLPVDPNEPTYCICNQVSFGEMVACDNNACKIEWFHFGCVGLKEQPKGKWYCPECATVKKSRKGR

SEQ ID NO: 38738 - protein, 207 aa, Zea mays
MVSLHVTKRLAASVLKCGKGKVWLDPNELSEISMANSRHNIRKLVKDGFIIKKPQKIHSRSRARRAHEAKQKGRHSGYGKRRGTREARLPTKVLWMRRMRVLRRLLRKYREAKKIDKHMYHDMYMKVKGNSFKNKRVLMESIHKSKAEKAREKTLSDQFEARRAKSKASRERKNARREERLAQGPREIPPPVSATAPTTGAPKKAKK

SEQ ID NO: 38739 - protein, 549 aa, Arabidopsis thaliana
  misc_feature (503)..(503): Xaa can be any naturally occurring amino acid
  unsure (1)..(549): unsure at all Xaa locations
MQSVEDFLKESRKKSRECIQSRKETLKKRIMGAVSMESLPLGFRFRPTDEELVNHYLRLKINGRHSDVRVIPDIDVCKWEPWDLPALSVIKTDDPEWFFFCPRDRKYPNGHRSNRATDSGYWKATGKDRSIKSKKTLIGMKKTLVFYRGRAPKGERTNWIMHEYRPTLKDLDGTSPGQSPYVLCRLFHKPDDRVNGVKSDEAAFTASNKYSPDDTSSDLVQETPSSDAAVEKPSDYSGGCGYAHSNSTADGTMIEAPEENLWLSCDLEDQKAPLPCMDSIYAGDFSYDEIGFQFQDGTSEPDVSLTELLEEVFNNPDDFSCEESISRENPAVSPNGIFSSAKMLQSAAPEDAFFNDFMAFTDTDAEMAQLQYGSEGGASGWPSDTNSYYSDLVQQEQMINHNTENNLTEGRGIKIRARQPQNRQSTGLINQGIAPRRIRLQLQSNSEVKEREEVNEGHTVIPEAKEAAAKYSEKSGSLVKPQIKLRVRGTIGQVKGERFADDXGTGAEQKETRREAMEGGCNGNGGCDGWGRDGYMEDTGKLAPTRRLI

SEQ ID NO: 38740 - protein, 483 aa, Oryza sativa
MGNSCQNGTYGNNYQNSNRFQNDRFASRYVDGNDTEDCYSGSSRASLAGALRQGLNLKSPVLGYKTPNVRELYTLGRELGQGQFGKTYLCTEISTGCQYACKTILKSNLRCVSDIEDVRREIQIMHHLSGQKNIVTIKDTYEDEQAVHIVMELCAGGELFSKIQKRGHYSERKAAELIKIIVGIIETCHSHGVMHRDLKPENFLLLDADDEFSVKAIDFGLSVFFRPGQVFREVVGSPYYIAPEVLEKRYGPEADIWTAGVILYVLLTGVPPFWAEHPWICDNGVATNRALDPSVLPRLKQFSAMNRLKKLSLQIIAERLSEEEIVGLREMFKAMDTKNRSVVTFGELKGLKRYSSVFKDTEINDLMEAADDTTSTINWEEFIAAAVSLNKIEREKHLMAAFTYFDKDGSGFITVDKLQKACMERNMEDTFLEEMILEVDQNNDGQIDYAEFVTMMQSNNFGLGWQTVESSLNVALREAPQVY

SEQ ID NO: 38741 - protein, 164 aa, Cyanophora paradoxa
TAEVQQAERAFQKQDAIFIGSKRLLAKKGGPSGKVPRYYRNIGLGFKTPREAIEGSYIDKKCPFTGNVSIRGRILQGVVQSTKMKRTLVVRRDYMHFIPKYNRYEKRHKNFPAHCSPAFIVNPGDTVIVGQCRPLSKTVRFNVLKVIPKAGSTGGQAKKAFQGF

SEQ ID NO: 38742 - protein, 155 aa, Brassica napus
  misc_feature (19)..(19): Xaa can be any naturally occurring amino acid
  misc_feature (26)..(26): Xaa can be any naturally occurring amino acid
  misc_feature (38)..(38): Xaa can be any naturally occurring amino acid
  unsure (1)..(155): unsure at all Xaa locations
SNSSSFSSDEEGEDGEKRXKEKKKDXLKKMRNQRKIEXGLMEQIREKFPHGTKTEDDTPVIATLPVKEETVEHPEEKKRLMEKIKEKLPGHSEKPEDSQVVHTAAAVPVTEKTAEHPEEKKGLMGKIKEKLPGYHAKSPEEEEKKKEKESDDLEG

SEQ ID NO: 38743 - protein, 454 aa, Lupinus angustifolius
SSLLSIPSLSLQYNDKLKVGGNSLRFSKEQSNTFSNAKSSCRISMVAAVNVSRFEGIPMAPPDPILGVSEAFRADTSDAKLNLGVGAYRTEELQPYVLKVVNKAENLMLERGQNKEYLAIEGLAAFNKATAELLLGADNPAIKQQRVATVQGLSGTGSLRLGAALIERYFPGAKVLISAPTWGNHKNIFNDARVPWSEYRYYDPKTVGLDFEGMIEDIKAAPEGTFVLLHGCAHNPTGIDPTPEQWEKIADVIQEKNHIPFFDVAYQGFASGSLDEDAASVRLFVARGLEVLVAQSYSKNLGLYAERIGAINVISSSPESAARVKSQLKRIARPMYSNPPVHGARIVADIVGNPALFDEWKVEMEMMAGRIKNVRQQLYDSISSKDKSGKDWSFILKQIGMFSYTGLNKNQSDNMTNKWHVYMTKDGRISLAGLSLAKCEYLADAIIDSFHYVS

SEQ ID NO: 38744 - protein, 352 aa, Alternaria brassicicola
MPPAGSGSSRKISFNVSEQYDIQDVVGEGAYGVVCSALHKPSGQKVAIKKITPFDHSMFCLRTLREMKLLRYFNHENIISILDIQKPRNYETFTEVYLIQELMETDMHRVIRTQELSDDHCQYFIYQTLRALKAMHSANVLHRDLKPSNLLLNANCDLKVCDFGLARSAASTEDNSGFMTEYVATRWYRAPEIMLTFKEYTKAIDVWSVGCILAEMLSGKPLFPGKDYHHQLTLILDVLGTPTMEDYYGIKSRRAREYIRSLPFKKKIPWKAMFPKTNDLALDLLERLLAFNPVKRITVEEALKHPYLEPYHDPDDEPTADPIPEEFFDFDKNKDNLTKEQLKLLIYQEIMR

SEQ ID NO: 38745 - protein, 480 aa, Oryza sativa
IPFFGHLHLIDKPFHAALSRLAERHGPVFSLRLGSRNAVVVSSPECARECFTDNDVCFANRPRFPSQMLATFNGTSLGSANYGPHWRNLRRIATVHLLSSHRVRGMSGIISGQARHMVRRMYRAATASAAGVARVQLNRRLFELSLSVLMEAIAQSKTTRREAPDADTDMSMEAQELRHVLDELNPLIGAANLWDYLPALRWFDVFGVKRKIVAAVNRRNAFMRRLIDAERQRMDNNDVDGGDDGEKKSMISVLLTLQKTQPEVYTDTLIMTLCAPLFGAGTETTSTTIEWAMSLLLNHPEILKKAQAEIDMSVGNSRLISVVDVHRLGYLQCIINETLRMYPAAPLLLPHESSADCKVGGYHIPSGAMLLVNVAAIQRDPVIWKEPSEFKPERFENGRFEGLFMIPFGMGRRRCPGEMLALQTIGLVLGTMIQCFDWGRVDDAMVDMTQSNGLTSLKVIPLEAMCKPREAMCDVLRKFM

SEQ ID NO: 38746 - protein, 105 aa, Picea sitchensis
NLLIDRKTNALKLADFGLARAFGIPVRTFTHEVVTLWYRAPEILLGSRHYSTPVDVWSVGCIFAEMVNQRPLFPGDSEIDELFKIFRVLGTPNEETWPGVTSLPD

SEQ ID NO: 38747 - protein, 63 aa, Protea mundii
  misc_feature (30)..(31): Xaa can be any naturally occurring amino acid
  unsure (1)..(63): unsure at all Xaa locations
MPGQWEYQVGPSVGIEAGDHIWCSRYLLEXXTEQAGVVLTLDPKPIEGDWNGAGCHTNYSTKS

SEQ ID NO: 38748 - protein, 284 aa, Synechococcus sp.
MSYPLHLFWHRRDLRLADNLGLYAARQHTPTVVGVFCFDPALLQGQDVAAVRVAYLLGCLQALKEAYQQRGGCLLMVQGDPRQVIPEVATTLKATAVHWHEDVEPYARERDRVVAATLNDLGIAVHRQWDQLLHPPSAVQTQQGQPYTVYTPFWRNWSALPKAAPVPPPPDFAPLEATEIASIPLPSTHDLGFDWSGELILAPGEAAAAQQLAHFSQHAIYEYGEQRNYPGRPGTALLSPALKFGVIGIRTVWAASEAALEHARSDEARASIRTWQQELAWREF

SEQ ID NO: 38749 - protein, 347 aa, Zea mays
  misc_feature (69)..(69): Xaa can be any naturally occurring amino acid
  misc_feature (83)..(83): Xaa can be any naturally occurring amino acid
  unsure (1)..(347): unsure at all Xaa locations
MAFAPKTSSSSSLSSALQAAQSPPLLLRRMSSTATPRRRYDAAVVVTTTTTARAAAAAVTVPAAPPQAXRRRRCHQSKRRHPXERRSRPVSDTMAALMAKGKTAFIPYITAGDPDLATTAEALRLLDGCGADVIELGVPCSDPYIDGPIIQASVARALASGTTMDAVLEMLREVTPELSCPVVLLSYYKPIMSRSLAEMKEAGVHGLIVPDLPYVAAHSLWSEAKNNNLELVLLTTPAIPEDRMKEITKASEGFVYLVSVNGVTGPRANVNPRVESLIQEVKKVTNKPVAVGFGISKPEHVKQIAQWGADGVIIGSAMVRQLGEAASPKQGLRRLEEYARGMKNALP

SEQ ID NO: 38750 - protein, 739 aa, Ustilago maydis 521
MSTERQASGLGPSMTASSPRAHHSQAVPRDMQRPVKSEASASQPPPASPDRKRPRYEPALASRGTAEEELDELEESEDTTKRPRGESDEPKFERKGSGPESISRSSSAAAHHAHWAGRSASANLDSRYHQQQQQQQQQQQQQQQQQQQQQQQQQQQQQQQQQQQQQQQQQQQQQHQQHRGRQGIDSGGAQEPRRYEFERPHPSRYDPGPGVREDGRHIGGLVGERYGGEADRESRGRFAMEGKMEYNSSTTRMPPPGAGDHPNLPPGFRNRPSSPPPRLPGFASLEHEGLGHRAREDGVMGGAYASSPRRSIPFHGPSYGNYALPPSRTPLMHHHPSPTPSTSYGNPPMIHPALAGLPGAGGGPGGKQQPSFVSKLYSMLEDPSIADLISWGSSGTVFSVANPAEFSRLVLPNWFKHSNWQSFVRQLNMYGFHKVNHSYQGNPTDEVQVWEFRHPSFRRGEIALLHDIKRKSSRQKRGGSPRGSIGGADMRADRSGGSSTPSPEVPLATIPGHDGMRIMGGMGPGGHRGGREFAYGDDRMDGHAYVDRREMRGYAGERDYSASGPRGIPADEYGYMRGGKMEGQLGITTGGPGAGAGMGPPFAPGSDENARRAVEPIMERAEAMGRFEDLSERTDAIIRHASFLESQIRLLTDQLIDARAFTESAVRDEMILMLDRLERALSSPTPPGVDPTAKMVEVLRGQLSYYSHRSAGPNDRVNKPPAPTGSAVGTGTDPKRPSV

SEQ ID NO: 38751 - protein, 539 aa, Dubautia raillardioides
ERKKEAKTTSSVPDSGGMDELLEVLGYKVKSTDMADVAQKLEQLEMVMGEDGILQLSDTVHYNPSDLSGWVQTMLLVLNDDNNTTADDSGHILLPGDSSTTMIDFSNSSETVVHGKPGSKIHLDDDLRAIAGGAIYRSESESSMPGNGNPNGNGVKRMKTTVAGSEVVDVQPESPRPVVLVDSQEAGIRLVHTLMACAEAIQHNDLKLADALVKHVGILVASQAGAMAKVATYFAGALAQRIYNIYPQNALETSCYEILQMHFYETCPYLKFAHFTANQAILEAFAGATRVHVIDFSLNQGMQWPALMQALALRSGGPPAFRLTGIGPPQPDNSDALQQVGWKLAQLANTIGVEFEFRGFVANSIADIDANILDIRAPETEVVAVNSVFEVHRLLARPGAVEKVLSSITGMKPKIVTLVEQESNHNGNVFMERFNEALHYYSTMFDSLESSALTLPNSQDDLVMSEVYLGRQICNVVACEGTDRVERHETLTQWRVRMNSAGFEPVHLGSNAFKQASMLLALFADGDGYRVEENDGCLM

SEQ ID NO: 38752 - protein, 537 aa, Dubautia microcephala
ERKKEAKTTSSVPDSGGMDELLEVLGYKVKSTDMADVAQKLEQLEMVMGEDGILQLSDTVHYNPSDLSGWVQTMLLVLNDDNNNAADDSSHILLPGDSSTTMIDFSSEIVVHGKPGSKIHLDDDLRAIAGGAIYRSESESLMPGNGNPNGNGVKRMKTTVAGSEVVDVQPESPRPVVLVDSHEAGIRLVHTLMACAEAIQRNDLKLADALVKHVGILVASQAGAMAKVATYFAGALAQRIYNIYPQNALETSCYEILQMHFYETCPYLKFAHFTANQAILEAFAGATRVHVIDFSLNQGMQWPAFMQALALRSGGPPAFRLTGIGPPQPDNSDALQQVGWKLAQLANMIGVEFEFRGFVANSIADIDANILDIRAPETEVVAVNSVFEVHRLLARPGAVEKVLSSITGMKPKIVTLVEQESNHNGNVFMERFNEALHYYSTMFDSLESSALTLPNSQDDLVMSEVYLGRQICNVVACEGTDRVERHETLTQWRVRMNSAGFEPVHLGSNAFKQASMLLALFADGDGYRVEENDGCLM

SEQ ID NO: 38753 - protein, 513 aa, Saccharomyces cerevisiae
MTAGSAPPVDYTSLKKNFQPFLSRRVENRSLKSFWDASDISDDVIELAGGMPNERFFPIESMDLKISKVPFNDNPKWHNSFTTAHLDLGSPSELPIARSFQYAETKGLPPLLHFVKDFVSRINRPAFSDETESNWDVILSGGSNDSMFKVFETICDESTTVMIEEFTFTPAMSNVEATGAKVIPIKMNLTFDRESQGIDVEYLTQLLDNWSTGPYKDLNKPRVLYTIATGQNPTGMSVPQWKREKIYQLAQRHDFLIVEDDPYGYLYFPSYNPQEPLENPYHSSDLTTERYLNDFLMKSFLTLDTDARVIRLETFSKIFAPGLRLSFIVANKFLLQKILDLADITTRAPSGTSQAIVYSTIKAMAESNLSSSLSMKEAMFEGWIRWIMQIASKYNHRKNLTLKALYETESYQAGQFTVMEPSAGMFIIIKINWGNFDRPDDLPQQMDILDKFLLKNGVKVVLGYKMAVCPNYSKQNSDFLRLTIAYARDDDQLIEASKRIGSGIKEFFDNYKS

SEQ ID NO: 38754 - protein, 131 aa, Glycine max
ATLVLAYLMLRKKFTLLEAWNALKRVHRRSQPNDGFAKILLDLDQKLHGKVSMEWQQRKPMMKNCPICGKNTGLSSSSLKLHLQKSHKKLSSGSVDSAMTIEIQKALTTLKISHGGSVSPKPRKSHSTIEA

SEQ ID NO: 38755 - protein, 943 aa, Oryza sativa (japonica cultivar-group)
MEQREARQEEEEEEERDAPAVPPGKSRSLAGHVPNSRELFIENDEERDRNLSSRVVSLLFGGDISAQTFEKWVSLVRKRSGAFRPSGFPRRNSRIEVMPSGSFSLFSAADLSEQVVTAELIGKEDIPLTSSQPTEISLWERLGNASALDIESPDFSWNMLSSLHHTEHSSSSDHSEDEMCKPLEVTVNSGGVVFFALFNSSSNVLPKEAAAVIKFSSSKMSTQAERLGYEFARLLGVQTPQARVVHNSSLEWQDIRKAAENARSVAVSNSDEVGEMTCSELLEALELSRCLLLMSYIHGSPLLESSKAFSPREAACVTASSLGRVLMLDLILRNEDRLPCRQLGWRGNPANLMISDRPSAPSVDRLDDSKCTTESSIPTITQLVQSDKRTHTANATINSPELVSMSPKPDALKSVRGNADSLDGPVHIVAIDTGVPRRPPAGRRVKDHERYPKVVQLMLNNSDYSSNILYEISGGKLGTPGPDEAIAFTDSCCSISDEDNTAAIHEFRGAFRAALRDLEGFHLFLLQLYQKLDGVLRVFLSIVTKGSEESDNNDATVPDFPSPGANYSTPCAPSKQQNSELHGDSEILKSTTKPSSAGSRGSSDSVSPLSRESWSNKYFKGSAEGPRSLRMTMKLRDFYKTPKVDPELVKEIEQWNEALKSDVIKFCEENNFHSGFFDGNENNMVADAYELKVRLEHIIERIALVSDAANTERPSLVINNLFIGGALAARSMYTLQHLGITHILCLCSNEIGQSDSQFPDLFEYKNFSISDDDDANISDLFEEASDYFDHVDHVGGKVLVHCFEGKSRSATIVLAYLMLRKGLTLAKAWNLLKKVHRRAQPNDGFAKALLALDRKLHGKVSMDWQHKRPEMKVCPICSKNVGLSTSSLKLHLQKAHKRLSAGSVDSAMTLEIQKSIQSLRISRGGSLSPSQKLTKAFADELSF

SEQ ID NO: 38756 - protein, 270 aa, Nostoc punctiforme PCC 73102
MKSYLAAAIQLTSVPDLHKNLAQAEELIELAVRRGAELVGLPENFSYMGEEKDKLAQGDAIALESEKFLKKMAQRFQITILGGSFPLPVDNTGKVYNTTLLIDPSGQELSRYYKVHLFDVDVPDGNTYRESSTVVAGTQLPPVHFSEKLGNLGLSICYDVRFPELYRHLAEKGADVIFIPAAFTAFTGKDHWQVLLQARAIENTAYVIAPAQTGNNYGRRLTHGHAVIIDPWGVILADAGEKPGIAIAEIKPTRLEQVRRQMPSLQHRVF

SEQ ID NO: 38757 - protein, 321 aa, Arabidopsis thaliana
MSKRKTKEPKVDVVTLGPSVREGEQVFGVVHIFASFNDTFIHVTDLSGRETLVRITGGMKVKADRDESSPYAAMLAAQDVAQRCKELGITAMHVKLRATGGNKTKTPGPGAQSALRALARSGMKIGRIEDVTPIPTDSTRRKGVVMPFSPGNLVIPNSSKMFNAAKNSTQIMCFIFYTANAVSRLPAKKTNAKMQIFVKTLTGKTITLEVESSDTIDNVKAKIQDKEGIPPDQQRLIFAGKQLEDGRTLADYNIQKESTLHLVLRLRGGIIEPSLMMLARKYNQDKMICRKCYARLHPRAVNCRKKKCGHSNQLRPKKKIK

SEQ ID NO: 38758 - protein, 162 aa, Zea mays
  misc_feature (72)..(72): Xaa can be any naturally occurring amino acid
  misc_feature (75)..(75): Xaa can be any naturally occurring amino acid
  unsure (1)..(162): unsure at all Xaa locations
MAVLVARQGRELQRYSQSTGGRIVVGCIPYRVRCDGELEVLAITSQKGHGMMFPKGGWEVDESMDEAARRKXLKXAGVLGDTEPVSGLWHYKSRRYVDQTYEGFMFPLRVADELHQWPEMASRKRTWATVQQVMDGCPHWWMREALERLVARHAVPVLQSAL

SEQ ID NO: 38759 - protein, 215 aa, Pseudomonas syringae pv. phaseolicola 1448A
MTLRSKILVNKNVLPTAEQALPGRETPMALPETHFVNGNPLLGPFSSNVEFAIFGLGCFWGAERRLWQQEGVVSTVVGYAGGFTPNPTYEEVCSGLTAHTEVVLVVYEPEKISYKSLLKVFWEAHNPTQGMRQGNDIGTQYRSVIYCTTPKQLDAAKASAAEFQAELRKAGLGAITTEIEEAPTVYFAEAYHQQYLAKNPQGYCGLGGTGVCLPA

SEQ ID NO: 38760 - protein, 278 aa, Triticum aestivum
RLKRKTESVKEKYSLGRRLGQGQFGTTYLCVERSSGKEYACKSILKRKLVTDDDVEDVRREIQIMYHLAGHPNVISIRGAYEDAVAVHLVMELCAGGELFDRIVQKGHYTERKAAELARVIVGVVEVCHSMGVMHRDLKPENFLFVDQTEEAALKTIDFGLSVFFRPGQIFTDVVGSPYYVAPEVLKKKYGPEADVWSAGVIIYILLCGVPPFWAENEQGIFEEVLHGKLDFESDPWPSISEGAKDLVRRMLLRDPKKRLTAHEVLRHPWVQVGGLAP

SEQ ID NO: 38761 - protein, 549 aa, Pyrococcus horikoshii OT3
MAQLAGQPILILPEGTQRYVGRDAQRMNILAARIIAETVRTTLGPKGMDKMLVDSLGDIVITNDGATILDEMDIQHPAAKMMVEVAKTQDKEAGDGTTTAVVIAGELLKKAEELLDQNIHPSIIIKGYTLASQKAQEILDSIAKEVKPDDEEVLLKAAMTAITGKAAEEEREYLAKLAVEAVKLVAEEKDGKLKVDIDNIKLEKKEGGAVRDTRLIRGVVIDKEVVHPGMPKRIENAKIALINDALEVKETETDAEIRITSPEQLQAFLEQEEKMLKEMVDKIKEVGANVVFVQKGIDDLAQHYLAKYGILAVRRVKKSDMEKLAKATGAKIVTNIRDLTPEDLGEAELVEERKVAGENMIFVEGCKNPKAVTILIRGGTEHVVDEVERALEDAIKVVKDILEDGKIIAGGGASEIELSIKLDEYAKEVGGKEQLAIEAFAEALKVIPRTLAENAGLDPIETLVKVIAAHKEKGQTIGIDVYEGEPADMMERGVIEPVRVKKQAIKSASEAAIMILRIDDVIAASKLEKEKEGEKGGGSEEFSGSSDLD

SEQ ID NO: 38762 - protein, 608 aa, Streptomyces avermitilis MA-4680
MREFTNPPLASAPPVGGLADVVFDHALEDPLHVALGRKDEQGTWRDVTAAEFRDEVLALAKGLLAQGIRFGDRVAIMCRTRYEWTLFDFALWTIGAQVVPVYPTSSAEQVFWMLHDAQVSAAMVEHEDHAMTIATVIDRLPQLHRLWQLDVGAVQELYESGAHLEDEVVHRHRRAVTPESVATIIYTSGTTGRPKGCVISHANFMFEADTVIERWEPVFHSKRGDEAATLLFLPLAHVFGRMVQIAAVRGRVKFGHQPQLNAAALLPDLAAFKPTFFLAVPYIFEKVFNAARRKAEREGRSGAFEKAVEAAVKYADAVEAKAWGIGPGPSAALRMQHQVFDKLVYAKIRAAMGGRVRHAMSGGSAMDRRLGLFFAGAGVYIYEGYGLTESTAAATANPPERTRFGTVGQAIPGTTVHIADDGEIWLNGGNVFQGYLNDPKATDATLHDGWLATGDLGSLDEDGYLTITGRKKEILVTSGGKSVSPGVLEERVRDHPLVAQCIVVGNDRPYIAALVTLDSEAVEHWLQMHDKPQLTPAELVRDAELETEVRRAVVAANTLVSQAESIRTFRILAHQFTEEHGLLTPSLKLKRKAIENAYATEVEALYRA

SEQ ID NO: 38763 - protein, 278 aa, Streptomyces avermitilis MA-4680
MSTKVPPITLNNGVEMPQLGFGVWQVPDDEAERAVATALEAGYRSIDTAAIYGNEEGTGKAIATAGIPRADLFVTTKLWNSDQGYDSTLRAFDVSLEKLGLDYIDLYLIHWPLPTRGQFVETYKAFEKIYADGRAKAIGVSNFLPEHLRTLIDATSVIPAVNQIELHPHLQQHAAREFHAEHGIATEAWSPLGSGKGLLEVPAIVAIARKHERTPAQVVLRWHIQLGNIVIPKSVTPSRIKENIEVFDFSLDDEDIAAISALNEDRRLGPDPATFDMG

SEQ ID NO: 38764 - protein, 403 aa, Oryza sativa
RVVWENDKGECQVQKGYRVQFNSALGPYKGGLRFHPTVNLSILKFLGFEQIFKNALTGLNMGGGKGGCDFDPKGKSDNEIRKFCVAFMRELNKHIGADTDVPAGDIGVGGREIGYLFGAYRAERNRWEGVLTGKGGSWGGSLIRPEATGYGLVYYVEHMINYASGGKESFAGKRVAISGSGNVAQYAALKIIELGGTVISLSDSKGALIADDDKGFTPEVINEIAALKLQRKALTALENHSFRYVEGARPWKEVKKVDVALPSATQNEVSEDEAKALIESGAKFIAEGSNMGCTQEAIEVFEAHRRENKGSAIWYAPGKAANAGGVAVSGLEMAQNSQRLSWSAEEVDEKLKGIMKDCFENCLSTAKEYFTPSEGEFPSLVGGANVAGFRKVAAAMHDQGDWW

SEQ ID NO: 38765 - protein, 507 aa, Pseudomonas syringae pv. phaseolicola 1448A
METTRMPMIVTDPNRADNPIIFSNRAFLEMTGYSSEEIIGTNCRFLQGPETDRAVVQSIREAIDERVDISTEILNYRKDGSTFWNALFISPVYNDAGDLIYFFASQLDISRRRDAEDALRQAQKMEALGQLTGGIAHDFNNLLQVMGGYIDLIGSAAEKPTIDVQRVQRSVHHAKSAVERASTLTKQLLAFARKQKLQGRVLNLNGLVSSTEPLIERTFGPHVTIETDLDPALKNCRIDPTQAEVALLNIFINARDALVGRPDPKISIETRNLVVDELANMSYDGLLPGRYVSIAITDNGIGMPSSIRDRVMDPFFTTKEEGKGSGLGLSMVYGFAKQSGGAARIYTEEGVGTTLRLYFPVDEAMLTHAEPPKAVDRRIGSCERILIVEDRPDVAELAKMVLDDYGYICEIVLNAREALKKFESGSRYDLLFTDLIMPGGMNGVMLAREVRRRYPKIKVLLTTGYAESSIERTDIGGSEFDVVSKPCMPQDLARKVRQVLDGPNGIA

SEQ ID NO: 38766 - protein, 138 aa, Sulfolobus islandicus
LNNITVAKILLEMLKSSLGPKGLDKMLVEGQDVTITNDGATIVKNMEVQHPTAKLLIETAKTVDTEVGDGTTSVVVLAGLLLEKAEDLLNQKIHPTAIIEGYRKALNSSLDLLKNIADKISPEDRKIIHDLVYTTLSS

SEQ ID NO: 38767 - protein, 589 aa, Zea mays
MGSKNLSSSQMIRAPLSLSASRIHAPAPAPSSVAIPASTAPHRTVSAAMRRFAADRARRAVAASLHGAASRSAAPSPHAPAPRHPASPVGAAAMAAAMVRTMSTTAAGTPPVSVATINPKVLKCEYAVRGEIVTHAQNLQQELQKNPESLPFDEILYCNIGNPQSLGQQPVTYFREVLSLCDHPALLDKSETHALYSSDAIERAWQILEKIPGRATGAYSHSQGIKGLRDEIAAGIAARDGFHASGDNIFLTDGASPAVHMMMQLLISSESDGILCPIPQYPLYSASIALHGGSLVPYFLNEETGWGLDVDELKKQLEEARSKGITVRALVVINPGNPTGQVLVEENQKKIVEFCKNEGLVLLADEVYQENIYVEDKPFHSFKKIARSLGYTDDDLPLVSFQSVSKGYYGECGKRGGYMEITGFSPDVREQIYKVASVNLCSNVSGQILASLVMNPPKAGDESFESFMSERDGILSSLARRAKALEEAFNSLEGITCNKAEGAMYLFPRLHLPQKAIGAAQAVGTAPDAYYAKRLLEATGIVVVPGSGFGQVPGTWHFRCTILPQEDKIPAIVSRLKEFHEKFMDEFRD

SEQ ID NO: 38768 - protein, 138 aa, Sulfolobus islandicus
LNNITVAKILLEMLKSSLGPKGLDKMLVEGQDVTITNDGATIVKNMEVQHPTAKLLIETAKTVDTEVGDGTTSVVVLAGLLLEKAEDLLNQKIHPTVIIEGYRKALNSSLDLLKSIADKISPEDRKIIHDLVYTTLSS

SEQ ID NO: 38769 - protein, 286 aa, Arabidopsis thaliana
MEKNTPVRKPHMSTADLLTWPENQPFESPAAVSSRSAARSHQPSDGISKVVFGGQVTDEEVESLNKRKPCSNYKMKEITGSGIFSVYEENDDSELASANSATNGKSRTFQQPPAAIMSHISFGEEEIVTPKKPATVPEVAKQRELSGTLEYQSDAKLNKQFSDAKCKELSGHNIFAPPPEIKLRPTVRALAYKDNFDLGESDTKPDGELKTAKKIADRKFTDLSGNNVFKSDVSSPSSATAERLLSTAKLKEISGNDIFADAKAQSRDYFGGVRKPPGGESSIALV

SEQ ID NO: 38770 - protein, 525 aa, Zea mays; identical to SEQ ID NO: 871

SEQ ID NO: 38771 - protein, 631 aa, Brassica napus
  misc_feature (432)..(432): Xaa can be any naturally occurring amino acid
  unsure (1)..(631): unsure at all Xaa locations
MASHIVGYPRMGPKRELKFALESFWDGKSTAEDLQKVSADIRSGIWKQMSEAGTKYIPSNTFAHYDQVLDTTAMLGAVPPRYGYTSGEIGLDVYFSMARGNASVPAMEMTKWFDTNYHYIVPELGPDVKFSYASHKAVNEYKEAKALGVDTVPVLVGPVSYLLLSKAAKGVEKSFDLLSLLPKILPVYKEVITELKAAGATWIQLDEPVLVMDLEGHKLQAFTAAYAELESTLSGLNVLVETYFADIPAEAYKTLTSLKGVTAYGFDLVRGTKTLDLVKSSFPAGKYLFAGVVDGRNIWANDFAASLSTLQELEGVVGKDKLVVSTSCSLLHTAVDLVNETKLDDEIKSWLAFAAQKVVEVNALAKALAGHKDEALFSANAAALASRRSSPRVTNESVQKAAAALKGSDHRRATNVSARLDAQQKKLNPPIXLPTTTIGSFPQTVELRRVRREYKAKKVSEEDYVKAMKEEIKKVVDLQEELDIDVLVHGEPERNDMVEYFGEQLSGFAFTANGWVQSYGSRCVKPPVIYGDVSRPKAMTVFWSAMAQSMTSRPMKGMLTGPVTILNWSFVRNDQPRHETCYQIALAINDEVEDLEKGGIGVIQIDEAALREGLTLKKSEHAFYLDWAVHS

SEQ ID NO: 38772 - protein, 142 aa, Youngia japonica
LRSGTEYYILPVFRGMGGGLTLASTRNDTCPLDVVQADLEVDNGLPLTFTPVDPKKGVIRESTDLNIIFSASSICIQSNVWNLEEYDGQLIVSAHGVAGNPGRETISNWFKIEKYEDDYKIVFCPTVCDFCRPVCGDIGVLI

SEQ ID NO: 38773 - protein, 160 aa, Solanum melongena
GKILRTGIDYYILPVVRGRGGGLTMDSIGNKTCPLDAVVQEQEEVKQGLPLTFTPFNPKKGVIRESTDLNIIFSANSICVQTTQWKLDNFDETTGKYFITLGGNQGNPGRETISNWFKIEKFERDYKLVYCPTVCDFCKVICKDIGIFIQDGVRRLALSD

SEQ ID NO: 38774 - protein, 298 aa, Escherichia coli
MIRVACVGITVMDRIYYVEGLPTESGKYVARNYTEVGGGPAATAAVAAARLGAQVDFIGRVGDDDTGNSLLAELESWGVNTRYTKRYNQAKSSQSAIMVDTKGERIIINYPSPDLLPDAEWLEEIDFSQWDVVLADVRWHDGAKKAFTLARQAGVMTVLDGDITPQDISELVALSDHAAFSEPGLARLTGVKEMASALKQAQTLTNGHVYVTQGSAGCDWLENGGRQHQPAFKVDVVDTTGAGDVFHGALAVALATSGDLAESVRFASGVAALKCTRPGGRAGIPDCDQTRSFLSLFV

SEQ ID NO: 38775 - protein, 237 aa, Nicotiana tabacum
MTESSSSQSESASSDSLPFDFLSDSFDFEADFFQFGDEVSNSSSESANSVHNSTNFIMLELEPTISSSDYEKPQVIIDLTSPKLSNVSDRKPSLKIDLPPVKKFEWIGFCNSTTQSNSIVSVTMQQKRKTEEKRHYRGVRQRPWGKYAAEIRDPTRRGARVWLGTFNTAVEAAKAYDRAAFKMRGSKAILNFPLEVGKNLSYSSSAVDGGVKRRKESDACGEEKGVKKVERCKEEES

SEQ ID NO: 38776 - protein, 101 aa, Manihot esculenta
MATLGGIKEVEESANSVEIDNLARFAVDDYNKKQNALLEFKRVVSTKQQVVAGTMYYITLEVADGGQTKVYEAKVWEKPWLNFKEVQEFKPIGVAPSDSTA

SEQ ID NO: 38777 - protein, 369 aa, Bacillus cereus ATCC 14579
MKEVDIMKTFLSALQWALFILAGSLIVPISVATSYGLNGAEAIAFVQRTLFVLGFAGLLQAIFGHKLPIQEGPAGLWWGIFSLYASLGVVLFGSSNETLKVLQYAFLLSGIICIILSVFGLIDKLVRYFTPTVIGTYLFLLVAQLSGSFLKGMFGLDGKHTEVQPNVFILSLIVILLSFFIMKLPIIGQYSVLFSIVCGWILFACFGLSNPITPVTDIIRFPSLFVFGMPRVEWNMVITVIFVTLLLLTNMLASIRVVQKVVSKYEENAASDRFKQAGIITGINQLLGGLFSAIGPVAISGSAGFIATTNIYKRLPFILGSSFIIVVSIFPKITSFFAAIPVAVGYAAIYPVFARHDWSRLSRIRNCPG

SEQ ID NO: 38778 - protein, 324 aa, Escherichia coli
MKPSVILYKALPDDLLQRLQEHFTVHQVANLSPQTVEQNAAIFAEAEGLLGSNENVNAALLEKMPKLRATSTISVGYDNFDVDALTARKILLMHTPTVLTETVADTLMALVLSTARRVVEVAERVKAGEWTASIGPDWYGTDVHHKTLGIVGMGRIGMALAQRAHFGFNMPILYNARRHHKEAEERFNARYCDLDTLLQESDFVCLILPLTDETHHLFGAEQFAKMKSSAIFINAGRGPVVDENALIAALQKGEIHAAGLDVFEQEPLSVDSPLLSMANVVAVPHIGSATHETRYGMAACAVDNLIDALQGKVEKNCVNPHVAD

SEQ ID NO: 38779 - protein, 635 aa, Saccharomyces cerevisiae
MSGARSTTAGAVPSAATTSTTSTTSNSKDSDSNESLYPLALLMDELKHDDIANRVEAMKKLDTIALALGPERTRNELIPFLTEVAQDDEDEVFAVLAEQLGKFVPYIGGPQYATILLPVLEILASAEETLVREKAVDSLNNVAQELSQEQLFSDFVPLIEHLATADWFSSKVSACGLFKSVIVRIKDDSLRKNILALYLQLAQDDTPMVKRAVGKNLPILIDLLTQNLGLSTDEDWDYISNIFQKIINDNQDSVKFLAVDCLISILKFFNAKGDESHTQDLLNSAVKLIGDEAWRVRYMAADRFSDLASQFSSNQAYIDELVQPFLNLCEDNEGDVREAVAKQVSGFAKFLNDPSIILNKILPAVQNLSMDESETVRSALASKITNIVLLLNKDQVINNFLPILLNMLRDEFPDVRLNIIASLKVVNDVIGIELLSDSLLPAITELAKDVNWRVRMAIIEYIPILAEQLGMQFFDQQLSDLCLSWLWDTVYSIREAAVNNLKRLTEIFGSDWCRDEIISRLLKFDLQLLENFVSRFTILSALTTLVPVVSLDVVTEQLLPFISHLADDGVPNIRFNVAKSYAVIVKVLIKDEAKYDALIKNTILPSLQTLCQDEDVDVKYFAKKSLAECQELLKN

SEQ ID NO: 38780 - protein, 373 aa, Nostoc punctiforme PCC 73102
MNDTLNPKEQMSTKNIILFVLLLFIPVSLVAHFLEWGELIVFITAGLAILPLAAWMGTATEEIAVVVGPSLGGLLNATFGNATELIIALVALNAGLIDVVKASITGSIISNLLLVMGFSMLLGGLRYKEQTFQPIVARVNAASMNLAVIAILMPTAMNYTSQGINEQTLQNLSIAVAVVLILVYALTLLFSMKTHSYLYDVGVAEIEEEEAPHAKPNMMLWVSVLLVCTLLVALESEMLVDSLEVATSQLGLTALFTGVILVPIVGNAAEHATAVTVAMKDKMDLSLSVAVGSSMQIALFVAPVLVIAGRVLGQPMDLDFKPFELVAVVVSVLIANSISSDGKSNWLEGTLLLAAYTVLGFAFYFHPVMESMG

SEQ ID NO: 38781 - protein, 430 aa, Erwinia carotovora subsp. atroseptica SCRI1043
MKMKKLLSSLGLGVAALLPSWAMAATPTIDKADNAFIMICTVLVLFMTIPGIALFYGGLIRSKNVLSMMTQVSVTFAMVCILWVVYGYSLAFSEGNAFFGGFSTFMLKGIGIESISGTYYQFVHVAYQASFACITVALIVGAIAERIRFSAVLIFVGLWLTFSYLPMTHMVWGGGYLAMDGALDFAGGTVVHINAAVAGLVGAYLLGKRAGFGKEAFKPHNLPMVFIGTAILYIGWFGFNAGSAGAANGVAALAFLNTVVATAAAILAWVGGEWLVRGKPSLLGACSGCIAGLVAITPAAGTVGVGGALIIGLAGGVAGLWGVTVLKRWLRVDDPCDVFGVHGVCGIVGCILTGVFTSASLGGTGYAEGVTMAHQVWVQLFSVIVCLVWSGVVAFVAFKVADMIVGLRVPEEQEREGLDVNSHGESAYNQ

SEQ ID NO: 38782 - protein, 231 aa, Zea mays
MVAGLEDPAIDPTALSLALPASAPALNKEDYIAICLAALAGTRKFGLGREKDQHQHTKWCPTTTTTHAPSAQQELRFRCAVCGKAFATYQALGGHKSSHRKPTTPERYAAALAAAATTTAARGDHSDETTASSLSGSAASGGPHRCSICRRGFATGQALGGHKRCHYWDGMSVSISVSSGMASSSGLSTVRNFDLNLAPLPENGDAGMMKRWAEEEEVQSPLPIKKRRMSD

SEQ ID NO: 38783 - protein, 365 aa, Nostoc punctiforme PCC 73102
MIGIAIAGTGFGQKVHIPGFQAHPQTEVVAVYHRDINKAKAIAESHNIPHASDSLADIVALPEVQAVSISTPPFLHYEMAKTVLQAGKHLLLEKPTTLNAVEAKELYQLAKAKGVIATVDFEFRFVPAWQLFAELLSEDYVGELRLIKIDWLGSSRADISRPWNWYSDKDKGGGALGSLGSHAFDYIHWLFGPVQRLNAHLSTAIPARVDPVSGESKLVNTDDNCILTLELANGTPCQLSISAVVHAARTHWVEVYGDRGTLIVGSENQKDYIHGFRVWGSQPGKPLTEIEIPNRLIFPKNYADGRISAFIRVVDQWVQGIERNQEITPSLREGIYSQLLMDLSHESHTKASWVDVPSLERFLSN

SEQ ID NO: 38784 - protein, 234 aa, Dunaliella salina
KAQEPWFGIEQEYTLLNSVTKWPLGWPKGGYPAGQGPYYCSVGAGRSIGRDIPEVHYRCCLHAGIQISGVNGEVLPSQWEYQVGPVEGIAMGDQMWMSRYLMYRVAELFNVEVTFDPKPIPGDWNGSGGHVNFSNRQPESPPAGKQSRSSAKKLGKRHRWHIAAYGEGNERRLTGKHETSSMNDFSWGVANRGCSIRVGRMVPVEKCGYYEDRRPSSNLDPYVVTRLLVETTLL

SEQ ID NO: 38785 - protein, 412 aa, Brassica napus
  misc_feature (65)..(65): Xaa can be any naturally occurring amino acid
  misc_feature (99)..(99): Xaa can be any naturally occurring amino acid
  misc_feature (131)..(131): Xaa can be any naturally occurring amino acid
  unsure (1)..(412): unsure at all Xaa locations
MNALAATNRNFRHASRILGLDSKIEKSLMIPFREIKVECTIPKDDGTLVSYVGFRVQHDNARGPXMKGGIRDHPEVDRDEVNAYARGKTWKTAFAGMAXGGAMGEPGWQPADVSSRELNYVSLRSTSMIQXVIRIRSAFPAPDMGTNAQTMAWILDEYSKFHGHSPAVVTGKPIDLGGSLGREAATGRGVVYATEALLAEYGKSIKGLTFVVQGFGNVGTWAAKLIHEKGGKVVAVSDITGAVRNPEGLDIDALLSHKEATGSLVDFSGGDAMDSNELLIHECDVLIPCALGGVLNKENAGDVKAKFIIEAANHPTDPDADEILSKKGVIILPDIYANAGGVTVSYFEWVQNIQGFMWEEEKVNLELQKYMTRAFHNIKSMCHTHSCNLRMGAFTLGVNRVARATQLRGWEA

SEQ ID NO: 38786 - protein, 222 aa, Pyrobaculum aerophilum str. IM2
MSAVINKETLQAKIAEALKAGKPRRFKQSVELIVVLKGVDLSKPENRINLLVELPHPPKPNKIAAFAHGAFEVSAKNAGVDSIITRDQVEGLSGNKRAIRKLAKQYDFFIAPPDLMPLLGRVVGPIFGPRGKMPEVVPPNVDVKSVVERLRKAVRVRFRNEPVVKVRIGSEGQSPKEILENALVVLEEVNRKFPLRQYLKDLYFKKTMGPPVKVRAVEALVK

SEQ ID NO: 38787 - protein, 304 aa, Candida glabrata CBS138
MVFPKKIPIQNWNSKISLRTPKLITFDAYNTLYATVLPVMEQYSNVASIYGVKVDPQELSANFPSVYSKLKLEHPNYGKNTGISAKQWWQIMITEVFKPIKLSDDVVEAILDRFGSCEAFFVYPDLIALLKGIRQKYPDVIFGVISNADPYAGDVIKSFGLDKYFDGNIYLSYDVGFSKPDQKIYEYALDDILNRFPDLIKNCSKEEFKQFCWHIGDEKINDMEGPAKTGLVGILIDRVNKYGYFDGSFADIKHDLDMHKIDNNSLESWEIGIKQTDTFQVSDREYVISNLRTLATILDVQVNE

SEQ ID NO: 38788 - protein, 331 aa, Bacillus halodurans C-125
MTYELSTDREFDLIAIGRACIDLNAVEYNRPMEETMTFSKYVGGSPANIVIGSSKLGLKAGFIGKIADDQHGRFIESYMRGVGVDTSNLVVDQEGHKTGLAFTEIKSPEECSILMYRQDVADLYLSPEEVNEAYIRRSKLLLVSGTALSKSPSREAVLKAIRLAKRNDVKVVFELDYRPYSWETPEETAVYYSLVAEQSDIVIGTREEFDVLENRTEKGDNDETIRYLFKHSPELIVIKHGVEGSFAYTKAGEAYRGYAYKTKVLKTFGAGDSYASAFLYALISGKGIETALKYGSASASIVVSKHSSSDAMPSVEEIEALIEKDETITIA

SEQ ID NO: 38789 - protein, 660 aa, Sinorhizobium meliloti
MISREKHDRMANAIRFLSMDAVEKANSGHPGLPMGAADIATVLFTRYLSFDPKNPAWPNRDRFVLSAGHGSMLLYSLLYLTGYDDITIDEIKNFRQLGSRTAGHPEYGHAAGIETTTGPLGQGIANSVGMAIAERKLREEFGSELMEHYTYVLAGDGCLMEGISQEAIALAGHLKLNKLIVFWDDNNISIDGPISIADSTDQHARFRASKWHTIAVDGHDPEAIAAAIEEAHKSDKPTMIACKTVIGFGAPNKAGTHKVHGSPLGAEEIAATRKALGWEAEAFTVPSDVLDAWRIAGLRSAKARKEWEERLEAAEAEKKAQFVRRFSGELEGSLASAIGAYKQKLAETKPSPATRKASEDALEVINGVLAETIGGSADLTGSNNTKTSQTHSITPDDFSGRYIHYGVREHGMAAAMNGMALHGGLIPYSGGFLIFSDYCRPSIRLAALMGIRVIHVLTHDSIGLGEDGPTHQPVEHMAALRAIPNLLMFRPADATETAECWQLALENRKRPSGLALTRQNLMAVRTEYEEQNLCARGAYDLISASDAQVTIFATGSEVEIAVKACQTLTAKGIATRVVSVPCFELFAEQSEDYQQAIIGTSPVKIAVEAGIRQGWDHFIGNDGIFIGMSSFGASGPYKDLYKHFGITPEVVVASAEAKLS

SEQ ID NO: 38790 - protein, 336 aa, Triticum aestivum
  misc_feature (34)..(34): Xaa can be any naturally occurring amino acid
  unsure (1)..(336): unsure at all Xaa locations
MERYELLKDIGAGNFGVARLMRNKETKELVAMKXHPNIIRFKEVVVTPTHLAIVMEYAAGGELFDRICNAGRFSEDEARYFFQQLICGVSYCHFMQICHRDLKLENTLLDGSPAPRLKICDFGYSKSSLLALEAQSRRVEPPAYIAPEVLSRREYDGKTADVWSCGVTLYVMLVGGYPFEDPDDPKNFRKTIGRIMSIQYKIPEYVHVSQDCKQLLASIFVANPAKRITMREIRNHPWFLKNLPRELTEAAQAMYYKRDNSAPTYSVQSVEGIMKIVEEAQKPPPSTTPVAGFGWAEEDEQEDGKKPEEEAEEEDEENEYEKQLNEVRASGEFHIS

SEQ ID NO: 38791 - protein, 66 aa, Faurea galpinii
MPGQWEYQVGPNVGIEAGDHIWCSRYLLERITEQAGVVLTLDPKPIEGDWNGAGCHTNYSTKSMRE

SEQ ID NO: 38792 - protein, 599 aa, Haemophilus influenzae Rd KW20
MQTVNVDIAIVGAGGGGLRAAIAAAEANPNLKIALVSKVYPMRTHTVAAEGGAAAVIKEEDSYDKHFQDTVAGGDWLCEQDVVEYFVQHSPVEMTQLERWGCPWSRKADGDVNVRRFGGMKIERTWFAADKTGFHLLHTLFQTSIQYPQIQRFDEHFVLDILVDDGHARGMVAMNMMEGSLVQINANAVVIATGGGCRAFKFNTNGGIVTGDGLSMAYRHGVPLRDMEFVQYHPTGLPNTGILMTEGCRGEGGILVNKDGYRYLQDYGLGPETPIGKPQNKYMELGPRDKVSQAFWQEWKKGNTLKTAKGVDVVHLDLRHLGEKYLHERLPFICELASAYEGVNPVNEPIPVRPVVHYTMGGIEVDFNSETRIKGLFAVGECASSGLHGANRLGSNSLAELVVLGRVAGEYAAQRAVEAQSVNQSAVDAQAKDVVARLEALHKQEGNESWSEIRDEMGTVMEEGCGIYRDQASMQKAVDKIAELKERYKRIRVSDNSSVFNTDVLYTVELGYILDVAQSIANSAIERKESRGAHQRLDYTERDDVNYLKHTLAFYNENGAPRIEYSPVKITKSQPAKRVYGAEAEAQEAAAKAKEQANG

SEQ ID NO: 38793 - protein, 552 aa, Ralstonia eutropha JMP134
MTPDTSLEKTSQSTDGGDDCPLRWFDADLGAFESLERLIAEHPADFFAGKSFEPVGACHTREAVFASVELPETPTSPQAHADHLLHDVFRHVMPVASPTFVGHMTSSLPSFMPSLAKVVAALNQNVVKLETSGALTGLERQVVGMLHKLVFSQDSAFYGRWLHDADHALGAICSGGTVANLTALWASRNKLLGARDGFAGIHRAGMVAALRHYGYDGLAIVVSERGHYSLGKAADVLGIGRDNLVPVEVDAEGRMRIDLLRDTMRDLQQRNIRPMAIVGIAGTTETGSVDPLDAIADIAQEAGCHFHVDAAWGGATLLSERERWRFAGIERADSVVIDAHKQFYVPMGAGMVLFRSPAWTQEIIQHANYIVRKGSVDLGRHTLEGSRGAAAVMLYANLHLLGRKGLAQLIDRSIDNAHYFASLIAQQPDFELVSHPQLCLLTYRYLPETVRAALATASEDKREKILDALDALTVSIQEMQRDAGRSFVSRTQLTSTQFAGRPIAVFRVVLANPDTTHAILQDILDEQRMLAAASPCMAALMALVEASGRLQR

SEQ ID NO: 38794 - protein, 461 aa, Cucumis melo
METMQTIDFSFQVRKCQPELIAPANPTPYEFKQLSDVDDQQSLRFQLPLVNIYHHNPSLEGRDPVKVIKEAIAKALVFYYPLAGRLREGPGRKLFVECTGEGILFIEADADVSLEQFRDTLPYSLSSMENNIIHNSLNSDGVLNSPLLLIQVTRLKCGGFIFGIHFDHTMADGFGIAQFMKAIAEIARGAFAPSILPVWQRALLTARDPPRITVRHYEYDQVVDTKSTLIPANNMIDRLFFFTQRQISTLRQTLPAHLHDCSSFEVLAAYVWRLRTIAFQLKPEEEVRFLCVVNLRSKIDIPLGFYGNAIVFPAVITTVAKLCGNPLGYAVDLIRKAKAKATKEYIKSMVDFMVIKGRPRFTEIGPFMMSDITRIGFENVDFGWGKAIFGGPIIGGCGIIRGMISYSIAFMNRNGEKGIVVPLCLPPPAMERFRANVHASLQVIQVLDKVDRDMQTILSAL

SEQ ID NO: 38795 - protein, 66 aa, Faurea rubriflora
MPGQWEYQVGPSVGIEAGDHIWCSRYLLERITEQAGVVLTLDPKPIEGDWNGAGCHTNYSTKSMRE

SEQ ID NO: 38796 - protein, 266 aa, Brassica napus
STHASGRPARPIAEMAGMSHRIRERTDALDAAGNTTAAIGKGFAIGSAALVSLALFGAFVSRAGVHTVDVLTPKVIIGLLVGAMLPYWFSAMTMKSVGSAALKMVEEVRRQFNTIPGLMEGTAKPDYATCVKISTDASIKEMIPPGCLVMLTPLIVGFFFGVETLSGVLAGSLVSGVQIAISASNTGGAWDNAKKYIEAGVSEHAKSLGPKGSEPHKAAVIGDTIGDPLKDTSGPSLNILIKLMAVESLVFAPFFATHGGILFKYL

SEQ ID NO: 38797 - protein, 442 aa, Arabidopsis suecica
MDFSGSFFVIFVTFFFLPPLSSAGSYDSGSGLESLARGMLHSAKDPEFFEWMRGIRRKIHENPETGFQEFKTSQLVRDELDSLGVKYKYPVAKTGVVAWIGSGSKPVFGLRADMDALPLQELVEWESKSKVHGKMHACGHDTHVAMLLGAAKLLQTTKHLIKGTVKLVFQPGEEGYAGAYEMLKDEILDDLDGILSVHVFPSIPSGGIGSRPGTVLAGAGLFTVTVYGQGSHAATPHFSKDPVLAASSAVVALQQIVSRELDPLEAGVVTVGYIEGGHAQNVIPQSAKFGGTFRSLSNDGLLFIQRRIKEISEAQASVYRCKAEVNFEEKKPSLHPVMNNDEGLYEHGKKVAEAMIGKNNFHDFPVTMGGEDFSFFTQKTKAAIFVLGIKNETLGAGKPLHSPYFFVDEEALPVGAALHAAMAVSYLDEHGHSHEDEVKSEL

SEQ ID NO: 38798 - protein, 119 aa, Zea mays
MAKTCFKTEHPLERRQAESARIREKYADRIPVIVEKADKSDVPEIDKKKYLVPADLTVGQFVYVVRKRIKLSPEKAIFVFVNSTLPPTASLMSAIYEENKDEDGFLYMTYSGENTFGSA

SEQ ID NO: 38799 - protein, 384 aa, Synechococcus elongatus PCC 7942
MTVTLPSVSEKHRVRLQPLELPERLLLGPGPSNAHPAVLEAISRPPIGHLDPKFLELMTEVQGLLRYIWQTDNRLTIPVSGTGSAAMEATIANSVEPGDVVLVGVMGYFGNRLVDMAGRYGADVRTIHKPWGDVFSLAELRQALEEHRPQILALVHAETSTGAEQPLAGVGDLCREFDCLLLIDTVTSLGAVPTLLDEWGVDLAYSCSQKGLSCPPGVSPFTMGPRAEEKLARRKGKVANWYLDMSLLNQYWGSDRVYHHTAPVNMNFGIREALRLIADEGIETVWKRHRDNAEYLWAGLEDLGLTCHVPVENRLPTLTTVRIPEGVDGKAVSRQLLDEHGIEMGGGLGELAGKVWRIGLMGYNSRRENVDRLLSILADVLPRS

SEQ ID NO: 38800 - protein, 148 aa, Persicaria hydropiper
FIGSWLVMRLLERGYVVRATVRDPTNMKKVKHLLDLPTANTHLSLWKADLGEEGSFDEAINGCAGVFHVATPMDFESKDPENEVIKPTINGMLDIMKACLKANVRKLVFTSSAGTVNVEEKQKPVYDENCWSDVEFCRRVKMTGWMYF

SEQ ID NO: 38801 - protein, 250 aa, Antirrhinum majus
MVKIAFGSIGDSFSVASIKAYVAEFIATLLFVFAGVGSAIAYNKLTSDAALDPAGLVAVAVAHAFALFVGVSMAANVSGGHLNPAVTLGLAVGGNITILTGLFYWIAQCLGSTVACLLLKFVTNGLSVPTHGVAAGMDAIQGVVMEIIITFALVYTVYATAADPKKGSLGVIAPIAIGFIVGANILAAGPFSGGSMNPARSFGPAVASGDFSQNWIYWAGPLIGGALAGFIYGDVFITAHAPLPTSEDYA

SEQ ID NO: 38802 - protein, 349 aa, Glycine max
MDKYEAVKDLGAGNFGVARLMRNKVTKELVAMKYIERGPKIDENVAREIMNHRSLRHPNIIRYKEVVLTPTHLAIVMEYAAGGELFERICSAGRFSEDEARYFFQQLISGVHFCHTMQICHRDLKLENTLLDGSPAPRLKICDFGYSKSSLLHSRPKSTVGTPAYIAPEVLSRREYDGKLADVWSCAVTLYVMLVGAYPFEDQDDPRNFRKTIQRIMAVQYKIPDYVHISQDCRHLLSRIFVANPLRRITIKEIKNHPWFLRNLPRELTESAQAIYYQRDSPNFHLQSVDEIMKIVGEARNPPPVSRPVKGFGWEGEEDLDEEVEEEEDEDEYDKRVKEVHASGEFQIS

SEQ ID NO: 38803 - protein, 304 aa, Escherichia coli
MSAKVWVLGDAVVDLLPESDGRLLPCPGGAPANVAVGIARLGGTSGFIGRVGDDPFGALMQRTLLTEGVDITYLKQDEWHRTSTVLVDLNDQGERSFTFMVRPSADLFLETTDLPCWRHGEWLHLCSIALSAEPSRTSAFTAMTAIRHAGGFVSFDPNIREDLWQDEHLLRLCLRQALQLADVVKLSEEEWRLISGKTQNDQDICALAKEYEIAMLLVTKGAEGVVVCYRGQVHHFAGMSVNCVDSTGAGDAFVAGLLTGLSSTGLSTDEREMRRIIDLAQRCGALAVTAKGAMTALPCRQELE

SEQ ID NO: 38804 - protein, 256 aa, Nicotiana tabacum
MGSGKLGESGMIELTAKIMMVVIIFLFLVVVFIFFLHLYTKWFWRYRQEDTGNPNGGTRRRRRRRFNFAGGYQEVNVLRRGLDPSVLKTIPVVPFNMKDFKDGLECSVCLSEVSEGENTRVLPKCNHGFHVDCIDMWFHSHSTCPLCRNPVSEQSAESISETIGSSVEEGSASTETQNIPTNVLFWGDETSTTSSASTSNRPEGILVIDIARQNTEQEEEEGQKTPTSTRLRSLTRLFSRVNPCNVDVEQGSRSQS

SEQ ID NO: 38805 - protein, 477 aa, Lycopersicon esculentum
NSILSKLATNEEHGENSPYFDGWKAYDSDPFHPLKNPNGVIQMGLAENQLCLDLIEDWIKRNPKGSICSEGIKSFKAIANFQDYHGLPEFRKAIAKFMEKTRGGRVRFDPERVVMAGGATGANETIIFCLADPGDAFLVPSPYYPAFNRDLRWRTGVQLIPIHCESSNNFKITSKAVKEAYENAQKSNIKVKGLILTNPSNPLGTTLDKDTLKSVLSFTNQHNIHLVCDEIYAATVFDTPQFVSIAEILDEQEMTYCNKDLVHIVYSLSKDMGLPGFRVGIIYSFNDDVVNCARKMSSFGLVSTQTQYFLAAMLSDEKFVDNFLRESAMRLGKRHKHFTNGLEVVGIKCLKNNAGLFCWMDLRPLLRESTFDSEMSLWRVIINDVKLNVSPGSSFECQEPGWFRVCFANMDDGTVDIALARIRRFVGVEKSGDKSSSMEKKQQWKKNNLRLSFSKRMYDESVLSPLSSPIPPSPLVR

SEQ ID NO: 38806 - protein, 283 aa, Tropheryma whipplei str. Twist
MVVFVLTYVPSVLLGDGVSIPQFGLGTYELPPNEASSVVQSAIELGYRHIDTASLYANEREVGRAIASSGIKREEFFVTTKLWNSDQPKPREAFERSLDLLSLDYVDLYLIHWPCPPSELYINVWEVLLELKESGRAKSVGVSNFLSEHIDKIKEAGFPLPSVNQIELHPWLQQRELVLSCRNDGIQIESWGPFARFSKDLDAFPELTRPAKQYGKTPAQVILRWHIQKGYVVFPKTVHAERLRQNIDIFDFDLTPDEISGIDSLDAGFRTGPDPSSFRAGLD

SEQ ID NO: 38807 - protein, 374 aa, Oryza sativa
MAPPLAAPRFHAAALPLRLRLRTRPQKLPCWRRAARPNDEDYYLIDAPESIGDGFSFSGGKYTDGPSKSDEWFAQGRMVKAHPVYGNKGKAKDPIFGLTMGAESQSSNDVFRWFCVEAGSSSNPPVLFIHGFPSQAYSYRNVLPVVSDNYHAIAFDWLGFGFSDKPQPDYGFDYTLDEYTSSLESLINAVAPDKLSIVVQGYFAPIVIKYANEHQDKLNHLILVNPPITDKHAKLPSTLACFSNFLLGEIFSQDPLRASDKALTSSGPYMMKEEDAMVYRRPYLVSGSSGFALNAISRAMKKDLKVYIESMRNILSSDSWKTKTTAGHHVQEDRGEELGKLVKRILRSALSPQSRAPTTFECLLILYTGTEVAV

SEQ ID NO: 38808 - protein, 485 aa, Lycopersicon esculentum
MGFEIAKTNSILSKLATNEEHGENSPYFDGWKAYDSDPFHPLKNPNGVIQMGLAENQLCLDLIEDWIKRNPKGSICSEGIKSFKAIANFQDYHGLPEFRKAIAKFMEKTRGGRVRFDPERVVMAGGATGANETIIFCLADPGDAFLVPSPYYPAFNRDLRWRTGVQLIPIHCESSNNFKITSKAVKEAYENAQKSNIKVKGLILTNPSNPLGTTLDKDTLKSVLSFTNQHNIHLVCDEIYAATVFDTPQFVSIAEILDEQEMTYCNKDLVHIVYSLSKDMGLPGFRVGIIYSFNDDVVNCARKMSSFGLVSTQTQYFLAAMLSDEKFVDNFLRESAMRLGKRHKHFTNGLEVVGIKCLKNNAGLFCWMDLRPLLRESTFDSEMSLWRVIINDVKLNVSPGSSFECQEPGWFRVCFANMDDGTVDIALARIRRFVGVEKSGDKSSSMEKKQQWKKNNLRLSFSKRMYDESVLSPLSSPIPPSPLVR

SEQ ID NO: 38809 - protein, 206 aa, Oryza sativa
MAALLARQAAQALRARQMAQLGPSATAMQGHIRTYMGAGKPTRFKEDEEKEKLAKEIAKDWNAVFERSINTLFLTEMINYPFEKGPLSPRFRGEHALRRYPTGEERCIACKLCEAICPAQAITIEAEEREDGSRRTTRYDIDMTKCIYCGFCQEACPVDAIVEGPNFEFATETHEELLYDKEKLLENGDRWETEIAANLESESLYR

SEQ ID NO: 38810 - protein, 485 aa, Lycopersicon esculentum
MGFEIAKTNSILSKLATNEEHGENSPYFDGWKAYDSDPFHPLKNPNGVIQMGLAENQLCLDLIEDWIKRNPKGSICSEGIKSFKAIANFQDYHGLPEFRKAIAKFMEKTRGGRVRFDPERVVMVGGATGANETIIFCLADPGDAFLVPSPYYPAFNRDLRWRTGVQLIPIHCESSNNFKITSKAVKEAYENAQKSNIKVKGLILTNPSNPLGTTLDKDTLKSVLSFTNQHNIHLVCDEIYAATVFDTPQFVSIAEILDEQEMTYCNKDLVHIVYSLSKDMGLPGFRVGIIYSFNDDVVNCARKMSSFGLVSTQTQYFLAAMLSDEKFVDNFLRESAMRLGKRHKHFTNGLEVVGIKCLKNNAGLFCWMDLRPLLRESTFDSEMSLWRVIINDVKLNVSPGSSFECQEPGWFRVCFANMDDGTVDIALARIRRFVGVEKSGDKSSSMEKKQQWKKNNLRLSFSKRMYDESVLSPLSSPIPPSPLVR

SEQ ID NO: 38811 - protein, 1602 aa, Mycobacterium tuberculosis H37Rv
MSGTTTHVDYLKRLTADLRRTRRRLSDLEAKLSEPVAVVGMGCRYPGGVDSPETLWELVAQGRDAVSDFPADRGWDVDGLFDPDPDACGKMYTRRGTFLEHAGDFDAGFFGIGPSEALAMDPQQRLLLEVSWEALERTGIDPTKLRGSATGVFAGVIHAGYGGQLSGELEGYGLTGSTLSVASGRVAYVLGLEGPAVSVDTACSSSLVALHLAVQSLRSGECDLALAGGVTVMATPAAFVEFSRQRALARDGRCKVYAGAADGTAWSEGAGVLVVERLVDARRLGHPVLALVRGSAVNQDGASNGLTAPNGPSQQRVIRAALASARLRAVEVDVVEGHGTGTMLGDPIEAQALLATYGQDRVEPLWLGSIKSNIGHTSAAAGVAGVIKMVQAMRHGVMPKTLHVDVPTPHVDWSVGAVSLLTQPRAWSVHGRPRRAGVSSFGISGTNAHVILEQAPVVESVVPEVASPTAASAVPWVLSARSEQALAGQAQRLLAFVAANPDLDPIDVGWSLVKTRAMFEHRAVVVGADRGALLAGLAALAAGESGAGVAVGRARSVGKTVFVFPGQGAQWVGMGAQLYAELPLFALAFDAVAEELDRHLRLPLRNVLWEGDEALLTSTEFAQPALFAIEVALATLLQHWGISPDFLIGHSVGEIAAAHLAGVLSLTDAAGLVAARGRLMAELPAGGVMVVVAASEEEVLPVLVDGANLAAVNAPHSVVVSGCEAAVSDIADHFARRGRRVHRLAVSHAFHSLLMEPMLAEFTRIAAGISVSKPRIPLVSNVTGQMAGAGYGDGQYWVEHARRPVRFAEGVQLLNAVGATRFVEVGPGGGLTALVEQSLPLGEALSVAMMRREHPEVSSVLGAVATLFTAGAQMDWPAVFGSPGRRIELPTYAFQRQRYWLPPTSAGSADISGVGLLAARHGLLGAVVEQPDSDVVVLTGRLSVGEQRWLADHVIAGVVLLAGAAFVELALRAADQVDCGVVEELTVVTPLVLPTVGGVQLQVVVGVGEMGQRPVSIYSRNAESDSGWVLHARGVLGAKAVAPAADLSVWPPLGAAPVDVDGAYQRFAELGYEYGRAFQGLTAMWRRESELFADVAVPDDVDVTLSGFGIHPLVLDAALHAMGMVGEQAATMLPFSWQGVSLHAAGASRVRARIAPAGDGTVSVELADQAGLPVLSVQALVMRSVSSQLLSAAVAAADAAGRGLLEVAWLPVELAHNDISADLVVWELESFQDGVGPVYSATHRVLVALQSWLAQERAGRLVVLTQGSVGQDATNLAGAAVWGLVRSAQAEHPGRVMLVDSDGSMDVGDVIGCGEEQLMIRNGTAYAARLAQLRPQPILQLPDTNSGWRLVAGGAGALEDLTLASCPAKELAPGQVRIEVRALGVNFRDVLVALGIYPGAAELGAEGAGVVTEVGPGVTGLAVGDPVMGLLGVAGSEAVVDARLVVKLPNRWPLTDAAGVPVVFLTAYYALRVLAQVQPGESVLVHAAAGGVGMAAVQLARLWGLEVFATASRGKWDTLHTMGCDNTHVADSRTLAFEETFWLTTEGRGVDVVLNSLAGEFTDASLRLLPRGGRFIEMGKTEFGTPRSLPRTILGWPTGLST

SEQ ID NO: 38812 - protein, 206 aa, Saccharomyces cerevisiae
MASTDFSKIETLKQLNASLADKSYIEGTAVSQADVTVFKAFQSAYPEFSRWFNHIASKADEFDSFPAASAAAAEEEEDDDVDLFGSDDEEADAEAEKLKAERIAAYNAKKAAKPAKPAAKSIVTLDVKPWDDETNLEEMVANVKAIEMEGLTWGAHQFIPIGFGIKKLQINCVVEDDKVSLDDLQQSIEEDEDHVQSTDIAAMQKL

SEQ ID NO: 38813 - protein, 451 aa, Mesorhizobium loti MAFF303099
MNISSTLKTTGRAALLGSLALAALGSVAAFAQEAAPAAAAAAPAAAPTPVLDTGNTAWMLTSTALVLMMTIPGLALFYGGMVRKKNVLATIMQSFAITCLVTVLWFMFGYSLAFSDGGGMNAYLGGFSKFFHHGITVSTLWLPGVSNIPEFVFSMFQMTFAIITPALIAGAFAERMKFSALLLFMALWLIVVYCPIAHWVWGGGFLGTAGVLDFAGGTVVHINAGVAGLVCALVLGKREGYGTTNMAPHNLVYSVIGASLLWVGWFGFNAGSELAADGLAGAAMMNTQVATAAAALAWMFAEWIVAKKPSVLGIISGAVAGLVAVTPASGFVNPTGAFIIGIVAGVLCYISAVKVKHMFGYDDSLDAFGVHGVGGIIGALLTGALADPAINALGKGGSVVTQLYGIVFTILWTAIATFVILYIVKALVGLRPTTQEEVEGLDISQHGEVVP

SEQ ID NO: 38814 - protein, 341 aa, Sinorhizobium meliloti
MSERLEDIAVAMVANGRGLLAADESTATIKKRFDSIGLESTETSRRDYREMLLRSDDAMREYISGVILYEETLFQKAADGTPLADVIRNAGSIPGIKVDTGAKPMAHFPNETITEGLDGLAARLARYHEAGARFAKWRGVIAISDALPTWGAIRANAHALARYAALCQEAKIVPIVEPEVLMDGAPGDHSIERSEEVTEWVLRTVFEELGELRVRLEGMILKPSMVIDGKKARKASVDEVAERTIKVLKRTVPAAVPGIAFLSGGQSTEEATAHLSAMNAAHDLPWKLTFSYGRALQQEALNAWGGKSENVAAGQRAFAHRAKMCSLAAKGSWTKDFEKAA

SEQ ID NO: 38815 - protein, 460 aa, Ajellomyces capsulatus
MGKEDKTHINLVVIGHVDSGKSTTTGHLIYKCGGIDSRTIEKFEKEAEELGKKSFKYAWVLDKLKSERERGITIDIALWKFETPKYSVTVIDAPGHRDFIKNMITGTSQADCAILIIAAGTGEFEAGISKDGQTREHALLAFTLGVRQLIVAINKMDTTKWSESRFNEIIKEVSNFIKKVGYNPKAVPFVPISGFEGDNMIEPSPNCTWYKGWNKETASGKSSGKTLLDAIDAIEPPTRPTDKPLRLPLQDVYKISGIGTVPVGRVETGVIKPGMVVTFAPSNVTTEVKSVEMHHQQLQAGYPGDNVGFNVKNVSVKEVRRGNVAGDSKNDPPKGCESFNAQVIVLNHPGQVGAGYAPVLDCHTAHIACKFSELIEKIDRRTGKSVENNPKFIKSGDAAIVKMVPSKPMCVEPFTDYPPLGRFAVRDMRQTVAVGVIKSVIKSDKTAGKVTKAAQKATKK

SEQ ID NO: 38816 - protein, 181 aa, Fagus sylvatica
MASSMISSATVATVSRATPAQATMVAPFTGLKSTAAFPATQKSNNDITSLASNGGRVQCMKVWPPLGLQKFETLSYLPPLSLESLAKQIEYLILKGWIPCLEFELEHPFVYRENNRSPGYYDGRYWVMWKLPMFGCTDATQVLAELQEASKTYPTSHIRIIGFDNKRQVQCISFIAYKPPK

SEQ ID NO: 38817 - protein, 151 aa, Archaeoglobus fulgidus DSM 4304
MERTFVMVKPDGVQRGLVGEVIGRLERKGLKIVAMKMLWIAREMAENHYAEHREKPFFSALVDYITSGPVVAMVVEGKNAIKVVRTLVGATNPAEAAPGTIRGDFGLDVGRNVVHASDSPQSAEREISLFFSDDEIVNWEKADEDWIYEER

SEQ ID NO: 38818 - protein, 642 aa, Zea mays
FCFALQFRPSSSHDTTVTTTNAGAPVWNDNEALTVGPRGPILLEDYHLIEKVAHFARERIPERVVHARGASAKGFFECTHDVTSLTCADFLRAPGVRTPVIVRFSTVIHERGSPETIRDPRGFAVKFYTREGNWDLLGNNFPVFFIRDGIKFPDVIHAFKPNPRSHVQEYWRVFDFLSHLPESLHTFFFLFDDVGVPSDYRHMEGFGVNTYTFVSAAGKAQYVKFHWKPTCGVRCILTDEEAALVGGRNHSHATQDLYDSPETIRDPRGFAVKFYTREGNWDLLGNNFPVFFIRDGIKFPDVIHAFKPNPRSHVQEYWRVFDFLSHLPESLHTFFFLFDDVGVPSDYRHMEGFGVNTYTFVSAAEKAQYVKFHWKPTCGVRCILTHEEAALVGGRNHSHATQDLYDSIAAGSFPEWTLYVQVMDPDTEEQYDFDPLDDTKTWPEDLLPLRPVGRLVLDRNVDNFFNENEQLAFGPGLVVPGIYYSDDKMLQCRVFAYADTQRYRLGPNYLMLPVNAPRCAHHNNHYDGAMNFMHRDEEVDYYPSRHAPLRQAAPPTPLPPRPVAGRREKATIRKPNDFKQPGERYRSWDADRQDRFVRRFADSLGHPKVSQELRSIWIDLLAKCDASLGMKIATRLNMKPNM

SEQ ID NO: 38819 - protein, 387 aa, Oryza sativa (japonica cultivar-group)
MASEWEMAMGVDLGMGMSTYHNASGGIAAAPMMGHHGGGGGGGGYSAAHHHHHHYYGMPHQAAMGDAMRVDDLLDLSNTPGAHDFFPASAAAAAAGDHGHHHHHHIGGMGEPSGATPSATSSDHQTSMLSFADDFYIPTEDAAELEWLSKFVDDSYSDMPNYQSSAHAAMAAAAASAANNGGGSSAGQDSCLTAAPGRGARSKRSRATAAAAAAWHSLVPRPPSQSSPSSSCSSSDFPSSNKPSGTARPNGSGGGSRGKKSPGPAGAEVGMEAGVRRCTHCASEKTPQWRTGPLGPKTLCNACGVRFKSGRLMPEYRPAASPTFVLTQHSNSHRKVMELRRQKELLIIRGSHRDAAAAAAAAAAAAAAGSAAATGRPELMFRDYGVC

SEQ ID NO: 38820 - protein, 65 aa, Protea laevis
  misc_feature (64)..(64): Xaa can be any naturally occurring amino acid
  unsure (1)..(65): unsure at all Xaa locations
MPGQWEYQVGPSVGIEAGDHIWCSRYLLERITEQAGVVLTLDPKPIEGDWNGAGCHTNYSTKSXR

SEQ ID NO: 38821 - protein, 104 aa, Glycine max
  misc_feature (14)..(14): Xaa can be any naturally occurring amino acid
  misc_feature (69)..(69): Xaa can be any naturally occurring amino acid
  misc_feature (85)..(85): Xaa can be any naturally occurring amino acid
  unsure (1)..(104): unsure at all Xaa locations
GSLEKIARYFEVGXCIISEREYSCYRMDPKLERANIDQNTMGEFVIRGITYTGHYEPVEGMCDILDAFXKETGDDIAIHVDAACXGFIALFTHSEAGKKWHSEL

SEQ ID NO: 38822 - protein, 639 aa, Candida albicans SC5314
MSNPQSIKKTERRRSIALLTKSPLSQSPYISPSPRGSAPSSYVANSQFMRGDTESVAMESTSENSSENQHSPENDPEVDNDIDLASGIDDPELIRKVSKHLPSDFDSLKQEGADITRDLYRIKEDAQRPLLKKSRSCDSIGGNSIKSTASSFNVPGGFRREFLLNQQQHRDERLESLRTTTPNFLTKNFIEFLSIYGHFAGEELEDDENIANHYKYLLPHEQAPLLQDDNFNPRGTATDRKAYFLLLKAFVGTGVLFLPKAFYNGGLSFSIIVLSLFALLSWWCYLILVFTKVATKVSGFAEIGLKLYGPWFQRLILSSIVISQIGFAAAYIVFTSENLRAFTANVSSYDVTDINIVWFILLQVVIIVPLSLIRDITKLSLSAVFANVFILTGLVTIVYFMLYQWLGVNHGYFGKNIEYFFNESEFSLFIGTAIFAFEGIGLIIPIQESMIHPNNFPRVLGQVILTIAVIMIMVGSLGYLTFGDKIKTVVLLNLPQDSPMVIITQLLYSLAILLSTPLQLFPAIRLLESKMIFGSGKSSPSVKWLKNLFRTLFVVFIAYIAYIGGQNLDKFVSFVGCFACIPLVYMYPPILHLKSCCKIHSGLSEKEQNNRFWLSLANYVLLVIGAISFVYTTYEILFT

SEQ ID NO: 38823 - protein, 604 aa, Sinorhizobium meliloti
MPRQEKQTPARRSIRPLATVLPYLSRYRGLAIGAAVSLTIAAATTLTLPLAVRRMIDHGFSNSDSGFINTYFSMLMVLAVVLALASAARYYFVISLGERIVADLRRDVFARVMQLSASFFDVNQSGEIVSRLTADATQIKSAVGATASVALRNLILCLGAMGMMVYTSPKLSSLVLAAIPLIVFPLVGFGRSVRRRSREAQDMLAAASAYAGEAIAATRTVQAFNGEESARSRYGSAVEAAYRAARAATRARSVLTAFAITMVFGSVVAVLWFGARDVLADSLSAGTLGQFLLYSVFAAGSLGALSEVWGELSQAAGAAERLNELLNEVPEIEAPEHPVAMPVPATGAVEFENVHFAYPARPDYKSLRGLSFAVRPGETVAIVGPSGAGKSTVFSMLLRYYDPAKGTIRVDGTDVRAVDPEELRERLAIVPQDVTIFATSVHDNIAFGVPDASREAVRAAAVAAQADEFIGRLDRGYDTLVGERGVTLSGGQRQRIAIARAILKNAPILLLDEATSALDAESETLVQKALDVLMQERTTLVIAHRLATVLKADRILVMEHGRIVEEGTHESLIRQGGLYAKLARLQFDHGAEALFVASPAPISP

SEQ ID NO: 38824 - protein, 449 aa, Pseudomonas fluorescens PfO-1
MNMPENAPSPLASQLKLDAHWMPYTANRNFQRDPRLIVGAEGSWLIDDKGRKVYDSLSGLWTCGAGHTRKEIQEAVAKQLGTLDYSPGFQYGHPLSFQLAEKITDLTPGNLNHVFFTDSGSECADTAVKMVRAYWRLKGQSTKTKMIGRARGYHGVNIAGTSLGGVNGNRKLFGQAMMDVDHLPHTLLASNAFSRGMPEQGGIALADELLKLIELHDASNIAAVFVEPMAGSAGVLVPPQGYLKRLREICDQHNILLVFDEVITGFGRTGTMFGATTFGVTPDLMCIAKQVTNGAIPMGAVIASSEIYQTFMNQPTPEYAVEFPHGYTYSAHPVACAAGLAALDLLQKENLVQSVAEVAPHFENALHGLKGAKNVIDIRNFGLAGAIQIAGRDGDAIVRPFEAGMALWKAGFYVRFGGDTLQFGPTFNSKPQDLDRLFDAVGEVLNKLD

SEQ ID NO: 38825 - protein, 309 aa, Photorhabdus luminescens subsp. laumondii TTO1
MSTAKLAVLGSINADHILNLKSFPRPGETVIGEQYQVAFGGKGANQAVAAGRSGADITFIACVGEDDIGFRICQQLAKDNINTSGIEVIKGETTGVALIFVNHQGENIIGINAGANAALTPEYFYRYQNIIEEADALLIQLESPLETVQLAATIAKQNNTKVILNPAPARKLSDQLLSLVDIITPNETEAEYLTGIKVENDSDAENAAQILHGKGIETVIITLGSRGVWLSESGQKGKIVPGFKVNVVDTVAAGDTFNGALVTALLERKSMLSAIRFAHSAAAIAVTRQGAQPSVPWRNEIDAFLIEQD

SEQ ID NO: 38826 - protein, 87 aa, Pinus taeda
GAICGAGLVKAFQKPYYDRYGGGANVVAHGYTKGVGLAAEIIGTFVLVYTVFSATDPKRSARDSHVPVLAPLPIGFAVFMVHLATIP

SEQ ID NO: 38827 - protein, 411 aa, Anaplasma platys
MKENAVLMCGDKKVSLPMLSGTDGIQLIDITTLYRDHKVLTYDPGFMSTAACSSEITFIDGEKGILRHRGLDIADLIGIKGGFCSVAHLLLYGVLPSDTVFEQFLAAIGAQHALSSDVLGVISSFRRDAHPMAILMACFSTLAAKYHGDNRGNEELAVLAIAQVPSLVAAIYLHRMGLELVSPDPSLSYTGNFVKMMFGALEKTRADAIEEALDAIFIMHADHEQNASTATVRMAGSAGTELFACLAAGTATLWGPAHGGANEAVIRMLESIGSPDKVEEFIGFVKDNNSKVRLMGFGHRVYKSYDPRAKILGQISRSVLDNLGCSDELLGVAEELERCALQDEYFVERKLYPNVDFYSGIVLRAMGVPVEMYTTFFALARTAGWVSQWCELLRGSESLKICRPRQLYAGK

SEQ ID NO: 38828 - protein, 286 aa, Triticum aestivum
  misc_feature (219)..(219): Xaa can be any naturally occurring amino acid
  misc_feature (228)..(228): Xaa can be any naturally occurring amino acid
  misc_feature (241)..(241): Xaa can be any naturally occurring amino acid
  misc_feature (251)..(251): Xaa can be any naturally occurring amino acid
  misc_feature (283)..(283): Xaa can be any naturally occurring amino acid
  unsure (1)..(286): unsure at all Xaa locations
PAGYRYMEDEAEKLMAESFSKNFIDYEEYPQSADIQNRCVNMIGDLFHAPPGSSVGTSTVGSSEAIMLGVLAMKRRWKNRRIAEGKSTEHPNIVMSSAVQVCWEKATRYFEIDEKLVYCTPDRFVMDPEQAVDLCDENTIGMCAILGTTYTGEYEDIKAINDLLVERNLDVPIHVDAASGGFVAPFVVPDLEWDFRCEKVVSINVSGHKYGLVYPGGGXVIWRSPEFXPQELVFNINYLGXDQSSFTLTFXKGASQVIGQYYQLIRLGKHGYRAIMSNLTRTXDYL

SEQ ID NO: 38829 - protein, 129 aa, Chromobacterium violaceum ATCC 12472
MTIEKTDAEWRAQLTSEQYRVARQAGTERPFSGEHYFHNKKGDYFCVCCGTLLFHSDTKFDAGCGWPSFWAEAAGANIARLTDTTHGMVRVEVRCSHCDAHLGHVFEDGPEPTGERYCINSVCLDFKAE

SEQ ID NO: 38830 - protein, 627 aa, Glycine max
  misc_feature (30)..(30): Xaa can be any naturally occurring amino acid
  misc_feature (46)..(46): Xaa can be any naturally occurring amino acid
  unsure (1)..(627): unsure at all Xaa locations
SSSRIGSRGSRLVLDHDLELRSSDGRKFEXLHLGDYEWETYGEVFXRVSNLASGLLKLGHIGDSRLPPFSDTRAEWLIALQGCFRQNVTVVTIYASLGEDALIHSLNETEVSTLICDSKQLKKLDAIRSRLISLQNVIYFEDDNEEDAFSGSSSGWTIASFSEVEKLGKESPVEPSLPSKNAIAVIMYTSGSTGLPKGVMITHGNIVATTAAVMTVIPNLGSKDVYLAYLPLAHVFEMAAESVMLAAGCAIGYGSPLTLTDTSNKVKKGTKGDATVLKPTLMTAVPAILDRIRDGVVKKVEQKGGLVKNLFHFAYKRRLAAVKGSWLGAWGLEKLMWDTIVFKQIRNALGGQLRFMLCGGAPLSGDSQHFINVCMGATIGQAYGLTETFAGAAFSEWDDYSVGRVGPPLPCCYIKLVSWEEGGYLTSDKPMPRGEIVVGGFSVTAGYFKNQEKTNEVFKVDEKGMRWFYTGDIGQFHPDGCLEIIDRKKDIVKLQHGEYISLGKVEAALSSCDYVDNIMVYADPFHNYCVALVVASQQSLEKWAQQAGIDYQDFPDLCNKPETVTEVLQSISKVAKSAKLEKTEIPAKIKLLPDPWTPESGLVTAALKIKREQLKAKFKDDLQKLYA

SEQ ID NO: 38831 - protein, 504 aa, Zea mays
MWKQFLSKLPRRSSASGDSGHCSSGAGIQRTSSCGSIPPGRPPASAIRRMSSAVFPSSVVAGIEPLVSFKDVPSSEKQSLFVSKLSLCCVVFDFSDPDRSSVEKDIKRQALLDLIEFVESTNARFSEAAVVACSRMCAVNLFRAFPASCRSGGSSGVGECDEDEPMFDTGWCHLHLVYELLLKFIGSSSLDAKIGKKHFDHSFIVKLLDLLHSEDPRERDCVKNILHRVYGKFMVHRPFIRRAASNVFYQFVFETDRHNGIAELLEVFGRVIRGFALPLKEEHKTFLWRVLVPLHKPKSLGAYLQQLTYCVTQFIEKDPELASPVIIGLLRYWPITNCQKEVMFLSEIEEILEATSQAEFQKCMAPLFRRIAHCITSAHFQVAERALFMWNNDHIVSLIAQNRQVIMSLVVPALEQNIQNHWNQAVLNLAVNVKKMFSEMDGDHFSSCLARYKEEEERLVSLEAKRKLTWEKLESAAAFQPVTGQTAVLVGHQPSANMIANLIF

SEQ ID NO: 38832 - protein, 476 aa, Lycopersicon esculentum
MDLETSEISNYKSSAVLSKLASNEQHGENSPYFDGWKAYDNDPFHLVNNLNGVIQMGLAENQLSVDLIEEWIKRNPKASICTNDGIESFRRIANFQDYHGLPEFTNAIAKFMEKTRGGKVKFDAKRVVMAGGATGANETLILCLADPGDAFLVPTPYYPGFNRDLRWRSGVQLLPISCKSCNNFKITIEAIEEAYEKGQQANVKIKGLILTNPCNPLGTILDRDTLKKISTFTNEHNIHLVCDEIYAATVFNPPKFVSIAEIINEDNCINKDLVHIVSSLSKDLGFPGFRVGIVYSFNDDVVNCARKMSSFGLVSTQTQHLLAFMLSDDEFVEEFLIESAKRLRERYEKFTRGLEEIGIKCLESNAGVYCWMDLRSLLKEATLDAEMSLWKLIINEVKLNVSPGSSFNCSEVGWFRVCFANIDDQTMEIALARIRMFMDAYNNVNKNGVMKNKHNGRGTTYDLTPQMGSTMKMLLA

SEQ ID NO: 38833 - protein, 372 aa, Escherichia coli
MINYGVVGVGYFGAELARFMNMHDNAKITCVYDPENGENIARELQCINMSSLDALVSSKLVDCVIVATPNYLHKEPVIKAAKNKKHVFCEKPIALSYEDCVDMVKACKEAGVTFMAGHIMNFFNGVQYARKLIKEGVIGEILSCHTKRNGWENKQERLSWKKMKEQSGGHLYHHIHELDCVQHLLGEIPETVTMIGGNLAHSGPGFGNEDDMLFMTLEFPSGKLATLEWGSAFNWPEHYVIINGTKGSIKIDMQETAGSLRIGGQTKHFLVHETQEEDDDRRKGNMTSEMDGAIAYGHPGKKTPLWLASLIRKETLFLHNILCGAKPEEDYIDLLNGEAAMSAIATADAATLSRSQDRKVKISEIIKHTSVM

SEQ ID NO: 38834 - protein, 293 aa, Oryza sativa (japonica cultivar-group)
MAPARAHHLLACLLASALLAAATPVTGGGLMTDQLEVLFGQTQLLNDSNGDQTIALTLDREMGSAFKSKTSYLFARIDMDIKLVADDSAGTVTTIYLISEKDWNTHDEIDLEFLGNVTGQPYTLHTNIFANGEGGREVQYRLWFDPTQDFHTYSVIWNPDEILILVDNMPIRQFKNHLDSGVPFPIYQPMRLFGCLWDADDWATEGGRIKTDWSQAPFVAYFRNYTADGCVPSSYAWVCGQGPASSSDWFDRGLDDVKQQQQLREAQDKYMIYNYCNDPERFPDGYPKECGLQ

SEQ ID NO: 38835 - protein, 720 aa, Arabidopsis thaliana
MEDSGVNPMDSPSKGSDFGVYGIIGGGIVALLVPVLLSVVLNGTKKGKKRGVPIKVGGEEGYTMRHARAPELVDVPWEGAATMPALFEQSCKKYSKDRLLGTREFIDKEFITASDGRKFEKLHLGEYKWQSYGEVFERVCNFASGLVNVGHNVDDRVAIFSDTRAEWFIAFQGCFRQSITVVTIYASLGEEALIYSLNETRVSTLICDSKQLKKLSAIQSSLKTVKNIIYIEEDGVDVASSDVNSMGDITVSSISEVEKLGQKNAVQPILPSKNGVAVIMFTSGSTGLPKGVMITHGNLVATAAGVMKVVPKLDKNDTYIAYLPLAHVFELEAEIVVFTSGSAIGYGSAMTLTDTSNKVKKGTKGDVSALKPTIMTAVPAILDRVREGVLKKVEEKGGMAKTLFDFAYKRRLAAVDGSWFGAWGLEKMLWDALVFKKIRAVLGGHIRFMLVGGAPLSPDSQRFINICMGSPIGQGYGLTETCAGATFSEWDDPAVGRVGPPLPCGYVKLVSWEEGGYRISDKPMPRGEIVVGGNSVTAGYFNNQEKTDEVYKVDEKGTRWFYTGDIGRFHPDGCLEVIDRKKDIVKLQHGEYVSLGKVEAALGSSNYVDNIMVHADPINSYCVALVVPSRGALEKWAEEAGVKHSEFAELCEKGEAVKEVQQSLTKAGKAAKLEKFELPAKIKLLSEPWTPESGLVTAALKIKREQIKSKFKDELSKLYA

SEQ ID NO: 38836 - protein, 169 aa, Streptococcus mutans UA159
MERAIFAGGCFWCMVQPFEEQDGILSVRSGYTGGHVVNPTYEQVCSKMTGHTEAVEIIFDESKISYADLVEIYWRQTDPTDSFGQFEDRGDNYRPVIFYFDEQQRKIAEQSKANLQASGHFNRPIVTTIEAAQPFYEAEKDHQAFYRKNPERYARSSAIRHHFLKENWS

SEQ ID NO: 38837 - protein, 389 aa, Nostoc punctiforme PCC 73102
MKAMILAAGKGTRVRPITYTIPKPMIPILQKPVMEFLLELLRQHGFDQIMVNVSHLAEEIENYFRDGQRFGVQIAYSFEGKIDDDGKLVGEAIGSAGGMRRIQDFSPFFDDTFVVLCGDALIDLDLTAAVKWHRAKGSIATIITKSVPQEEVSSYGVVVTDEEGRVKAFQEKPSTEEALSTNINTGIYIFEPEVFNYIPSDVEYDIGSQLFPKLVEIKAPFYAIPMDFEWVDIGKVPDYWRAIRGVLLGEIKNVQIPGHEVAPGIYTGLNVAVNWDKVDITGPVYIGGMTRIEDGAKIVGPAMIGPNCWICSGATVENSVIFEWSRLGPGVRLVDKLVFGRYCVDKTGAAIDVQAAALDWLITDARQIPPSHTPVERQAIEELLGTNAS

SEQ ID NO: 38838 - protein, 672 aa, Nostoc punctiforme PCC 73102
MGVESTATSDEVVPVPSNGQKSEVKNHKQKKLLPPSTTTGSLPRSWKIEDSEELYRIEGWGQPYFSISAAGHVTVSPKGDRGGSLDLFELVNSMKQRNLGLPMLIRFSDILEDRIERLNACFAKAIARYNYPGVYRGVFPVKCNQERHLIEDLVKFGKPHQFGLEAGSKPELMIALAVLDTPGALLVCNGYKDREYIETAMLAQRLGQTPIIVLEQIEEVDLVIDANRQLGIKPILGVRAKLSTQGMGRWGASSGDRAKFGLTMPEVIEAVDKLREANLLDSLQLMHFHIGSQISAINVIKDAIQEASRIYVELAMLGADMKYLDVGGGLGVDYDGSQTNFYASKNYNMQNYANDIVAELKDTCAERQITVPTLISESGRAIASHQSVLIFDVLSTSDVPLDSPEPPQEGESPIINYLWESYQSINQENYQELYHDAAQFKEEAISRFNLGILRLRERAKAERLYWACCQKILNITRQQEYVPDELEDLEKIMASIYYVNMSVFQSAPDCWAIDQLFPIMPIHRLDEEPIRRGILADLTCDSDGKIDRFIDLRDVKSVLELHTYKPGEPYYLGMFLNGAYQEIMGNLHNLFGDTNAVHIQLTPKGYQIEHVVKGDTMSEVVSYVQYDSEDMVENIRQRCEKALEEKRITLAESQRLLQTYEQSLRRYTYLNS

SEQ ID NO: 38839 - protein, 399 aa, Bacillus cereus ATCC 14579
MGKVKEISKRKLLGIAGLGWLFDAMDVGMLSFVMVALQKDWGLSTQEMGWIGSINSIGMAVGALIFGILSDKIGRKSVFIITLLLFSIGSGLTALTTTLAMFLVLRFLIGMGLGGELPVASTLVSESVEAHERGKIVVLLESFWAGGWLIAALISYFVIPKYGWEVAMVLSAIPALYALYLRWNLPDSPRFQKVEKRPSVIENIKSVWSGEYRKATIMLWILWFCVVFSYYGMFLWLPSVMVLKGFSLIKSFQYVLIMTLAQLPGYFTAAWFIERLGRKFVLVTYLIGTACSAYLFGVADSLTVLIVAGMLLSFFNLGAWGALYAYTPEQYPTVIRGTGAGMAAAFGRIGGILGPLLVGYLVASEASLSLIFTIFCGSILIGVFAVIILGQETKQRELV

SEQ ID NO: 38840 - protein, 149 aa, Nostoc punctiforme PCC 73102
MERTFLAIKPDGVQRGLVGEIIRRFETKGFTLVGLKFLKVSKELAEQHYGVHRERPFFGSLVEFITSSPVVAMVWEGDGVVASARKIIGATNPLTSEPGTIRGDFGINIGRNLIHGSDAPETAQQEIALWFKDEELVNWQPHITPWLHE

SEQ ID NO: 38841 - protein, 292 aa, Glycine max
  misc_feature (127)..(127): Xaa can be any naturally occurring amino acid
  misc_feature (207)..(207): Xaa can be any naturally occurring amino acid
  misc_feature (226)..(226): Xaa can be any naturally occurring amino acid
  misc_feature (237)..(237): Xaa can be any naturally occurring amino acid
  misc_feature (279)..(279): Xaa can be any naturally occurring amino acid
  misc_feature (283)..(283): Xaa can be any naturally occurring amino acid
  misc_feature (288)..(288): Xaa can be any naturally occurring amino acid
  unsure (1)..(292): unsure at all Xaa locations
MASSVLSAASHSVSPSCSLSTTHKGKPMIRDNTSGFHRGPNSFSSSRSRGRISMAVAVNVSRFEGIPMAPPDPILGVSEAFKVDNSDVKLNLGVGAYRTEELQPYVLNVVKKAENLMLERGDNKEYXPGAKVLISAPTWGNHKNIINDASVPWSEYRYYDPKTVGLDFEGMIEDIRSIFEGSFILLHGCAHNPTGIDPTPEQWEKIXDVIQEKNHIPFFDVAYQGXASGSLDEDAAXVRLFVARGMEVLVAQSYSKNLGLYAERIGAINVVSSSPESAXRVKXQLKRXARCL

SEQ ID NO: 38842 - protein, 549 aa, Streptomyces coelicolor A3(2)
MPPKSSTTKHIFVTGGVASSLGKGLTASSLGMLLKARGLRVVMQKLDPYLNVDPGTMNPFQHGEVFVTNDGAETDLDIGHYERFLDRDLDGSANVTTGQVYSTVIAKERRGEYLGDTVQVIPHITNEIKHRIRRMATDEVDVVITEVGGTVGDIESLPFLETVRQVRHEVGRDNVFVVHISLLPYIGPSGELKTKPTQHSVAALRNIGIQPDAIVLRCDREVPTAIKRKISLMCDVDEAAVVACPDARSIYDIPKVIHTEGLDAYVVRRMDLPFRDVDWTTWDDLLDRVHNPEHEIVMALVGKYIDLPDAYLSVTEALRAGGFANKARVKIKWVTSDDCKTPAGARVQLGDVDAICIPGGFGERGVTGKVGAIQYARENGIPLLGLCLGLQCIVVEAARNLAGVADANSTEFDPATAHPVVSTMAEQLDIVAGEGDMGGTMRLGMYPAKLAEGSIVREVYDGKEYVEERHRHRYEVNNAYRAELEKKAGIVFSGTSPDGKLVEYVEYPRDVHPYLVATQAHPELRSRPTRPHPLFAGLVKAAVERKTSK

SEQ ID NO: 38843 - protein, 448 aa, Arabidopsis thaliana
MGSIVEPWAAIAENGNANVTAKGSSRELRHGRTAHNMSSSSLRKKSDLRLVQKVPCKTLKNILSNLQEVILGTKLTLLFLAIPLAILANSYNYGLTPLAERVSFLTEQLAFYTGPTVGGLLNATCGNATELIIAILALANNKVAVVKYSLLGSILSNLLLVLGTSLFFGGIANIRREQRFDRKQADVNFFLLLMGLLCHLLPLLLKYAATGEVSTSMINKMSLTLSRTSSIVMLIAYIAYLIFQLWTHRQLFEAQQDDDDAYDDEVSVEETPVIGFWSGFAWLVGMTIVIALLSEYVVDTIEDASDSWGLSVSFISIILLPIVGNAAEHAGAIIFAFKNKLDISLGVALGSATQISLFVVPLSVIVAWILGIKMDLNFNILETSSLALAIIITAFTLQDGTSHYMKGLVLLLCYVIIAACFFVDQIPQPNDLDVGLQPMNNLGEVFSA

SEQ ID NO: 38844 - protein, 312 aa, Arabidopsis thaliana
MAIAFKSGVFFLQSPKSQIGFRHSSPPDSSLSFKRFTPMASLSTSSPTLGLADTFTQLKKQGKVAFIPYITAGDPDLSTTAEALKVLDACGSDIIELGVPYSDPLADGPVIQAAATRSLERGTNLDSILEMLDKVVPQISCPISLFTYYNPILKRGLGKFMSSIRAVGVQGLVVPDVPLEETEMLRKEALNNDIELVLLTTPTTPTERMKRIVDASEGFIYLVSSIGVTGARSSVSGKVQSLLKDIKEATDKPVAVGFGISKPEHVKQIAGWGADGVIVGSAMVKLLGDAKSPTEGLKELEKLTKSLKSALL

SEQ ID NO: 38845 - protein, 320 aa, Arabidopsis thaliana
  misc_feature (204)..(204): Xaa can be any naturally occurring amino acid
  unsure (1)..(320): unsure at all Xaa locations
MAHATFTSEGQNMESFRLLSGHKIPAVGLGTWRSGSQAAHAVVTAIVEGGYRHIDTAWEYGDQREVGQGIKRAMHAGLERRDLFVTSKLWCTELSPERVRPALQNTLKELQLEYLDLYLIHWPIRLREGASKPPKAGDVLDFDMEGVWREMENLSKDSLVRNIGVCNFTVTKLNKLLGFAELIPAVCQMEMHTGWRNDRILEFXKKNEIHAYSPLGSQEGGRDLIHDQTVDRIAKKLNKTPGQILVKWGLQRGTSVIPKSLNPERIKENIKVFDWVIPEQDFQALNSITDQKRVIDGEDLFVNKTEGPFRSVADLWDHED

SEQ ID NO: 38846 - protein, 288 aa, Beta vulgaris
MTKDVEAVSEQQQPEFSTKDYHDPPPAPLIDMEELKKWSFYRAIIAEFVATLLFLYVTVLTVIGHFRSADLENGGENCTGVGILGIAWAFGGMIFILVYCTAGISGGHINPAVTFGLFLARKVSLIRALAYMVAQCLGAICGVGFVKAFQSAYYDRYGGGANQMAHGYNKGTGLGAEIIGTFVLVYTVFAATDPKRSARDSHVPVLAPLPIGFAVFMVHLATIPITGTGINPARSFGAAVIFNEEKSWNEHWIFWVGPFVGAAIAAFYHQYILRAGAIKALGSFRSSA

SEQ ID NO: 38847 - protein, 308 aa, Ralstonia eutropha JMP134
MSRPLPRYVVFGEALTDMVLQADGNWLGLPGGSCWNVARVGARLGIDTAFAGAVSQDLFGDTLARATEEAGLDMRFLQRVERSPFLAFVASRHPPQYFFVGDDSADLHFEPSRLPQGWREAAEVIHFGSISLVRQPLAGRLCEEATQAAAAGKRIAFDPNYRSLMSAPGYGETLAHMLRLASYVKISDEDLAGLFPALPLDAALAQVRAIAPNATIMLTRGADGLTLLQSDIVVEQPAFRVEVADTVGCGDAAMGGWMASVLSEPRADLAGQARLAAAAAAVAASHAGAYAPLWRELEGLAAMPRGSA

SEQ ID NO: 38848 - protein, 273 aa, Oryza sativa (japonica cultivar-group)
MACALVALVLGLCCVGGARATGRIDEGLEVMWGDGRGSVSPDGQVMALSLDHTSGSGWRSKNTYLFARVDLQIKLVANNSAGTVTTCYFMSEGEWDIHDEVDLEFLGNVTGQPYTLHTNVFANGTGGKEQQFHLWFDPTTDFHTYSIVWTSQHILVLVDGTPIREMKNHADKGIAYPSSQRMRLYGSLWNADDWATQGGRVKTDWSQAPFVARYRNFTATEAASSSSPAGYDQQMDATAQQAMKWARDNYMVYDYCADSKRFPQGFPPECSMP

SEQ ID NO: 38849 - protein, 502 aa, uncultured bacterium 311
MTMNLYTSQETKKLDSLAIRSQKVPAFTLMQKASEFSFNVLLNNWPNTKKVFVFCGKGNNAGDGYLISHLAKEMGLESFIIQASPSNKISGASRKAFKLALESKVKRISIAAFKKKSLKDSVIVDALLGIGIKGNVRSNLSKLILEINKKSTNIPVLSVDIPSGICSNTGINLGVHIQADVTATFVGRKRGCFTSTGRTASGNVVFDDLGISSSLKSQIKTNCYLLDTEKSLLKLKNRKGDAHKGDFGHVLVIGGDKGFGGAAILASKAAVFSGAGLVSLATRSIHVEAALSSCPELMVNGIESGQDVEEILAKSTVVVLGPGLGQSAWSEQMLQRTFMEAKKRNLPVVLDADGLNLLTKLKLKSGIPRKMVITPHPGEAARLVNKEVNKIQEDRFKSVTALEKKFGSVSVLKGSGSLVCYKRGGKQRIGVCEAGNPGMAKGGMGDVLAGLIGSFLSQGLGLVEATEVAVDLHSKSADIASLELGMTITPTDVIRNIRYFLR

SEQ ID NO: 38850 - protein, 155 aa, Oryza sativa
MGATSPAGAGAMAAAAAAAAADGIADPKRVKRILANRQSAQRSRVRKLQYISELERSVTTLQMEVSALSPRVAFLDHQRSLLTVGNSHLKQRIAALAQDKIFKDAHQEALKKEIERLRQVYHQQQIKATGGADIATAASMQAKHELLACEGAAMR

SEQ ID NO: 38851 - protein, 352 aa, Enterococcus avium
MSKTMKGVSKQAPGYDQMAFIDLSVPEATDDKVLIKVAYTGICGSDIHTFKGEYKNPTTPVVLGHEFSGQVVEVGANVPKVKVGDRVTSETTFYVCGECDYCKEKQYNLCPHRKGIGTQQNGSMANYVLAREESIHLLPDHLSYEGAAMSEPLACCVHAMYQKSHLELKDTIIIMGPGPIGLYLLQIAKEIGAFVIMTGITKDAHRLALAKKLGADVIVDTMKEDLAKVVNEITDGYGVDKVYDASGAVPAVNASLPLIRKQGQFIQVGLFANKMVDLDTESIIQREIEYIGSRSQNPYDWPIAIHLLAKGAINIDEMITKKYPLTEWREAFDKVMEGNEIKVMIESNPEEF

SEQ ID NO: 38852 - protein, 443 aa, Saccharophagus degradans 2-40
MGALLGASVQLHAALPASVNGEPLPSLAPMLKQVNPAVVNIATYSTFRQAYNPLLNDPFFRHFFNVPDSYRQQPQTQKRQQSAGSGVIVDAKKGVVLTNYHVVKDADEVQVSLIDGRALIAEVVGSDPELDIAVLRVKADDLTDVKMVNSSLLEVGDFVVAIGNPFGLGQTVTTGIVSALGRTGLGIEGYENFIQTDASINPGNSGGALVNLRGELVGINTAIIAPAGGNVGIGFAIPINMAKASMEQILKHGKVQRGHVAISVQDITPDLREAFALKNGQHGVVVTGVGEGSDAQKAGLQAGDIIVTVDGENINSRGQLSSHLAVKAVGAKVKIGVIRKGKRLDINVPISDPHAALTSGQLHPLLEGARFENNPDGEGVIVAALSPKSYAAYSGLRPGDVVLGANDYQVVNLESFQRALKRNKKQVLLLVARGNRALHIVIR

SEQ ID NO: 38853 - protein, 289 aa, Arabidopsis thaliana
MPIAKPINQNTTVPYPPQHYSKPPLVIILTVILLVVFFIGFFAIYFCKCFYHTLTEAWNHHYHNGLPENQIQAQQEPVQPPVNPGLEPHIIQSYPLFPFSSVKDLREDKYGLECAICLLEFEEEHILLRLLTTCYHVFHQECIDQWLESNKTCPVCRRNLDPNAPENIKELIIEVIQENAHENRDQEQTSTSNEVMLSRQSSGNNERKIETLPDKFSRSKTTGHSIVRNKPEEEDRYTLRLPDHVKIKVTRRHNNNQTESCISFGELVRNREGRFGEVSGQSLVPESGS

SEQ ID NO: 38854 - protein, 376 aa, Streptococcus mutans UA159
MTLDLIKIRRDLHQIPEIGLEEFKTQAYLLERIAEITNGKDFVEQRTWRTGILVFLKGSRPQKTIGWRTDIDALPVVEETGLAFASQHEGRMHACGHDMHMTIALGLLDTMVQVQPKNNLLFLFQPAEENEAGGMLMYEDGAFGNWQPDEFYGLHVRPDFKVGDIATNTSTLFAGTCEVFITFKGKGGHAAFPHNANDALVAASYFITQVQTIVSRNVDPIEGGVVTFGSMHAGTTNNVIAETATLHGTIRTLTQDMSLLIQKRVQEMARGIATSFDLEVDVTLKQGGYLPVENNSQLAKQLMTYFENASAVNLIDCLPAMTGEDFGYLLNKIPGVMFWLGIDTPYALHHPKMSPKEEVLSFAVDNISGFLKTRTN

SEQ ID NO: 38855 - protein, 419 aa, Glycine max
MASHDSISASPTSASDSVFNHLVRAPEDPILGVTVAYNKDPSPVKLNLGVGAYRTEEGKPLVLNVVRRVEQQLINDVSRNKEYIPIVGLADFNKLSAKLIFGADSPAIQDNRVTTVQCLSGTGSLRVGGEFLAKHYHQRTIYLPTPTWGNHPKVFNLAGLSVKTYRYYAPATRGLDFQGLLEDLGSAPSGSIVLLHACAHNPTGVDPTLEQWEQIRQLIRSKALLPFFDSAYQGFASGSLDADAQPVRLFVADGGELLVAQSYAKNLGLYGERVGALSIVCKSADVASRVESQLKLVIRPMYSSPPIHGASIVAAILKDRNLFNDWTIELKAMADRIISMRQELFDALCSRGTPGDWSHIIKQIGMFTFTGLNAEQVSFMTKEFHIYMTSDGRISMAGLSSKTVPLLADAIHAAVTRVV

SEQ ID NO: 38856 - protein, 487 aa, Glycine max
MASQEPQLHFVLFPLMSPGHLLPMTDLATILAQHNIIVTVVTTPHNASRLSETFSRASDSGLNLRLVQLQFPSQDAGFPEGCENFDMLPSMGMGLNFFLAANNFLHEPAEKVFEELTPKPNCIISDVGLAYTAHIATKFNIPRISFYGVSCFCLSWQQKLVTSNLLESIETDSEYFLIPDIPDKIEITKEQTSRPMHENWSEFVDKMAAAEAVTYGVVVNSFEELEPAYAGDFKKIRNDKVWCVGPVSLRNRNQLDKAQRGNKASSDAHSCMKWLDLQKPNSVVYVCLGSICNLIPLQLIELGLALEASEKPFIWVIRERNQTEELNKRINESGFEERTKGVGLLIRGWAPQVLILSHPAIGGFLTHCGWNSTIEAICAGMPMLTWPLFGDQFFNEKFIVQVLRIGVRVGVETPVNWGNEEKSGVLVKKQHVLKAIQVLMDEGNEREERRKRARELAEMAKKAVEGGSSHFNVTQLIQDIMQQSNKD

SEQ ID NO: 38857 - protein, 328 aa, Erwinia carotovora subsp. atroseptica SCRI1043
MTQPLSSDVTKPVYVTILTGFLGAGKTTLLRHILNAEHGYKIAVIENEFGEVPIDNTLIGERASQITTLSNGCICCTKSNELADALLDLVDGVDNGTLDFDHVIIECTGMADPGPVAQTFFSHEVICERFVLDGIITLVDAAHAQQQLNQFTIAQSQIGYADRILLTKTDVASEDETLLPRLQRINARAPIYPVVHGNIDLSVLFNIDGFVLSDKLDVKTPVFRFVAPTQNNVQSIVVYLDDAVELQAVSDVMENLLLQFSDNLLRYKGILAINGDDRRLLFQGVQRLYSADWDREWHADEERKSVLVFIGVDLPEQEIRDAFARLTA

SEQ ID NO: 38858 - protein, 693 aa, Triticum aestivum
  misc_feature (566)..(566): Xaa can be any naturally occurring amino acid
  misc_feature (656)..(656): Xaa can be any naturally occurring amino acid
  unsure (1)..(693): unsure at all Xaa locations
ADQATDLLQKMSLESQPQPKAAADGTELAGATKGPVASQPLSVSIPQDRSITPVVQDFTDPNMFYLPAYYYGGYDGTMSEWDEYTRYVNQDGVEVTPAVYGDIYGYGYAPYGAYSPASSPVPTVDGQMFAAQHYQYPAYYQPPTPISSTTQGDQQHSANADNKPAAKADAAKTTTNVVPNGTAQSNSGTAPLGSSYQNSSLTPDGTYRAPLIGGVPSTGYVDSTYGYDTTGAHYAWYDGSAYTNAQQRPTTANYTPSSAYNSNGSSARYQTKSPTPQQTGNRRPTTTTGSATPTYPNRMYSSTQSYNQYGNSVKTGLITGYGSSGYGGSGYGSNGYDSRLYGRWGVSMDSRYNRPRGRGNGYYGFGNESQDGTIELNRGPRSGRFKNQKAFGHTVTIAVKGQTLPSSENKNASDVPDKAQFNLEDFPVQYDDAKFFVIKSYSEDDIHKSIKYNVWASTTNGNKKLDAAYQEAQAKGSSCPIFLFFSVNTSGQFVGVAEMTGPVDFEKTLEYWQQDKWNGSFSVKWHIVKDVPNNILKHIVLENNEGKPVTNSRDTQDINLEQGIQXMLKIFKEHVSKTSILEDFAFYENRQKLMQEKRIKQQQIQKQVWDSRAPNPVAGEKQQEVANGKPKVSSNGVNGDAKVPAEKAAATAAPPXVTYAAKVAQTAAAEKKPAATEKKPVVANGAVKTGVAA

SEQ ID NO: 38859 - protein, 477 aa, Pseudomonas aeruginosa UCBPP-PA14
MTADKKAKILATLGPATRSRDDIRALVEAGANLFRLNFSHGDYADHAQRFAWVREVEAELNYPIGVLMDLQGPKLRVGRFAAGAVQLQRGQTFTLDLSDAPGDERRVNLPHPEIIHALEPGMSLLLDDGKIRLEVVNGHSDAIETRVAVGGELSDRKGVNVPEAVLQLSPLTDKDRRDLAFGLELGVDWVALSFVQRPEDIDEARGLIGDKAFLMAKIEKPSAVSAIEAIAERADAIMVARGDLGVEVPAESVPGIQKRIVQVCRQLGKPVVVATQMLESMRFSPAPTRAEVTDVATAVGAGADAVMLSAETASGQYPREAVEMMAKIVRQVEAEPDYHVQLEVNRPQPDATVSDAISCAIRRVSRILPVAVLVNYTESGNSTLRAARERPKAPILSLTPNLRTARRLTVAWGVYSVVNEQLAHVDEICSTALDIALAQRMARRGDTVVVTAGVPFGRPGSTNMLRIETVAPPLGDL

SEQ ID NO: 38860 - protein, 488 aa, Kluyveromyces lactis NRRL Y-1140
MVNQDISKLSLNECPGSVIVISNRLPVTIKKDEKTGEYEYSMSSGGLVTALQGLKKSTTFQWYGWPGLEVPDEDKAKVKRELLEKFNAIPIFLSDEVADLHYNGFSNSILWPLFHYHPGEITFDDTAWLAYNEANMAFADEIEGNINDNDVVWVHDYHLMLLPEMIRQRVIAKKLKNIKIGWFLHTPFPSSEIYRILPVRQEILKGVLSCDLIGFHTYDYARHFLSAVQRILNVNTLPNGVEFDGRFVNVGAFPIGIDVETFTEGLKQDAVIKRIKELKESFKGCKIIIGVDRLDYIKGVPQKLHALEVFLGAHPEWIGKVVLVQVAVPSRGDVEEYQYLRSVVNELVGRINGQFGTAEFVPIHFMHRSIPFQELISLYAVSDVCLVSSTRDGMNLVSYEYISCQEEKKGTLILSEFTGAAQSLNGALIVNPWNTDDLAESINEALTVPEEKRAANWEKLYKYISKYTSAFWGENFVHELYRLGSSNN

SEQ ID NO: 38861 - protein, 400 aa, Kluyveromyces lactis NRRL Y-1140
MGQLLSHPLTEKTIIYNDYQTSGHKLSLRHDTHQEVEIPRFYNCVGSMQGYRLTQEDAHLVKTGSESLIVSFHDPFIGKVVKYQISIFAVFDGHGDNNCSNYLAGSLYEHTHPQAHSTTDRILTEHDGLIYFIKLAFESHKYTSFSRPDGNKRQFRTLEGLICQVIKDSFKACDAAFHKHFANEASGSTAIVALLINGSMLYVANTGDSRCILSKKNKAIKPMSYDHKPQHIGELIRINDDGGTVSLGRVGGVLALSRAFGDFQFKRNVKYQNLNTLAVSSKRKYIPAEEAQVTVEPDVLPHAIDLSQDEFLVLACDGIWDVYSNKALVNFIKYHLTLGLKLDNILAKILDHGISCADSNTGVGFDNFTLIVVVLQQPGETLDEWYARIKSRLEREKGLL

SEQ ID NO: 38862 - protein, 568 aa, Candida albicans SC5314
MVLSKHIDALRLESQILKKTPQAQLRKEAFIDAYDSHKNIPQFEIPQNSSNEQLIYKYLSQELALDGIPTLNLASFVNTYVDDTSARLIQDNLTKNLADNDEYPSLIDIQTRCISILSNLWHAPGKVDKVTGNRVTNSIGTATTGSSEAIMLAGLALKKRWQLKRKAEGKSTDNPNILMATCAQVALEKFACYFDVENRLIPVTEESGHLIDVSKIKENIDENTIGIFVIMGSTFTGAFEPVEEISKLLDEVEKERGLDIRIHVDGASGGFVAPFIFPHLKWDFAVPRVDSINTSGHKFGLTSVGLGWVIWKDADLLPKELRFSLDYLGGVEETFGLNFSRPGFPVITQYYNFLSLGRQGYAKIFDGCMTNARLLSRFLEESKYFDVVSVIHHKLSDSEKKAQFTREVDDKKLDSKLYTINEEFKPGLPVVAFRFSKEVRDKYPELPQELLSTLLRKRGYIIPNYHLPPSENDKEILRVVVRNSLSLNLLERLIQDITGATELLIKAADSIADYVSTSGEHTDVENRERIHKLLAAIASGGVAEVKEEKHKKDNHQGSKNKKSYRGTC

SEQ ID NO: 38863 - protein, 391 aa, Arabidopsis thaliana
MASLDSHVLMKLGSLFLSTLFVSIVSSESQCRNFESIISFGDSIADTGNLLGLSDHNNLPMSAFPPYGETFFHHPTGRFSDGRLIIDFIAEFLGLPYVPPYFGSTNGNFEKGVNFAVASATALESSFLEEKGYHCPHNFSLGVQLKIFKQSLPNLCGLPSDCRDMIGNALILMGEIGANDYNFPFFQLRPLDEVKELVPLVISTISSAITELIGMGGRTFLVPGGFPLGCSVAFLTLHQTSNMEEYDPLTGCLKWLNKFGEYHSEQLQEELNRLRKLNPHVNIIYADYYNASLRLGREPRFINRHLSACCGVGGPYNFNLSRSCGSVGVEACSDPSKYVAWDGLHMTEAAHKSMADGLVKGPYAIPPFDWSCLSSMIKKKEVVGNTIFFDE

SEQ ID NO: 38864 - protein, 213 aa, Zea mays
MQIFVKTLTGKTITLEVESSDTIDNVKSKIQDKEGIPPDQQRLIFAGKQLEDGRTLSDYNIQKESTLHLVLRLRGGMQIFVKTLTGKTITLEVESSDTIDNVKSKIQDKEGIPPDQQRLIFAGKQLEDGRTLSDYNIQKESTLHLVLRLRGGMQIFVKTLTGKTITLKVESSDTIDNVKSKIQDKEGIPPDQQRLIFAGKQLEDGRTLSDYTS

SEQ ID NO: 38865 - protein, 157 aa, Candida albicans SC5314
MPVDPEKLAKLQKSSAKKVGGSRVKAKKNIKTEQDDTKLIEALGKLKATKIEGVEEANFFREDGKVLHFNRVGVQGAPASNTFAFTGYPQEKNITQLIPQILPQLGAENLEILRQLAEQIQAGKTPKDFNTGSANAAADAGGEDIPDLVDQKFDDVE

SEQ ID NO: 38866 - protein, 65 aa, Protea restionifolia
  misc_feature (47)..(47): Xaa can be any naturally occurring amino acid
  unsure (1)..(65): unsure at all Xaa locations
MPGQWEYQVGPSVGIEAGDHIWCSRYLLERITEQAGVVLTLDPKPIXGDWNGAGCHTNYSTKSMR

SEQ ID NO: 38867 - protein, 171 aa, Triticum aestivum
MDGSASKGKRKRGRKSKAAADHPSLSPDAPAAVVAENPAPAAAGRRGRKPRRVEVEAPAAADASTPRRGDAKHLANGGDAAMAELGPAGWEEVVRVVPSMDAVVKVFCVHTEPNFSLPWQRKRQYSSSSSGFIIGGRRVLTNAHSVEHFTQVKPKEARGPTPGNLRNRPST

SEQ ID NO: 38868 - protein, 153 aa, Pinus taeda
AVTALPGFLSVASETVGDLESSGKSALHLFGVYDGHGGSEVANFCKERLHGALIEELEAEMREGDRGEDECSWQRQWERAFVACFNKVDAEIGGVEPRNLRCENAAVEVGGRGNDESSARAAPEAAPADAVGSTAVVAVVGSSQIIVSNCGDS

SEQ ID NO: 38869 - protein, 626 aa, Leptospira interrogans serovar lai str. 56601
MNIYKRLLKYSFKYKYRLTLGIVLSFLVSILNGASLTSLIPIFDSLGTGEKTNFEISLTKKDKILLQRLEEKESFTSVESIELKLAQWKIQLNSSLKKMSHDELVLLFCFIVFPVYLLKLIFLAAAVYCINSAGYLAIRDLRSELYAKAQTLPINHFVQEKTGILMSRIINDVEVLGKLISSDLKDAITDFFYIVTHLLLLLYLSWKMFLAVFIVVPIVMGPVSAFADKIRRATRNQQERLSLLNGHLQEVISGIRVIRAFSMEKTEAKRFWEFNQDLSDKTFKGHFYHQVGPSLTELFSSIVAVIFLSFGAYLMEDGTFSRGMFMAFFLTLIFLMRPFKQMSMLSNSIQSAISAGDRVFELLDQETDIRNPANPKFLKKMEKGLSFNNVTYMYPGAKNPAIQEINLEIAKGETIALVGASGAGKSTLVDLVPRLIDPQEGKVLIDGIDLRDLDLSNLRKRIGIVSQQVFLFNGSIRENICYGNQNVTEEQLRTACEQAFAMEFILSFEEGLDTIVGERGVMLSGGQRQRIAIARALLLNPEILILDEATSALDTESERLVQEALESLYKNRTVIIIAHRLSTVQIANRIFTMEDGKIVESGTHTELLQLDGKYKKLYDIQFSENV

SEQ ID NO: 38870 - protein, 65 aa, Protea curvata
  misc_feature (44)..(44): Xaa can be any naturally occurring amino acid
  unsure (1)..(65): unsure at all Xaa locations
MPGQWEYQVGPSVGIEAGDHIWCSRYLLERITEQAGVVLTLDPXPIEGDWNGAGCHTNYSTKSMR

SEQ ID NO: 38871 - protein, 620 aa, Vibrio sp. Ex25
MDHNPQSQLKSLVIKGKEQGYLTYAEVNDHLPAEIVDSEQVEDIIQMINDMGIKVVETAPDADDLALNDDTNITDEDAAEAAAAALSSVESEIGRTTDPVRMYMREMGTVELLTREGEIDIAKRIEEGINQVQSSVAEYPGTIPYILEQFDKVQAEELRLTDLISGFVDPDADDTAAPTATHIGSELTESQLEEEDDEDVDDDEDSDDDSDDSEEDVGIDPELALEKFNQLRSTYQNLQLAINEYGYNSPKATVANEMMLDVFREFRLTPKQFDHLVNELRTAMDRVRTQERLIMKSVVEYGKMPKKSFIALFTGNESSEAWLDEVLASDKPYAEKIKRNEEEIRRSIAKLKMIEEETSLNVQNIKDISRRMSIGEAKARRAKKEMVEANLRLVISIAKKYTNRGLQFLDLIQEGNIGLMKAVDKFEYRRGYKFSTYATWWIRQAITRSIADQARTIRIPVHMIETINKLNRISRQMLQEMGREPLPEELAERMQMPEDKIRKVLKIAKEPISMETPIGDDEDSHLGDFIEDTTLELPLDSATATSLKVATKDVLAGLTPREAKVLRMRFGIDMNTDHTLEEVGKQFDVTRERIRQIEAKALRKLRHPSRSETLRSFLDE

SEQ ID NO: 38872 - protein, 367 aa, Synechococcus elongatus PCC 7942
MSETLVVKIGTSSLTNPHHPGLALSTIAGLVEVICQLRRQGYNVVLVSSGAVGVGCTRLGLRDRPSRIAQRQAIAAVGQGRLMRTYDDLFTTLGQPIAQVLLTRGDLAQRQRYINAYQTFQELFELGVVPIVNENDTVAVEELKFGDNDTLSALVASLVEAQWLFLLTDVDRLYTADPRQDPNAKPITIVHDLSELESIQAGGQGSRWGTGGMATKLTAAKIATQASVRTVITQGRSPENLLKILAGEAIGTWFEPQPETVNARKRWIAHGLVPTGKLLLDAGAVQAIQAGGKSLLAAGIQAIEGDFEAQDAVQLCDLNGTEIARGLVNYDSHELQQIRGCQSDQIVQILGYEGAETIVHRDNLVLS

SEQ ID NO: 38873 - protein, 345 aa, Glycine max
MERYEIIKDIGSGNFGVAKLVKEKWSGELYAIKFIERGFKIDEHVQREIINHRSLKHPNIIRFKELLLTPTHLAIVMEYASGGELFERICSAGRFSEDEARYFFQQLISGVSYCHSMEICHRDLKLENTLLDGSSAPRLKICDFGYSKSSVLHSQPKSTVGTPAYIAPEVLSRREYDGKVADVWSCGVTLYVMLVGAYPFEDPEDPRNFRKTLQRILSVHYSIPDYVRISKECRHLLSRIFVANPEKRITIPEIKMHPWFLKNLPLEFMDEGEGVLQNDDHVNEESSEITQSIEEILAIVQEARKPGEGPKVGEQFVGGSMDLDDIDADADIDDIETSGDFVCAL

SEQ ID NO: 38874 - protein, 501 aa, Magnaporthe grisea 70-15
MPPSISSRSATAHEEEAIETTALLPRQQQQQQHRSRAEYAAWLREIWFLTKACVPVILAYMLQNSLQTISVLIVGRLSPEALSAAAFAYMFAMATAWLIALGGTSALDTLASSSFTRSRDKTSLGLLLQRGFLVLTALYAVVVVVWWFAEDVFRALGQPEEICVMSARFLRLLAPGGLGYVWFECMKKFLQAQAIYRPGTYALMLTSPLNALLNYLLIYKLDMGLDGAPIATGISYWLSFFFLVGYAVFVQGSECWGGFDLRRAATNVGPFARLAALGVVHVGTEWWAFEIVALAAGRLGTLPLAAQSVIMTADQIINTIPFGLGVAESARLGNLLGAGDVRGARRSAHSAAILSVVFGTTLLVVLMAARHRVGALFNDDEQVIALVAEVVPYVALFQIADGLNGSCGGALRGMGRQWVGALVNCVSYYGGALPGGIYLAFNGWGLAGLWMGQCVALSLVGVLEWVIVGMSDWPEEVRRAIDRLRDDEDGNKSVVEEEVVE

SEQ ID NO: 38875 - protein, 145 aa, Oryza sativa
  misc_feature (14)..(14): Xaa can be any naturally occurring amino acid
  misc_feature (47)..(47): Xaa can be any naturally occurring amino acid
  misc_feature (67)..(67): Xaa can be any naturally occurring amino acid
  unsure (1)..(145): unsure at all Xaa locations
RQNPCGMWGHYHKXYELPEACAACGHRPSTSAGTQAAARAEQAAEPXARLGGPLGQPTGLILLGEMXNAAAASELLKTIRFVQILNTGPLCINVYRIRRANHCFEDDTTPQVDDAGDFVEQCEGDNARVVVHCMARKSGSAPFEI

SEQ ID NO: 38876 - protein, 606 aa, Cryptococcus neoformans var. neoformans B-3501A
MSDPNSDLYPIHLLMDELKSEDVVLRLSSIRRLSTIALALGPSRTREELIPFIQYQLDDEDEVLLVLAEELGNFVEYVGGKEYAHVILGPLENLTAVEETLVREKAAESISKISVLLSAQDLEQYFLPIVKRLSTGEWFTSRTSACALFAAPYPNASSSSQEEMRKLFGALCHDDTPMVRRAAAKALGPLAKVVSETSGQHDTIVSELIPMYRKLAGDDQDSVRLLTIPDLIALAAALSDEETKTNLLEPMRASITDKSWRVRYMVANEFVGLAESAGESIIREELVGAFVGLLKDNEAEVRTAASGQVPGFAKLVDKEVILARLLPCVRDLSTDSSQHVRAALAMEISGLAPLLGKDATIEHLLPLFLQLLKDEFSDVRLNLIGKLDMVNEVIGIDRLSQALLPAIMTLAEDKQWRVRQAIIEYIPLLAQQLGVEFFDDKLGSLCMSWLGDTVFSIREAATINLKKLTDVFGVEWAKTTIIPKVLEMGNHQNYLYRMTTIFAITKQTMAPSLNTAIIRDTVLDAALNLANDAIPNIRFNVAKCLETLASVLAQTPEGQELVHRRVVTALRKLQEDQDADVRFFATKAYERTTGDDVRGAEPMILS

SEQ ID NO: 38877 - protein, 321 aa, Oryza sativa (japonica cultivar-group)
MARPLGQQQVGAAAALVIVVACCVVAGCSGARGRGFREEFDVIWGEDHVRVTDEDDAATRQVVALTLDQASGSGFQSKDQFLFGEFSMEMKLVPGESPGTVATFYLTSEGDAHDEIDFEFLGNVSGEPYVMHTNVFAQGRGNREQQFYLWFDPTADFHNYTILWNPLNIIFSVDGKAVRVFKNHEAAGVPYPSGQAMRVHASLWNGDFWATRGGQVKINWTAAPFVASYRTYAYSACAVPAAGGGGGGPCTSGQLPNSTSSPSTCDCGGAWMDRQLGADGERDVAWARANYMIYDYCGDQWRFPQGLPAECSLDQSSGHRT

SEQ ID NO: 38878 - protein, 607 aa, Oryza sativa
MRELRVAVLIIAVSLPSFSASDRQGDALYDMKQKLNVTGNQLSDWNQNQVNPCTWNSVICDNNNNVIQVTLAARGFAGVLSPRIGELKYLTVLSLAGNRISGGIPEQFGNLSSLTSLDLEDNLLVGEIPASLGQLSKLQLLILSDNNFNGSIPDSLAKISSLTDIRLAYNNLSGQIPGPLFQVARYNFSGNHLNCGTNFPHSCSTNMSYQSGSHSSKIGIVLGTVGGVIGLLIVAALFLFCKGRRKSHLREVFVDVAGEDDRRIAFGQLKRFAWRELQIATDNFSERNVLGQGGFGKVYKGVLPDGTKIAVKRLTDYESPGGEAAFLREVELISVAVHRNLLKLIGFCTTQTERLLVYPFMQNLSVAYRLRDFKPGEPVLNWPERKRVAIGTARGLEYLHEHCNPKIIHRDVKAANVLLDEDFEPVVGDFGLAKLVDVQKTSVTTQVRGTMGHIAPEYLSTGKSSERTDVFGYGIMLLELVTGQRAIDFSRLEEEDDVLLLDHVKKLQREGQLGSIVDRNLNQNYDDEEVEMMIQIALLCTQSSPEDRPSMSEVVRMLEGEGLAERWEEWQQVEVTRRQEYERMQRRFDWGEDSVYNQEAIELSGGR

SEQ ID NO: 38879 - protein, 213 aa, uncultured bacterium 311
MSLIDLVNKKSILPSSSEALPGRTEEIEVPSEHFIKGTPLKGPFPQTYEMAIFGMGCFWGVERKFWETDGVYTTAVGYSGGLTPNPTYREVCTGFTGQNETVLVVYDPSKITFEELLIIFWEQHDPTQGMQQGNDVGTQYRSGVYCLSENQKNSALETKDRYQQLLSDKGYGPITTEIVQAGEFYYAEHYHQQYLAKNPDGYCGVDGTGIKLS

SEQ ID NO: 38880 - protein, 538 aa, Chromobacterium violaceum ATCC 12472
MAAKEVRFHDNARERIVNGVNVLADAVKVTLGPKGRNVLLARSFGAPHITKDGVSVAKEIELKDPFENMGAQMVKEVASKTADVAGDGTTTATVLAQAIVQEGMKYVASGMNPMDLKRGIDKAVHAVIKELQTLSKPVTNSKETAQVAALSANSDEAIGKIIADAMDKVGKEGVITVEDGKSLDNELAVVEGMQFDRGYLSPYFITDPEKQTAVLEDPLVLLYDKKISNIRDLLPVLEQVAKAGKPLLIVAEDVEGEALATLVVNSMRGILKVAAVKAPGFGDRRKAMLEDIAILTGGTVIAEETGLTLEKAGLAELGSAKRVEIGKENTTIIDGAGDKAKIDARVQAIRAQIDAATSDYDREKLQERVAKLSGGVAVIRIGAATEVEMKEKKDRVDDALHATRAAVEEGIVAGGGVALLRARAHIKELKGDNPDQDAGIQIVLRALEAPLRAIAANAGDEPSVIVNKVLEGKGNHGYNAASGQFGDLVEMGVIDPTKVTRTALQNAASIASLILTTDATVAEAGQDSKAKAPAELDY

SEQ ID NO: 38881 - protein, 135 aa, Brassica napus
GTGRPYPRPLVQVGPYDNLKDVAMKILQNKVAAVPVIYSSLQDESYPQLLHLASLSGILKCICRYFRHSSSSLPILQQPICSIPLGTWVPRIGESSSKPLATLRPHASLGSALSLLVQAEVSAIPVVDDNDSLID

SEQ ID NO: 38882 - protein, 288 aa, Oryza sativa
MERPAPVRKSHTSTADLLTWPEGAAQELAAGATPPPNRRPHQPSEAISKVVFGGQVTEEEFESLNKRKPCSAPKWKEMTGSGIFAAEGEVEEDESANASATPVRTVSKNYQAISTISHISFAEEESVSPKKPTSIAEVAKQRELSGTLQSEDESKMKRQISNAKSKELSGHDIFAPPEDPRPRNSANGSTSQTPGKNAQVSTITFGEADTDSVVKTAKKIPEKKLTDLTGNDIFKGDAAPGTAEKHLSTAKLKEMTGSDIFADGKAPSRDYLGGIRKPPGGESSIALV

SEQ ID NO: 38883 - protein, 148 aa, Brassica napus
MDPYRVRPSSAHDSPFFTTNSGAPVWNNNSSLTAGTRGPILLEDYHLLEKLANFDRERIPERVVHARGASAKGFFEVTHDITHLTCADFLRGPGVQTPVIVRFSTVIHERGSPETLRDPRGFAVKFYTREGNFDLVGNNFPVFFVRDG

SEQ ID NO: 38884 - protein, 474 aa, Brucella melitensis biovar Abortus
MNWRCLGFAGVVLAFFSLAAGPVAAQDSPATAVRQIPLSRGDMQLSFAPLVKETAPAVVNVYAARQVQARSPFEGDPFFEQFFGSQFGASKPRIQQSLGSGVIVDRSGIIVTNNHVIKDADEIKVALSDGREFESRILLRDETTDLAVLKIEAKQQFPVLALGNSDEVEVGDLVLAIGNPFGVGQTVTSGIVSAQSRTQVGISDFDFFIQTDAAINPGNSGGALIDMRGRLIGINTAIYSRSGGSVGIGFAIPSNMVRAVVDAALQGSTRFERPYIGATFQGITPDLAESLGMEKPYGALITAVVKDGPAETAGLKVGDVVLSVQGVRVDNQDVLGYRLSTAGIGKTISVEVMRNGKNLSLPVKLTKAPKVKQAEPKVIEGDNPFDGAAVGDLTASTAAKLRLKRGQQGVAVFDVYSGCPAARLGLRSGDIIRSINGNQIRTVDDMTAVLEAGRGLAWRLEIERNGALLRQFVR

SEQ ID NO: 38885 - protein, 750 aa, Glycine max
MDAYSSGEEVVVKTRKPYTITKQRERWTEEEHNRFLEALKLHGRAWQRIEEHIGTKTAVQIRSHAQKFFTKLEKEALVKGVPIGQALDIDIPPPRPKRKPNNPYPRKTRIGTTSLHSGAKDGKLNLVESSHVNQALDLKKEPLPEKHDLDEGLTTVKENKDENHAKVFTLLQEVPCSSVSSANESSITMSVPLGNPCAFKEITPSVKEVIARDEKTESFVTVEPENGKLEINDGKQTNGTSKDSRLEDSDALHMKLVQNEKPDGLDCELTIDGMQGNQNYPRHVTVHVVDGNLGTNTQNPSQDMLFRDSMFQPIGGVNGQRNVFTNTAPSNTSESQNNTARSSVHQSFLPYPPFTQHNQDDYQSFLHMSSTFSNLIVSTLMQNPAAHAAASFAATFWPYANPETSANSPRCSQGGFTNRQIGSPPCVAAIAAATVAAATAWWAAHGLLPLCAPLHTSFACPASVTTVPSMNTGEAPALKAEQEKTTLQNPPLQDQMLDPEYSEAQQAQHSASKSPAAILSDSESGDAKLNTSSKVTDHETNKTISEHLDSNKTKGRKPVDRSSCGSNTASSSDVETDALEKGEKGKEEPEIPDANQLAIEFSNRRRSVSNLTDSWKEVSEEGRLAFQALFSREVLPQSFSPPHALKNTDHQMDNANDNKQNIDDKDEDLDGSKKCSSNYEAMQKNLLFVENNEGLLTIGLGQGKLKTHRTGFKPYKRCSMEAKENRVGASSNQGEEQGCKRIRLEGETST

SEQ ID NO: 38886 - protein, 298 aa, Cryptococcus neoformans var. neoformans JEC21
MSLDNYQKIEKVGEGTYGVVYKAKDINTGHIVALKKIRLEAEDEGVPSTSIREISLLKELSKDDNIVKLLDIVHSEAKLYLVFEFLDMDLKKYMDTIGEKDGLGPDMVKKFSYQLVKGLYYCHGHRILHRDLKPQNLLINKSGDLKIGDFGLARAFGIPLRTYTHEVVTLWYRAPEVLLGSRHYSTAIDMWSVGCIVAEMATRQPLFPGDSEIDEIFRIFRVLGTPDEDVWPGVRGLPDYKPTFPQWHPVELADVVKGFEADGLDLIAQTLVYDPAHRISAKRALQHPYFDTVNLSAA

SEQ ID NO: 38887 - protein, 455 aa, Pseudomonas aeruginosa UCBPP-PA14
MSVVTDRRIPDSPVDQRLPLTQLLLVGFQHVLLMYGGAVAVPLIVGQAAGLSREEIAFLINADLLVAGIATLVQSLGIGPMGIRMPVMMGASFAAVGSMVAMAGMPGVGITGIFGATIAAGFFGMLIAPFMSRIVRFFPPLVTGTVITSIGMCLFPVAINWAGGGKGAEDFGSLHFLFLSSLVLCTILLINRFMRGFWVNISVLMGMGLGYAIAGGMGMVDLGGLAERPWFDIVTPLHFGAPTFDLAPILSMCLVVVIIFVESTGMFLALGKITGREITPTELRRGLLCDAGASFFAGFLNTFTHSSFAQNIGLVQMTGVRSRYVTVAAAGFLILLSMLPKAAFLVASIPPAVLGGAGIAMFGMVAASGIQILHEANITDRRNQLLVAVSIGMGMVPVVRPDFFARLPVWMEPITHSGIAMTAIWAVVLNLLFNILSRNDRSHLCGSHAPAPKHS

SEQ ID NO: 38888 - protein, 257 aa, Coelorachis selloana
CELDNIMRLTGITGIVNGMDVSEWDPSKDKYIAVKYDVSTAVEAKALNKEGLQAEVGLPVDRKVPLVAFIGRLEEQKGPDVMAAAIPQLMEEDVQIVLLGTGKKKFECMLMAAEEKDPDKVRAVVKFNAALAHHIMAGADLLAVTSRFEPCGLIQLQGMRYGTPCACASTGGLVDTIIEGKTGFHMGRLSVDCNVVEPADVKKVATTSKRAIKVVGTPAYEEMVKNCMIQDLSWKGPAKNWENVLLSLGVAGGEPGI

SEQ ID NO: 38889 - protein, 361 aa, Lycopersicon esculentum
RLFLLSFLAFALFSSAIAFSDDDPLIRQVVSGNDDNHMLNAEHHFSLFKAKFGKIYASQEEHDHRLKVFKANLHRAKRHQLLDPSAEHGITQFSDLTPSEFRRTYLGLNKPRPNLNAEKAPILPTKDLPSDFDWREKGAVTDVKNQGSCGSCWSFSTTGAVEGAHFLATGELVSLSEQQLVDCDHECDPVEKNDCDAGCNGGLMTTAFEYTLKAGGLQLEKDYPYTGRNGKCHFDKSRIAASVSNFSVVGLDEDQIAANLLKHGPLAVGINAAWMQTYVRGVSCPLICFKRQDHGVLLVGYGSEGFAPIRLKNKPYWIIKNSWGKTWGEHGYYKICRGHHICGVDAMVSTVTATHTTNPNL

SEQ ID NO: 38890 - protein, 666 aa, Bacillus halodurans C-125
MSKHVEQLAVNTIRTLSIDSVEKANSGHPGMPMGAAPMAFCLWTKFMNHNPANPDWVNRDRFVLSAGHGSMLLYSLLHLTGYDLSLEELQNFRQWGSKTPGHPEYGHTPGVEATTGPLGQGVAMAVGMAMAERHLAATYNRDGYNIVDHYTYTICGDGDLMEGVSAEAASLAGHLKLGRMILLYDSNDISLDGDLHHSFSESVEDRFKAYGWHVVRVEDGNNLDEIAKAIEEAKADERPSLIEVKTTIGFGSPNKGGKSVSHGAPLGADEVKLTKEAYEWTYENEFHIPEEVAAYYEQVKQQGAEKEESWNELFAQYKKAYPELASQFELAVHGDLPEGWDAVAPSYEVGKSVATRSSSGEALNAFAKTVPQLFGGSADLASSNKTLIKGEANFSRDDYSGRNVWFGVREFAMGAAMNGMALHGGLKVFGATFFVFSDYLRPAIRLAALMQLPVIYVFTHDSIAVGEDGPTHEPVEQLASLRAMPGLSVIRPADGNESVAAWKLALESKDQPTALVLSRQNLPTLEGAVDRAYDGVSKGAYVLAPANGSADLLLLASGSEVSLAVNAKEALEKEGIHAAVVSMPSWDRFEAQSAEYKEEVLPSDVTARLAIEMGSSLGWAKYVGNQGDVVAIDRFGASAPGERIMEEFGFTVQHVVARAKALLENK

SEQ ID NO: 38891 - protein, 321 aa, Bacillus cereus ATCC 14579
MAVNEKVELATFAGGCFWCMVSPFEEMEGIIKVVSGYTGGHKENPTYKEVCSETTGHYEAVQITFDANKMPYEELLNIYWRQIDPTDIGGQFHDRGQSYETVIFYHNEEQHKKAEASKEELEQSGRFSKPIATKILPAATFYPAEEYHQGYHKKNTFRYELYRKGSGRDAFIKQHWPKDNAHLKEKLNEMQYYVTQENGTEPPFRNEYWNHKEEGLYVDIVSGEPLFTSLDKFDSGCGWPSFTKPVMSASVKEKMDVSHNMTRTEVRSKEGDSHLGHVFPDGPGPNGLRYCINSAALRFIPKEELEKEGYSDFLILFGNKK

SEQ ID NO: 38892 - protein, 506 aa, Thermus aquaticus
MPASSLDELVALCKRRGFIFQSSEIYGGLQGVYDYGPLGVELKNNLKQAWWRRNVYERDDMEGLDASVLTHRLVLHYSGHEATFADPMVDNRITKKRYRLDHLLKEQPEEVLKRLYRAMEVEEENLHALVQAMMQAPERAGGAMTAAGVLDPASGEPGDWTPPRYFNMMFQDLRGPRGGRGLLAYLRPETAQGIFVNFKNVLDATSRKLGFGIAQIGKAFRNEITPRNFIFRVREFEQMEIEYFVRPGEDEYWHRYWVEERLKWWQEMGLSRENLVPYQQPPESSAHYAKATVDILYRFPHGSLELEGIANRTDFDLGSHTKDQEALGITARVLRNEHSTQRLAYRDPETGKWFVPYVIEPSAGVDRGVLALLAEAFTREELPNGEERIVLKLKPQLAPIKVAVIPLVKNRPEITEYAKRLKARLLALGLGRVLYEDTGNIGKAYRRHDEVGTPFAVTVDYDTIGQSKDGTTRLKDTVTVRDRDTMEQIRLHVDELEGFLRERLRW

SEQ ID NO: 38893 - protein, 663 aa, Kluyveromyces lactis NRRL Y-1140
MSVEEVQQAKKAVEFSRESLESVLKRRFFYAPAFELYGGVSGLYDYGPPGCSFQANIVDVWRKHFVLEEDMLEVDCTMLTPYEVLKTSGHVDKFSDWMCKDPKTGEIFRADHLVEEVLEARLKGDKEARGLATDANAEAEADAEKKKRKKKVKEIKAIKLDDAVVQEYEQILAKIDGYSGAELGELMVKYDIGNPVSGDKLEPPRAFNLMFETAIGPSGQYKGYLRPETAQGQFLNFNKLLEFNNGKTPFASASIGKSFRNEISPRSGLLRVREFLMAEIEHFVDPNDKSHKRFQDIKDIKLKFLPREVQQSGSTVPLEKTVGEAVATKLVDNETLGYFIARIYQFLIKIGVDPERLRFRQHMANEMAHYAADCWDAELQTSYGWIECVGCADRSAYDLTVHSNKTKEKLVVREALETPIEVTKWEATLVKKLFGPKFRKDAPKVEARLLAFSQEELESYSAQLKKDGKITLKVEGMEGDVEVDDKMVSIEKVTNTEHIREFVPNVIEPSFGIGRIIYSIFEHSFWSRPEDTARAVLSFPPLVAPTKVLLVPLLNNPELSKITAQVSQILRKEQIPFKVDESGVSIGKRYARNDELGTPFGVTIDFDSVTDGSITLRERDSTKQVRGSVADVIKAIREITYQGVSWEEGTKDLAPFNSQAESE

SEQ ID NO: 38894 - protein, 311 aa, Triticum aestivum
MATHFVLNTGAKIPSVGLGTWQSDPGVVGEAVYAAVKAGYRHIDCARAYNNEKEVGLALKKLFEEGVVKREDLFITSKLWCGHHAPEDVPEALGDSLNDLQLDYLDLYLIHWPFRVKKGTSIGNPENFLPPDIPATWGAMEKLHDAGKARAIGVSNFASKKLGDLLAVARIPPAVDQVECHPGWQQSKLHSFCQSAGVHLSAYSPLGSPGSTWMNGNVLKEPVVLSIAEKLGKTPAQVALRWNIQMGHSVLPKSVSEERIKQNLAVYDWSIPEDLLAKFSEIKQARLLMGNFIVNKDSVYKTHDELWDGEI

SEQ ID NO: 38895 - protein, 487 aa, Ralstonia metallidurans CH34
MIRQTLARSAVGVAALAALAGGYAYLQKDAITPGYAAQTPVTASAGPIAVATPTDFSSIVDQYGPAVVNISVTARAQRTSAQVPQGVDPDDPLFQFFKRFGPQFQGPQNAQPQLVRGLGSGFIVSQDGLILTNAHVVDNATEVTVKLTDRREFKAKVLGSDPQTDIAVIRIDAKNLPTVRLGDPSKTRVGEPVLAIGSPYGFENTVTAGIVSAKSRSLPDDTYVPFIQTDVAVNPGNSGGPLFNQRGEVIGINSQIYSQTGGYQGLSFAIPINVATKVEEQLVAHGKVTRGRLGISVQEVNQALAQSFNLPKPAGALVNSVEPDSPAAKGGVKAGDVIVQLGDDVIDHSGDLPEHVADLKPGTETKLKVIRKGQPMTLTVQVGAVKEDALAQKGNGGQDGGRLGLAVRQLTPAEKRDSGIDGGLVVEDVTGPAARVGIQPGDVILSLNGTPISSAEQLRTLVSKSGKQVALLVQRDDARIFIPLDLG

SEQ ID NO: 38896 - protein, 153 aa, Triticum aestivum
  misc_feature (46)..(46): Xaa can be any naturally occurring amino acid
  misc_feature (58)..(58): Xaa can be any naturally occurring amino acid
  unsure (1)..(153): unsure at all Xaa locations
MAGGCKAAIGCVDARVPVRASYVSLYKWPESDAEFVRSVAMARRHXSTRTAPLPLPPXCYGGGSASMRRGAGVDVGGDSPRVVDSYSCRQMYLRSYTFSTRKETVPERTMACLGRVRERAAVFPSFLPHRGGGGGSDAGSSFGSSSGGGCQYS

SEQ ID NO: 38897 - protein, 458 aa, Kluyveromyces lactis NRRL Y-1140
MGKEKSHVNVVVIGHVDSGKSTTTGHLIYKCGGIDKRTIEKFEKEAAELGKGSFKYAWVLDKLKAERERGITIDIALWKFETPKYQVTVIDAPGHRDFIKNMITGTSQADCAILIIAGGVGEFEAGISKDGQTREHALLAFTLGVRQLIVAVNKMDSVKWDESRFQEIVKETSNFIKKVGYNPKTVPFVPISGWNGDNMIEATTNASWYKGWEKETKSGVVKGKTLLEAIDAIEPPSRPTDKPLRLPLQDVYKIGGIGTVPVGRVETGVIKPGMIVTFAPAGVTTEVKSVEMHHEQLEEGLPGDNVGFNVKNVSVKEIRRGNVCGDSKNDPPKAAASFNATVIVLNHPGQISAGYSPVLDCHTAHIACKFDELLEKNDRRSGKKLEDSPKFLKSGDAALVKFVPSKPMCVEAFSDYPPLGRFAVRDMRQTVAVGVIKSVDKTDKAGKVTKAAVKAGKK

SEQ ID NO: 38898 - protein, 450 aa, Clostridium symbiosum
MSKYVDRVIAEVEKKYADEPEFVQTVEEVLSSLGPVVDAHPEYEEVALLERMVIPERVIEFRVPWEDDNGKVHVNTGYRVQFNGAIGPYKGGLRFAPSVNLSIMKFLGFEQAFKDSLTTLPMGGAKGGSDFDPNGKSDREVMRFCQAFMTELYRHIGPDIDVPAGDLGVGAREIGYMYGQYRKIVGGFYNGVLTGKARSFGGSLVRPEATGYGSVYYVEAVMKHENDTLVGKTVALAGFGNVAWGAAKKLAELGAKAVTLSGPDGYIYDPEGITTEEKINYMLEMRASGRNKVQDYADKFGVQFFPGEKPWGQKVDIIMPCATQNDVDLEQAKKIVANNVKYYIEVANMPTTNEALRFLMQQPNMVVAPSKAVNAGGVLVSGFEMSQNSERLSWTAEEVDSKLHQVMTDIHDGSAAAAERYGLGYNLVAGANIVGFQKIADAMMAQGIAW

SEQ ID NO: 38899 - protein, 65 aa, Protea pityphylla
MPGQWEYQVGSSVGIEAGDHIWCSRYLLERITEQAGVVLTLDPKPIEGDWNGAGCHTNYSTKSMR

SEQ ID NO: 38900 - protein, 65 aa, Protea canaliculata
  misc_feature (5)..(5): Xaa can be any naturally occurring amino acid
  misc_feature (24)..(24): Xaa can be any naturally occurring amino acid
  unsure (1)..(65): unsure at all Xaa locations
MPGQXEYQVGPIVGIEAGDHIWGXRYLLERITEQAGVVLTLDPKPIEGDWNGAGCHTNYSTKSMR

SEQ ID NO: 38901 - protein, 342 aa, Triticum aestivum
MEERYEALKELGTGNFGVARLVRDKRTKELVAVKYIERGKKIDENVQREIINHRSLRHPNIIRFKEVCVTPTHLAIVMEYAAGGELFERICTAGRFSEDEARYFFQQLLSGVSYCHSMEICHRDLKLENTLLDGSPTPRVKICDFGYSKSALLHSKPKSTVGTPAYIAPEVLSRKEYDGKVADVWSCGVTLYVMLIGSYPFEDPEDPRNFRKTISRILGVQYSIPDYVRVSSDCRRLLSQIFTADPSKRITIAEIKKLPWYLKSLPKEIAERDRANFKEPETEAETAAAAAQPVEEIMRIIQEAKAPGDMSKSSADAALLAELAELQSDDEEEEPGAERETY

SEQ ID NO: 38902 - protein, 333 aa, uncultured bacterium 311
MKLDISSLGNAIVDVQFSIEEDFVSKLEKMSIPKGSMTLIEAEEQSNLIKLLMAEYGNSKLSCGGAATNSIVAASNFGSKCHFSCRVKNDDLGIFYLEDLGKNNVLHSNRVSESDLSTGQSVIMVTPDAERTMCTYLGVSNLLSNDDLNKSAIKDSQYLFLEGYLVASESALEACFEASKVAKASGTKIAISLSAEAIINAFRDQMNSLIKQGCDILFCNESEARAFSQCEDVLEAEKSLREVSSQNLITLGKDGSRIWDGSKTETIKGFEAKAIDTNGAGDIFAGSVLHKICEGKDLKTAAKFGCYAASKQVEKFGPRLTESEYRKIKEEFS

SEQ ID NO: 38903 - protein, 329 aa, Arabidopsis thaliana
MTSSNGDNKGLVVSFGEMLIDFVPTESGVSLSESSGFLKAPGGAPANVAIAVSRLGGRAAFVGKLGDDEFGHMLAGILRKNDVDDQGINFDKGARTALAFVTLRSDGEREFMFYRNPSADMLLRPDELNLELIRSAKVFHYGSISLITEPCRSAHMKAMEVAKEAGALLSYDPNLREPLWPSPEEARKQIMSIWDKADIIKVSDVELEFLTGNKTIDDETAMSLWHPNLKLLLVTLGENGCRYYTKDFHGSVETFHVDAVDTTGAGDSFVGALLNQIVDDQSVLEEEERLRKVLRFANACGAITTTKKGAIPALPTDCEALSFLKIQVE

SEQ ID NO: 38904 - protein, 362 aa, Medicago truncatula
MKITIHHHTYMSCSNKRNPILVVVVSCVPKLRFNSNSKNCALFFCCIARCTVASDNTQHNITMVVTTTRISSLLHCTHTFPQHHRDTIITTTTTTLNSRRRKGSLRVSMAAVKEVMVVMEEEEKKKLQLEDQSKWPKSVVDVGCGIGGSSRYLAKKFGANCVGITLSPVQAERANALAAAQGLADKVSFQVADALQQPFPDGQFDLVWSMESGEHMPNKPKFVGELARVAAPGGTIIIVTWCHRDLRPDEESLQQWEKDLLKKICDSFYLPEWCSTADYVKLLETMSLQDIKSADWSPFVAPFWPAVIRSALTWKGFTSILRSGLKTIKGALAMPLMIEGFRKGVIKFAIITCRKPENADGQ

SEQ ID NO: 38905 - protein, 257 aa, Arabidopsis thaliana
MSGLRLDGKIAIITGGASGIGAEAVRLFTDHGAKVVIVDFQEELGQNVAVSVGKDKASFYRCDVTNEKEVENAVKFTVEKYGKLDVLFSNAGVMEQPGSFLDLNLEQFDRTMAVNVRGAAAFIKHAARAMVEKGTRGSIVCTTSVASEIGGPGPHAYTASKHALLGLVKSACGGLGKYGIRVNGVAPYAVATAINSRDEETVRMVEEYSAATGILKGVVLKARHVAEAALFLASDDSAYVSGQNLAVDGGYSVVKPI

SEQ ID NO: 38906 - protein, 367 aa, Vibrio vulnificus YJ016
MTLNKLSPIITCRCLLDSVILLPVIFNQKLSCGATIMTIKVGINGFGRIGRFVFRAAQERADIEVVGINDLIDVDYMAYMLKYDSTHGRFNGTVEVEGGNLIVNGKTVRVTAERNPEDLKWDAIGVDVVAEATGLFLDDATARKHITAGAKKVVLTGPSKDATPMFVMGVNHTSYAGQDIVSNASCTTNCLAPIAKVLNDKFGIESGLMTTVHATTATQKTVDGPSAKDWRGGRGASQNIIPSSTGAAKAVGVVLPELNGKLTGMAFRVPTANVSVVDLTVNLKNGASYEAICAAMKEASEGELKGVLGYTEDAVVSQDFIGEVQTSVFDAKAGIALTDNFVKVVSWYDNEIGYSNKVLDLIAHISK

SEQ ID NO: 38907 - protein, 385 aa, Arabidopsis thaliana
MTTTGSNSNHNHHESNNNNNNPSTRSWGTAVSGQSVSTSSSMGSPSSRSEQTITVVTSASDTTFQRLNNLDIQGDDAGSQGASGVKKKKRGQRAAGPDKTGRGLRQFSMKVCEKVESKGRTTYNEVADELVAEFALPNNDGTSPDQQQYDEKNIRRRVYDALNVLMAMDIISKDKKEIQWRGLPRTSLSDIEELKNERLSLRNRIEKKTAYSQELEEQYVGLQNLIQRNEHLYSSGNAPSGGVALPFILVQTRPHATVEVEISEDMQLVHFDFNSTPFELHDDNFVLKTMKFCDQPPQQPNGQNNSQLVCHNFTPENPNKGPSTGPTPQLDMYETHLQSQQHQQHSQLQIIPMPETNNVTSSADTAPVKSPSLPRIMNSSMKPEN

SEQ ID NO: 38908 - protein, 192 aa, Arabidopsis lyrata subsp. petraea
DVYNPIKNHNPNPNPSPKHLMSSYSCRRSTQSLKDVIETKKTKPKPKKPKSKPDKREPDPVLSPSTRIRSTGARDRDPFLPTLTELAEGHQSRNVVEIIFQTSWGPKPFSGRVEMIFKVQNGSKTLTRFEEYREAVKARSVGKAREENARSVADGNETMRFYCLGPSYGGGGGAWGILGGKGVGASIYTFAG

SEQ ID NO: 38909 - protein, 154 aa, Vibrio vulnificus YJ016
MHKKSSTLIRKREISDVTKESKVVLKSDQQWREQLSEQEYHVCREQGTEPPFSGKLLHNKDSGEYACTCCYAPLFSSVNKYDSGCGWPSFDAPINETAVLYLDDFSHGMKRVEIRCARCDSHLGHVFPDGPKTTGERFCVNSVSLIFNKIETNE

SEQ ID NO: 38910 - protein, 432 aa, Populus alba x Populus tremula
MGTFLYLILFQVLLSLLVCFDSSQSTFDWQTYREHLLSSSQRDKDWLITIRRQIHENPELRFEEHNTSALIRSELDKLAISYTYPLAKTGIVAQIGSGSPPVVALRADMDALPLQELVVWEHKSKVDGKMHGCGHDAHTTMLLGAAELLNERKHLLKGTVRLLFQPAEEGGAGASHMIKDGALGDAEAVFGMHVNYKIPTGTIASLSGPVFAAASHFHVKIEGKGGHAAVPHNAVDPLLAASFAILALQLLISRELDPLQSQVLSITYVRGGTTLNVIPPYFEFGGTLRSLTTESLHQLQRRLKEVVEGQAAVHRCHAHVDMYEKEDVPLYPATVNDEKLNLHVERVSRLLFNPEDFKMGQKVMAAEDFSFYQEVIPGVMLDIGIRNENVGAIHSLHSPYFFLDEDVLSIGASLHTALAEIYLNEHQQSAAQ

SEQ ID NO: 38911 - protein, 371 aa, Cryptococcus neoformans var. neoformans JEC21
MPDLVVTTQELRPSSPVYGHARTIIKNNFVAMAGEYVGTTLFMLCCLGGTHVALLPEKSVTGDLSQPLNTSSLFYISLSIGLSLTVNVWIFFRVSGGLFNPAVSLGMVLAGCLPPMKGALLTVAQVLGGITGAAIINVLLPGELNAGTTLGGGASIAQGLFIEAILTALLMLTVFFTAAEKNEATFLSPLAIGMALFIAEMVGVPYSGGALNPVRSLGPAVVTHNFPGYHWIYWVGPALGSVLATCFYSLLKYLEYESVPGPGEAPHVPPFWRLPARGYLSTLSHPFAKRASTGTYSHEDDPEKGLRSGKDSQANTDNPTRVNRRGSGDAEIQSPVEDTTMANARLDRIEMLLTQLMQVRTSEGTQKSPAV

SEQ ID NO: 38912 - protein, 432 aa, Bacillus cereus ATCC 14579
MNVTTDVQQTTEETKAKRYKTLFGSALGYAAEGLDMLLLSFVLVYILKEFHLSPVEGGNLTLATTIGMLIGSYLFGFIADLFGRIRTMAFTILLFSLATALIYFATDYWQLLILRFLVGMGVGGEFGIGMAIVTETWSKEMRAKATSVVALGWQFGVLIASLLPAFIVPHFGWRAVFLFGLIPALLAVYVRKSLSEPKIWEQKQRYKKELLQKEAAGKLTTTEAEQLKHIKKFPLRKLFANKKVTITTIGLIIMSFIQNFGYYGIFTWMPTILANKYNYTLAKASGWMFISTIGMLIGIAIFGILADKIGRRKTFAIYYIGGTVYCLIYFFLFTDSTLLLWGSALLGFFANGMMGGFGAILAENYPAEARSTAENFIFGTGRGLAGFGPVIIGLLATGGNLLGALSLIFIIYPIGLITMLLCVPETKGKVLD

SEQ ID NO: 38913 - protein, 396 aa, Actinobacillus porcitonsillarum
MFSHIQAAPADPILGLGEAFKAETRAGKINLGIGVYMNDEGKTTIVKAVKESERQLLETEMTKNYLTIDGVAAYNAQTQVLLFGENAEVITSGRAKTAQSLGGTGALRIAAEFIKRNTSAKNVWISAPTWPNHNAIMAAVGLNVKDYRYYDPKTNRLDWDNLIADLSQAEAGDVVLFHGCCHNPTGIDPTPEQWETLAALSAEKGWLPLFDFAYQGLGNGLEEDAYGLRAFAKSHKELLVASSYSKNFGLYNERVGAFTLVAENAEVANRAFTQVKSIIRVLYSNPSAHGASTVATVLANPTLKASWIEELTEMRNRIKEMRNQLVQLLKEKGATQDFSFINEQNGMFSFSGLTPEQVDRLREEFAIYAVRSGRINVAGITSSNIEALAEAIVKVL

SEQ ID NO: 38914 - protein, 629 aa, Zea mays
MFSWNRKQSSSSGSPSPSSSSGRRRGGADASMDSSSRGGGGSGSGSGSRGRSPRLDRRNAVKRVDYEAGAGASVSVAASWSFSSSADQQRSPGPGLQPSRSLDLAPGADLRISGSVEGEVDELCRSLGLSGPEDFAIPVAAWEARKSRSNSDLLPRSHPDPSTPADEPSPIARVVSAPDVQPTRFVPAPIPATVAAPEESPKAVPAVAVAAPVGGLPLPSPRRGGGEVGIRGARPPLLSPPPPIGALAPPPVRRSFVDDDMTRSAWDIVQSFAPREQGSEPGERLDTRCNSDTEEESEAEDGVAAVEGELKELRIGETFEGLTGTSSLSTTNDDDASSTTTEAMFIISPNGKFKRKIKSWMRGALLGSGSFGMVYEGISDEGAFFAVKEVSLLDQGSNAQQSIVALEQEIALLSQFEHENIVQYYGTDKEESKLYIFIELVTQGSLSSLYQKYKLRESQVSAYTRQILNGLVYLHERNVVHRDIKCANILVHANGSVKLADFGLAKEMSKINMLRSCKGSVYWMAPEVINPKKMYGPSADIWSLGCTVLEMLTRQIPFPNIEWTNAFFMIGRGEQPTIPCYLSKEAQDFIGQCVRVDPESRPSASQLLEHPFVNRPLRASFESSSPPAI

SEQ ID NO: 38915 - protein, 259 aa, Listeria monocytogenes str. 4b F2365
MWKLALCQTDVVFKYPDANYARIEKAIVEAAKNGADIAVLPEMWNTGYALNELAGVADLNGERTKEFLATLSEKHQIAIIGGSVSISEGTKFSNTMYAFDKYGGLLSSYKKVHLFQLMNEHLYLEAGNDTNLFRLDGVSCAGFICYDIRFPEWIRKHTSEGSEVIFVSAQWPAERVTQWEQLLIARAIENQAFVVAVNRVGDDPNNHFNGHSLVIDPLGNIVAHGGEDEGNIYAEIDLKLVAETRGIIPVFTDRRPELY

SEQ ID NO: 38916 - protein, 338 aa, Bacillus cereus ATCC 14579
MAILVTGGAGYIGSHTCVELLNSGYEVIVVDNLSNSSVESINRVKEITGKQFKFYKEDVLNREALDAIFEENAIEAVIHFAGFKAVGESVAIPLTYYHNNITSTLVLCEVMQKHNVKKIIFSSSATVYGIPETSPITEEFPLSATNPYGQTKLMIEQIMRDVAFADAEWSIALLRYFNPFGAHESGRIGEDPNGIPNNLMPYVTQVAVGKLKELSVFGNDYPTKDGTGVRDYIHVVDLANGHVKALEKVLSRTGVDAYNLGTGMGYSVLEMVEAFEKVSGKKVPYKITERRPGDVAVCFADASKAKRELGWEATRGLEEMCADSWKWQSNNKNGYLKV

SEQ ID NO: 38917 - protein, 556 aa, Mycobacterium tuberculosis H37Rv
MPDDIAAADPTDTQPHLRRDLANRHIQLIAIGGAIGTGLFMGSGRTISLAGPAVMVVYGIIGFFVFFVLRAMGELLLSNLNYKSFVDFAADLRGPAAGFFVGWSYWFAWVVTGIADLVAITGYARFWWPGLPIWVPALVTVALILAVNLFSVRHFGELEFWFALIKVAAIVCLIAVGAILVATNFVSPHGVHATIENLWNDNGFFPTGFLGVVSGFQIAFFAYIGVELVGTAAAETADPRRTLPRAINAVPLRVAVFYIGALLAILAVVPWRQFASGESPFVTMFSLAGLAAAASVVNFVVVTAAASSANSGFFSTGRMLFGLADEGHAPAAFHQLNRGGVPAPALLLTAPLLLTSIPLLYAGRSVIGAFTLVTTVSSLLFMFVWAMIIISYLVYRRRHPQRHTDSVYKMPGGVVMCWAVLVFFAFVIWTLTTETETATALAWFPLWFVLLAVGWLVTQRRQSRRSFGFHCQVVGVRQQLGRGMARLAMKIHARPKLRSAVVVEPVSAGEPGARRSAKSVRKLASDDSQSAHCPVAVVGLADGGRDPQYHHDGPDR

SEQ ID NO: 38918 - protein, 411 aa, Streptococcus mutans UA159
MDSGSIAFIIICSALVFLMTPGLAFFYGGLGRRKNVINTMMMAVVPLALASLLWVVVGYSLSFSGVGKVFGDFSHVFLNGVKEGASSRGLTIPDTLFSGFQMMFSIITVAILTGAVAGRMRFTPLVIFIIFWLLLVYYPFAHMVWDDGLLAKWGTLDFAGGDVVHITSGVSGLVLALVVGKRRDYDRLEYRPHNIPFVLLGAGLLWFGWFGFNAGSALAANGLAVHALLTTHISAAAAMFSWLLLEKYLNGKPSLVGGSTGLVAGLVAITPGAGFVPLWSSLLIGLMVSPLCYFAIAVLKSKFGYDDALDAFGCHGIGGIFGGIVTGLFTTPHLALDKSNIGLIYGNARLFLVILAAILFTIIWSALISFLIIKVISLFMPIRVSDREEATGLDDKEHGETAYPTFMGLDS

SEQ ID NO: 38919 - protein, 469 aa, Arabidopsis thaliana
MGLLSKKASCNTHGQDSSYFWGWEEYEKNPYDEIKNPDGIIQMGLAENQLSFDLIESWLAKNPDAANFQREGQSIFRELALFQDYHGLPSFKNAMADFMSENRGNRVSFNPNKLVLTAGATPANETLMFCLADPGDAFLLPTPYYPGFDRDLKWRTGAEIVPIQCKSANGFRITKVALEEAYEQAQKLNLKVKGVLITNPSNPLGTTTTRTELNHLLDFISRKKIHLISDEIYSGTVFTNPGFISVMEVLKDRKLENTDVFDRVHIVYSLSKDLGLPGFRVGVIYSNDDFVVSAATKMSSFGLISSQTQYLLSALLSDKTFTKNYLEENQIRLKNRHKKLVSGLEAAGIECLKSNAGLFCWVDMRHLLKSNTFEAEIELWKKIVYEVKLNISPGSSCHCNEPGWFRVCFANLSEETLKVALDRLKRFVDGPSPTRRSQSEHQRLKNLRKMKVSNWVFRLSFHDREPEER

SEQ ID NO: 38920 - protein, 610 aa, Listeria monocytogenes str. 4b F2365
MHKMRFFQSVQFKLVIMYLLLIIVAMQVIGAYFVRELEGQLEKNFQDSITNSITLLDYNAREEIIKNSDNSVKLQNDIRELLVDYSRASSNLIEVRIVDDKGKILGTSNLNNQGIVGQKSNDPLVKRTLSLGTTSEDKIYKDESNKNNRVWVNVSSIKNKGQVIGAIYLVADIESVYKQVDDITNIFITGTLIAMIITAVLGILLSRTITKPIIEMKRQAYAMARGNYSRKVKVYGVDEIGELADSFNTLTKRVQEAQAMTEGERRKLSSVLAYMTDGVIATDRRGKVILINTPAEKMLRVKHESANGRSIIDVLDIGDTYQFEDLMEVDGSLTMDRSTLDKPYVLRANFSVIQRETGFNNGVIAVLHDITDQEKVDQERRDFVSNVSHELRTPLTSMHSYLEALSDGAWEDKEIAPRFLEVTQNETERMIRLVNDLLKLSRMDGGREQLEKSFVNFTDFFNHIIDRFEMMKKETIMFKRHIPREPVIIEIDEDKVMQVLDNIISNANKYSPDGGRISFYLKKFEDEIEVSIADEGLGVPDEDLANVFDRFFRVDKARSREMGGTGLGLAIAREVIEAHGGRIWAERNKTKGTIIKFTLPYSDLPEDDWE

SEQ ID NO: 38921 - protein, 320 aa, Glycine max; identical to SEQ ID NO: 1026

SEQ ID NO: 38922 - protein, 399 aa, Zea mays
MAAAGTIPGAAAAIGASVSQRQRRVGAPSFVAAYVSEGTRLVCRRQLRPAPVLASSFISLSHPARRRFLCDAAAGASSGPAGEAKPQGFAERYPALVTGFFFFLWYFLNVIFNILNKKIFDYFPYPYFVSVSHLFIGVLYCLIGWSFGIPKRAPINSTLLKQLVPVAVCHAIGHVTSTVSFAAVAVSFAHTIKALEPFFNAAASQFILGQPVPLTLWLSLVPVVIGVSVASLTELSFNWTGFINAMISNISFTYRSIYSKKAMTDMDSTNLYAYISIIALFVCIPPAIIIEGPQLVQHGFKDAIAKVGLTKLISNFFVVGLFYHLYNQVATNTLERVAPLTHAIGNVLKRVFVIGFSIIAFGNKITTQTGIGTSIAVSGVALYSFIKAKIEEKKQIKSA

SEQ ID NO: 38923 - protein, 341 aa, Zea mays
MAAFSSSNGVPPGFRFHPTDEELLLYYLKKKVGFEKFELEVIREVDLNKIEPWELQETCRIGSAPQNEWYFFSHKDRKYPTGSRTNRATTAGFWKATGRDKCIRTSYRKIGMRKTLVFYRGRAPHGQKTDWIMHEYRLEDADDDAQGGTSEDGWVVCRVFKKKCFFKIGGGEGSTTSSQGADAGGHLATMSPPLGGHHDQQARAALAYMHPHPYYHHAASYYSQMQTPGPHATAYSHHVQVQDLLTNHRPTDDDGAGTGYDFSGLHVEHQPGGGLDVGSSDGVATDDGGQLAGERRDQTTGTAADHQWQAMDGFSNGGSAEVQQMTGAQRGGEMDLWGYGR

SEQ ID NO: 38924 - protein, 94 aa, Cannabis sativa
RPLSAVPLVALAGFGLYELGCPGVAKCVEIGLPQLVLLVFVSQYLPHLFHSGKHIFDRFAVLFTVVIVWIYAHLLTVGGAYNDSAPKTQMSCRT

SEQ ID NO: 38925 - protein, 63 aa, Protea glabra
MPGQWEYQVGPSVGIEAGDHIWCSRYLLERITEQAGVVLTLDPKPIEGDWNGAGCHTNYSTKS

SEQ ID NO: 38926 - protein, 339 aa, Azoarcus sp. EbN1
MGVVLVTGGAGYIGSHTCVELLQSGHDVVVVDNLCNSKSEALARVEQIAGRRLAGFHEIDVRESDGLKAVFGAYRVDAVIHFAALKAVGESVREPLEYYDNNIGGTIALTRAMAEAGVYRLVFSSSATVYGDPRSMPIAESAPAAPTNPYGRTKWMTEQVLSDVAASDPRWQVVLLRYFNPVGAHRSGRIGEDPHGIPNNLMPYISQVAVGRLPQLQVFGGDYATPDGTGVRDYIHVVDLARGHVQAVERIEGLPGVTCLNLGTGRGYSVLEVIRSFEAASGRRVPYRIVDRRPGDIAACWADAGRAEKVLGWKPEHDLDAMCRDAWRWQTGNPEGYPG

SEQ ID NO: 38927 - protein, 600 aa, Pseudomonas syringae pv. tomato
MTTPESSATSSVKIYFRLLSYVRPYVGIFLLSILGFVIFASTQPMLAGILKYFVDGLSNPEAVLFPNVPYLRELQLLQAVPLLIVLIAAWQGLGSFLGNYFLAKVSLGLVHDLRVELFNKLLVLPNRYFDTTNSGHLISRITFNVTMVTGAATDAIKVVIREGLTVVFLFIYLLMMNWKLTLVMLAILPLIAVMVSSASKKFRKQSKKIQVAMGDVTHVASETIQGYRVVRSFGGEAYEQNRFAEASDSNTRKQLRMTKTGAIYTPMLQLVIYSAMAVLMFLVLFLRGDATAGDLVAYITAAGLLPKPIRQLSEVSSTIQKGVAGAESIFEQLDVEEEVDTGTIELDRVSGHLEVKNLSFFYPQTERQVLNDISFSAAPGQMIALVGRSGSGKSTLANLIPRFYGHEMGNILLDGVEINDYRLRNLRKHIAQVNQNVTLFNDSIANNIAYGDLAGAPRADIEAAAADAYAKEFIDQLPQGFDTQVGENGVLLSGGQRQRLAIARALLKNAPLLILDEATSALDTESERHIQAALDHVMKGRTTLVIAHRLSTIEKADMILVMDAGKIVERGTHTELLAQNGYYARLHAMGLDEPAPAGAV

SEQ ID NO: 38928 - protein, 174 aa, Arabidopsis lyrata subsp. petraea
EEKKIKKVVDVGCGIGGSSRYLASKFRAECIGITLSPVQAKRANDLAAAQSLSHKVSFQVADALDQPFEDGKFDLVWSMESGEHMPDKAKFVKELVRVGAPGGRIIIVTWCHRNLSTGEKALQPWEQNILDKICKTFYLPAWCSTDDYVKLLQSHSLQDIKCADWSENVAPFWP

SEQ ID NO: 38929 - protein, 619 aa, Candida tropicalis
MSEQNQGQPDQQHSGDHQHHHHHHHHHHHSQQPAQPIPIDPNVNPANRIGRYQIIKTLGEGSFGKVKLAQHVGTGQKVALKIINRKTLAKSDMQGRVEREISYLRLLRHPHIIKLYDVIKSKDEIIMVIEFAGKELFDYIVQRGKMPEDEARRFFQQIIAAVEYCHRHKIVHRDLKPENLLLDDQLNVKIADFGLSNIMTDGNFLKTSCGSPNYAAPEVISGKLYAGPEVDVWSSGVILYVMLCGRLPFDDEFIPALFKKISNGVYTLPNYLSPGAKHLLTRMLVVNPLNRITIHEIMEDEWFKQDMPDYLLPPDLSKIKTSKIDIDEDVISALSVTMGYDRDEIISVIEKANREAAAGGATPTNQSKSTNEVLDAYLLMKENHTLVKDLKKSKSENIESFLSLSPPPSSSFPNPGSTSSAPGVQQSLTYQTLATVPDLSTLPNSTIAILPTSLPSIHRAYMMETKVNDPQQQIPAPQPTKKLKTRWHFGIRSRSYPLDVMGEIYRALKNLGAEWAKPTEEELWTIRVRWKYDSTPQLRVWQRTNLMKMQIQLFQLEPNNYLVDFKFDGWEQTSDESKNDASLDYKQQDLDEVGSFSAYPFLHLATRLIMELAVNSQSG

SEQ ID NO: 38930 - protein, 409 aa, Debaryomyces hansenii CBS767
MSKIEVITENVNNGHTGELQTIQYTQSQMVGHGSFGVVFETQILPSNEIAAIKRVLQDKRFKNRELQIMKLVHHRNIVDLKYYFYTNNDKSELYLNLILEFVPETLYKASHYYVSKRLSMPLLEVKLYTYQMLRALNYIHSQGICHRDIKPQNLLINPETGELKLCDFGSAKILNPAEPNVSYICSRYYRAPELIFGATNYTTKIDVWSAGCVMAELILGQPLFPGELGIDQLVEIIKILGTPSKDQIKNMNPNYMEHKFPQIKPIPLQKIFKKMSNDCIQFLIKVLQYSPHERISCITALADPYFNELRNQTTKLPNYRKLFSKQYHQNSTGGNLNHHNNANYQLFNNQPDIRDLPQLFDFDDRELSVDPLLNHILIPEFALDSLKLSSGDLQSFRPLTSEELKVTLD

SEQ ID NO: 38931 - protein, 533 aa, Pseudomonas aeruginosa UCBPP-PA14
MKLLAFRRLLRIQRVVIRYRLDDLILELPMLPWWLRLLGATLPWRWLPRRKLELTRGARLRLALQDLGPIFIKFGQILSTRRDLLPDDIANELAWLQDKVPPFPPELAVKRIEEQLGAKIEQVFARFEREPLASASVAQVHAARLKSGEEVVVKVIRPNLEPVIRSDIAWLFILARLAERVSSEARRLHPVEVVSDYEKTIVDELDLLREAANASQLRRNFEGSPLLYVPQVYWDWCRPKVLVMERIYGIPVTDLETLRDQRTDFKALAERGVEIFFTQVFRDSFFHADMHPGNIFVSTRAPWSPQYIAVDCGIVGSLTDEDQDYLARNLIAFFKRDYRKVAQLHIDSGWVPAETKVNDFEAAIRTVCEPIFEKPLKDISFGQVLLRLFQTARRFNMEIQPQLVLLQKTLLNIEGLGRQLYPELDLWATAQPFLERWMRERVSPKQLLRNFQQQVEQVPHLSQMARDTLERLSQPHAHNAPPPEWKGSRHDWLGRLVGAVLLVGAAEVGLGQQLEAWPAWVMLAGGVFLILRR

SEQ ID NO: 38932 - protein, 312 aa, Vibrio vulnificus YJ016
MMSIPLIYHPIYSRLPLPEGHRYPIMKYHHLYQAVCRYQQQHLEWQQAFAFYQPEALSIEAIKQVHQQEYVDLLTTGLLPAAKMRRIGFPWSEQLIERTLTSTAGTVLTAEKALQHGVAIHLSGGYHHAHFDYGSGFCLFNDLVMAAHKALEHASVDKVLIIDSDVHHGDGTATLCQRRDDIVTLSFHCDKNFPARKPDSDLDIGLPRECGDEAFLAAFKEVVPMAIRLHQPDLIIYDAGVDIHHEDELGYLNVSTDALYQRDAFLFGQAKASAIPVAAVVGGGYRTDHEALVPLHLQLLNAAFDVYRSTPD

SEQ ID NO: 38933 - protein, 190 aa, Arabidopsis lyrata subsp. petraea
HFLSFLLIPIMAIVAVELLRMGPEEILNVWNSLQFDLVQVLCSSFFVIFISTVYFMSKPRTIYLVDYSCYKPPVTCRVPFATFMEHSRLNLKDNPKSVEFQMRILERSGLGEETCLPPAIHYIPPTPTMDAARSEAQMVIFTAMDDLFKKTGLKPKDVDILIVNCSLFSPTPSLSAMVINKYKLRSNIKS

SEQ ID NO: 38934 - protein, 666 aa, Arabidopsis thaliana
MTSQKRFIFEVEAAKEATDGNPSVGPVYRSTFAQNGFPNPIDGIQSCWDIFRTAVEKYPNNRMLGRREISNGKAGKYVWKTYKEVYDIVIKLGNSLRSCGIKEGEKCGIYGINCCEWIISMEACNAHGLYCVPLYDTLGAGAVEFIISHAEVSIAFVEEKKIPELFKTCPNSTKYMKTVVSFGGVKPEQKEEAEKLGLVIHSWDEFLKLGEGKQYELPIKKPSDICTIMYTSGTTGDPKGVMISNESIVTITTGVMHFLGNVNASLSEKDVYISYLPLAHVFDRAIEECIIQVGGSIGFWRGDVKLLIEDLGELKPSIFCAVPRVLDRVYTGLQQKLSGGGFFKKKVFDVAFSYKFGNMKKGQSHVAASPFCDKLVFNKVKQGLGGNVRIILSGAAPLASHIESFLRVVACCNVLQGYGLTESCAGTFATFPDELDMLGTVGPPVPNVDIRLESVPEMNYDALGSTPRGEICIRGKTLFSGYYKREDLTKEVFIDGWLHTGDVGEWQPNGSMKIIDRKKNIFKLAQGEYVAVENLENVYSQVEVIESIWVYGNSFESFLVAIANPAQQTLERWAVENGVNGDFNSICQNAKAKAFILGELVKTAKENKLKGFEIIKDVHLEPVAFDMERDLLTPTYKKKRPQLLKYYQNVIHEMYKTTKESLASGQ

SEQ ID NO: 38935 - protein, 328 aa, Corynebacterium glutamicum
MNSPQNVSTKKVTVTGAAGQISYSLLWRIANGEVFGTDTPVELKLLEIPQALGGAEGVAMELLDSAFPLLRNITITADANEAFDGANAAFLVGAKPRGKGEERADLLANNGKIFGPQGKAINDNAADDIRVLVVGNPANTNALIASAAAPDVPASRFNAMMRLDHNRAISQLATKLGRGSAEFNNIVVWGNHSATQFPDITYATVGGEKVTDLVDHDWYVEEFIPRVANRGAEIIEVRGKSSAASAASSAIDHMRDWVQGTEAWSSAAIPSTGGYGIPEGIFVGLPTVSRNGEWEIVEGLEISDFQRARIDANAQELQAEREAVRDLL

SEQ ID NO: 38936 - protein, 479 aa, Lactobacillus sakei subsp. sakei 23K
MTNQLTTNEGQPWADNQHSQTAGQRGPVLIQDYQLLEKLAHFNRERIPERVVHAKGAGAKGYFKVTKDMSAYTKAAVFSGVGKKTPLITRFSQVAGEAGYPDTYRDVRGFAVKFYTEEGNYDIVGNNTPVFFVNDPLKFPDFIHSQKRDPRTHARSQDMQWDFWSLSPESVHQVTILMSDRGIPASYRMMHGFGSHTFKWVNAQGEQFWVKYHFKTNQGVHNLSNELADELAGKDTDYLQNDLFDAIETGDYPSWTVAVQLVPYEDGLNYPQDIFDVTKVISQKDYPLIEIGQMVLDENPTNNFEDIEELAFSPANLVPGIEASPDKLLQGRLFGYKDAERYRLGANYEQLPINRPKVPVHNYERDGVMAQKQETGVNYEPNSQDGPTEVPAAKIHSDQLSGTTGNFSTDPDYYSAAGKLYRLLSADEQTRLIENIRMNLGQVTKPEIQIREVKQFYQADPEYGRRAATALNLDLAQFE

SEQ ID NO: 38937 - protein, 298 aa, Burkholderia multivorans
MTFEGRFREHILPDQVHLLNVSFLVPTMRREFGGCAGNIAYALHMLGGDARIMATVGANDADRYLERLDSLGLSKANVRVVPDAHTAQAMITTDLDNNQITAFHPGAMMLSHLNRADEVPGVKLGIVAPDGFDGMVQHAEQFAKAGIPFIFDPGQGLPLFDGATLRRIIELATFVAVNDYEGKLVSDKTGWSEQEIASRVQALIITRGEHGSTILHKNGEEQIPVVRAERVVDPTGCGDAFRGGLLYGIENGLVWATTGRLASLMGSLKIAYQGPQTYVLTRAEIYARLEAAFGYSLK

SEQ ID NO: 38938 - protein, 151 aa, Hordeum vulgare subsp. vulgare
MSIVRRSNVLDPFADLWADPLDTFRSIFPAISGGNSETAVRERRMDWKGRRLEAHVFKADLPGVKKEEVKVEVEDGNVLIVSGERTKEKEDKNDKWHRVERRSGKFVRPFRLPEDGKVDEVKAGLENGVLTVTVPKAEVKKPEVKAIEISG

SEQ ID NO: 38939 - protein, 500 aa, Listeria monocytogenes str. 4b F2365
MDEKEKNLNENSENESTPKREVEDTLHTPESAQPVQETPIVEGVTPEGEKFAGATEDAAEASSTNAFFEEASNKEPEPARPAPGPRRAGTTGGGAVPPNRVNNGGSGNGNGEPPKRGKHFIGYFLTALIGVIIGGLIIFFVAWDNGDNADTTSNSNNKATKVEKVSVDTTSDVTKAVDKVQDAVVSVLNYQSSSSLDGTTTSEQEASSGSGVIYKKANGKAYIVTNNHVVADANKLEVTFTNGKKSEAKLLGTDEWNDLAVLEIDDKNVTTVAAFGDSDSLKLGEPAIAIGSPLGTEFSGSVTQGIISGLNRAVPVDTNGDGTEDWEADVIQTDAAINPGNSGGALINIEGQVIGINSMKISMENVEGISFAIPSNTVEPIIEQLETKGEVERPSLGVSLRDVDTIPETQQKNILKLPDSVDYGAMVQQVVSGSAADKAGLKQYDVIVELNGQKVTNSMTLRKILYGNDVKIGDKVKVKYYRDGKEKSTDIKLEAAKTTT

SEQ ID NO: 38940 - protein, 459 aa, Colwellia psychrerythraea 34H
MKKSFTSSKLSIVISAALLSSTLALTSAPALANLPAQVDGHVMPSLAPMLEHATPAVVSISVIGTHNVPQQNVPDAFKFFFGNKEKNQGQPQQRPFRGLGSGVIIDSDEGYVVTNNHVIENADKIMITLKDGRQLEAKKIGSDAKSDIALLQIDSENLSEIKLADSDNLRVGDFTVAIGSPFGLGQTVTSGIVSALGRSNLNIEHYEDFIQTDAAINSGNSGGALVNLRGELIGINTAILGPSGGNVGIGFAIPSNMMHNLITQIIEFGEVHRGILGVSGRSVNSEIAKAMELETSQGGFIEQVMPDSAADEAGIKAGDVIIAVNGKAIKSFFELRAKIGSIGANKKVKLTVIRDGDNKVFTVKLKQDQSADITAASIHTMLDGTKLENDTKKQAIIIEQVAEGSPAQRAGFQAGDIITGVNRSRIKDIAQLRDYLKDKSGVLALNIVRDNHSQYIMIR

SEQ ID NO: 38941 - protein, 391 aa, Bacillus cereus ATCC 14579
MSFIDEENYRMKRAGKKKHKGIVLSSIAGTIVGASLFAFGAPLFSNSADTLPQAEASGSNMAEAQGIKQISFVDAVDRASEAVVGVINIQRDNFSEADSEAGTGSGVIYKKTDGQAYIVTNNHVVAGANRIEVSLSDGKKVPGKVLGTDVVTDLAVLEIDAKHVKKIIEIGDSNTVRRGEPVIAIGNPLGLQFSGTVTQGIISANERIVPVDLDQDGHYDWQVEVLQTDAAINPGNSGGALVNAAGQLIGINSMKIAAKEVEGIGLAIPVTRAVPIMNELEKYGKVRRPYVGIELRSLNEIPNYYWSKTLHLPGTVTEGVCILDVKSPSPGADAGLREHDVIVAVDGKPIRDIIGFRTALYDKEINDKMTLTFYRGTKRVTTTVKLGIQKY

SEQ ID NO: 38942 - protein, 679 aa, Kluyveromyces lactis NRRL Y-1140
MSQYTDIDRLAVSTIRLLAVDQVSAANSGHPGAPLGLAPAAHVIWKQMRLNPKNPEWINRDRFVLSNGHACALLYSLLHLFGYDMSIEDLKHFRHLGSKTPGHPEFELPGVEVTTGPLGQGISNAVGMAIAQANFAATYNKPDYELSDSYTYVFLGDGCLQEGVSSEASSLAGHLRLKNLIAFYDDNQITIDGNINVSFDEDVSKRYEAYGWEVLHVENGNDDLDAISKALEQAKLSDRPTLIKLTTTIGFGSLNAGSHSVHGAPLKADDVKQLKVKFGFNPEESFVVPQEVYDLYNKSTIEPGIEANKQWDALLDAYVGQFPELGAEVKRRLAGEFPEGWESKLPTYTPEDSAVASRKLSEIVLDNVFDTLPELLGGSADLTPSNLTRSKGAVDFQPPITGLGDYSGRYIRYGVREHGMGAIMNGISAFGANYRPYGGTFLNFVSYASGAVRLSALSGHPVIWVATHDSIGLGEDGPTHQPIETLAHFRAIPNLQVWRPADGNEVTAAYKVALTNKHTPAIIALSRQNLPQLQGSSVEKAVKGGYILQDVDQPDLAIVSTGSEVGIAVEAAKVLAEKNIKARIVSLPDFHSFGQQSKEYQLSVFPDGVPILSVEVLATSGWSKYAHQSFGLDRFGASGKGPAVYEKFEFTPQGIATRAEKTVEFYKGKQVISPLNTAF

SEQ ID NO: 38943 - protein, 359 aa, Ustilago maydis 521
MSSFTAVSSSTRPFCLVKSSINIDETFLVPHIVRPGETISSSELVSRPGGKGANVSAAIALAGASVSFSGAVGKDAPWPLDELKARHVMIDGAEILDNTPTGRAFIQIAEDGENSIVLLKGANFATHSRSADPVKSWTSQITHLVLQNEIPLPTTIAFLQHAKSKKVEGHVTTIFNPSPMLTQSQVEQFPWTSIDVLVVNEGESIELLRVLQPDAAKSLESLPEGEDRSTRVLQALSSVEQLQETAWLVLTRGGEGVMANVILSESQTKRSFFNVAPFKPRQVKDTTGAGDTFAGNLVAALMGHNVDADRGLVKSARPTEAKFVEDALKWASKAASLACEKEGAMQSIPSAEEVKARSA

SEQ ID NO: 38944 - protein, 387 aa, Methanothermobacter thermautotrophicus str. Delta H
MEMDETLLMIPGPTRVAQRVLKAMSENIVNHRSALFGRILTETTEMMSDVFRTSNKSYLLTGSGTAAMEAAVANIIEPGDKILNVVGGKFGQRFAQIVEAFGGESITIDVEWGKAVNPDDIGYTLEENDDIKAVTVVHNETSTGVANPIREIGKIMDDYDALYIVDTVSSLGGDEVDVESYGIDICVTGSQKCLAAPPGMAAITLSNDAWRVIEAVDNPRTYYLNLKKYRKSGDAEPPETPYTPAVSLIYAMHEALKVIMEEGLSNRIKRHKIAAEATRNAVKALDLELFPDEAVSSTTVTAVNLPEGVTDGELRGTMRNKYHVELAGGQDHLKGRIFRIGHMGNITHRELITTFSALEMTLRELGFEVEMGEAVAAVADTYLPEDL

SEQ ID NO: 38945 - protein, 583 aa, Staphylococcus aureus subsp. aureus N315
MMSRLNSVVIKLWLTIILIVTTVLILLSIALITFMQYYFTQETENAIREDARRISSLVEQSHNKEEAIKYSQTLIENPGGLMIINNKHRQSTASLSNIKKQMLNEVVNNDHFDDVFDKGKSVTRNVTIKEKGSSQTYILLGYPTKAQKNSHSKYSGVFIYKDLKSIEDTNNAITIITIITAVIFLTITTVFAFFLSSRITKPLRRLRDQATRVSEGDYSYKPSVTTKDEIGQLSQAFNQMSTEIEEHVDALSTSKNIRDSLINSMVEGVLGINESRQIILSNKMANDIMDNIDEDAKAFLLRQIEDTFKSKQTEMRDLEMNARFFVVTTSYIDKIEQGGKSGVVVTVRDMTNEHNLDQMKKDFIANVSHELRTPISLLQGYTESIVDGIVTEPDEIKESLAVVLDESKRLNRLVNELLNVARMDAEGLSVNKEVQPIAALLDKMKIKYRQQADDLGLNMTFNYCKKRVWSYDMDRMDQVLTNLIDNASRYTKPGDEIAITCDENESEDILYIKDTGTGIAPEHLQQVFDRFYKVDAARTRGKQGTGLGLFICKMIIEEHGGSIDVKSELGKGTTFIIKLPKPE

SEQ ID NO: 38946 - protein, 422 aa, Ustilago maydis 521
MGSISEQSSALAVWSAVPQAPEDAIFKLTSSYKSDTYDKKVNLGVGAYRDNNGKPYVLPSVKKAQADLIADESVDHEYLSITGLAEFTSAAAKLILGDDSPAIAEKRVASVQTISGTGANHLGAVFLQRFYQYQAYGVDRQIYISNPTWANHKAIFNTVGIKPIDYPYYDAKTIALDFDGFTNTLRQAKNQSVFLLHACAHNPTGVDPTQEQWKQIADIFVEKGHFAFFDCAYQGFASGDLDRDAWAVRHFVSRKSIPLLICQSFAKNAGLYGERVGALHVVSATPAQSAAVFSQLAAIQRSEISNPPAFGARVVKMILTDPALFQQWQADVKEMAGRIITMRQSLFDLLTKKFQTPGNWDHILKQIGMFTFLGLDTNQCNRLLEEGHIYLTANSRISMAGLTTNNVEYVASWIDKVVREKK

SEQ ID NO: 38947 - protein, 583 aa, Staphylococcus aureus subsp. aureus MRSA252
MMSRLNSVVIKLWLTIILIVTTVLILLSIALITFMQYYFTQETENAIREDARRISSLVEQSHNKEEAIKYSQTLIENPGGLMIINNKHRQSTASLSNIKKQMLNEVVNNDHFDDVFDKGKSVTRNVTIKEKGSSQTYILLGYPTKAQKNSHSKYSGVFIYKDLKSIEDTNNAITIITIITAVIFLTITTVFAFFLSSRITKPLRRLRDQATRVSEGDYSYKPSVTTKDEIGQLSQAFNQMSTEIEEHVDALSTSKNIRDSLINSMVEGVLGINESRQIILSNKMANDIMDNIDEDAKAFLLRQIEDTFKSKQTEMRDLEMNTRFFVVTTSYIDKIEQGGKSGVVVTVRDMTNEHNLDQMKKDFIANVSHELRTPISLLQGYTESIVDGIVTEPDEIKESLAIVLDESKRLNRLVNELLNVARMDAEGLSVNKEVQPIAALLDKMKIKYRQQADDLGLNMTFNYCKKRVWTYDMDRMDQVLTNLIDNASRYTKPGDEIAITCDENESEDILYIKDTGTGIAPEHLQQVFDRFYKVDAARTRGKQGTGLGLFICKMIIEEHGGSIDVKSELGKGTTFIIKLPKPE

SEQ ID NO: 38948 - protein, 424 aa, Triticum aestivum
  misc_feature (151)..(151): Xaa can be any naturally occurring amino acid
  misc_feature (351)..(351): Xaa can be any naturally occurring amino acid
  unsure (1)..(424): unsure at all Xaa locations
MSAFVGKYADELIKTAKYIATPGKGILAADESTGTIGKRLASINVENVESNRQALREMLFTAPGALEYLSGVILFEETLYQTAADGTPFVDILKAGNVIPGIKVDKGTVDIAGTVGETTTQGLDSLGARCAKYYEAGARFAKWRAVLKIGXAPEPSELAVKQNAEGLARYALICQENGLVPIVEPEILTDGPHDIKACAAATERVLAAVYKSLNDHKVLLEGTLLKPNMVTPGSDSPKVGAEVIAEYTVAALRRTVPPAVPGVVFLSGGQSEEQATQNLDAMNKLAVLKPWTLTFSFGRALQQSTIKKWAGKKENVADAQATFLARCKGNSEATLGKYGGAAAGGDAAASXESLHVAGYQVLRHRRSRAIPGPRISVQPVCACARRGTWIAPRFVRACRYICSSFSAVYLNSLSLPLLLFNQNY

SEQ ID NO: 38949 - protein, 63 aa, Protea mucronifolia
MPGQWEYQVGPIVGIEAGDHIWCSRYLLERITEQAGVVLTLDPKPIEGDWNGAGCHTNYSTKS

SEQ ID NO: 38950 - protein, 490 aa, Xanthomonas axonopodis pv. citri str. 306
MPRFPDQLLYIGGRYVPARGGHTLEVVNPATGEVLANVHNAGVDDLDAAVDSAKAGQQRWAALTTVERSRILLRAVALLRERNDALAQLETLNTGKPLSETRSVDVVTGADVLEYYAGVAQALQGAQVPLREGSFFYTRHEPLGVVGAIGAWNYPIQIALWKAAPALAAGNAMIFKPSEVTPLTALKLAEIFTEAGLPDGVFNVLPGDGASVGTALTEHPQIEKISFTGGTATGRKVMASASSSSLKEVTMELGGKSPLIVCADADLDVAADIAMMANFYSSGQVCTNGTRVFVPRALRHAFEARLLARVQRIHIGDPLDERTTFGPLASAAHMQRVLEHIEQGKAEGARLLCGGERLQDGALVQGYYVAPTIFSDCTDVMTIVREEIFGPVLSLLTYDDEDEAVTRANATTYGLAAGVVTPDLARAHRLIHRLEAGICWVNTWGESPAPMPVGGYKQSGVGRENGLATLQAYTRTKSVQIELERYASVF

SEQ ID NO: 38951 - protein, 877 aa, Vibrio sp. Ex25
MNEKYAALKSNVRMLGHLLGNTIRDAHGEEIFEKVETIRKLSKSAQAGNQADRDSLIEEIKHLPDEQLTPVTRAFNQFLNLTNIAEQYHTISRHCEEHICEPDAINSLFSKLVQNDVSKLDTAQAVRDLNIELVLTAHPTEITRRTMINKLVKINECLSKLELSDLSSKERKKTERRLEQLIAQSWHSDVIRQQRPTPLDEAKWGFAVVENSLWEAVPDFLREMHDRLKSYLGEGLPIDARPVHFSSWMGGDRDGNPFVTHSVTREVLLLSRWKAADLYLNDINELISELSMTVSNDQVRELAGEDQHEPYRAILKQLRTLLNETKDILDAKIHGQKLAVKAPLQKVEQLWEPLYACYQSLNECGMGVIANGSLLDTLRRVKAFGIHLVRLDIRQESTRHSDVLSELTRYLGIGDYEQWSEQDKIAFLTNELASKRPLLPRDWEPSEPVKEVLDTCKIIAAQPREAFGAYVISMARTASDVLAVHLLLQEAGCPYRMDVCPLFETLDDLNNAESVIKQLMGIDLYRGFIQNHQMVMIGYSDSAKDAGVMSAGWAQYHAMESLVKVAEEEGVELTLFHGRGGTVGRGGAPAHAALLSQPPKSLKGGLRVTEQGEMIRFKLGLPDVAVNSFNLYASAILEANLLPPPEPKQEWRDLMEVLSEVSCESYRNVVRGEPDFVPYFRQATPELELGKLPLGSRPAKRNPKGGVESLRAIPWIFSWSQNRLVLPAWLGAGEAIQYSIDKGHQALLEEMCREWPFFSTRLGMLEMVYSKCNIDISRYYDERLVDESLRPLGEKLRAQLQEDIKAVLNVENNENLMQHDPWGLESIRLRNIYVEPLNMLQAELLYRTRQTEEASANLEEALMVTIAGIAAGMRNTG

SEQ ID NO: 38952 - protein, 235 aa, Moraxella catarrhalis
NEALLHAGIHNKTKVSIRYISAEALETDSEAMNQITDVDAILVPGGFGERGTLGKMEAIQFARENNKPFLGICLGMQLAVIEYARNVLGIEANSTEFDRKTANPIIGLITEWFDEKGELQTRSDDSDLGGTMRLGAQEAELVSNSKLAEIYGSHNITERHRHRYEMNNRYIEPLENAGMKISGYSAKQHLVESVEIDNHPWFVAVQYHPEFTSSPRGGHPLFNSFIKAAIDVKQA

SEQ ID NO: 38953 - protein, 469 aa, Methanosarcina mazei Go1
MSKNVQKIEKLLIVICMIFIVLPSPALAVTAEENAEAIEGLQTTLTFLWLLIASGLVFFMHAGFSLVETGLTRSKNTANILMKNFMTVVLGILVYWAVGWGVMYGADAAGLIGTDQFFLAGADNATWNSWFFQMVFAATGATIVSGAMAERTNFKAYLVYCVLMVAVIYPIYGHWVWSGADTALLSGADSPIVKAIGVAHHDFAGSGVVHSIGGYSALAGVLLVGARIGKFRDGKAIPIPGHNLTIAFLGTLILALGWLGFNGGSTLNANDPYMNLVVVNTFLAGAVGAVTTMAITWMKTGKPDPSLTANGLLGGLVAVTAPCGSISNWGAIAIGIIAGIIIYAGVMFNENKLKLDDPVGAIAVHGYCGTWGLISVGLFSIGIGNGILADASYAAAVPGLFYGGGVSLLLIQLVAVLITIVWGFGLSFIIFKILDAVIGLRVSEEEEIMGLDICEHGIRAYPEYLMREE

SEQ ID NO: 38954 - protein, 65 aa, Protea intonsa
  misc_feature (12)..(12): Xaa can be any naturally occurring amino acid
  unsure (1)..(65): unsure at all Xaa locations
MPGQWEYQVGPXVGIEAGDHIWCSRYLLERITEQAGVVLTLDPKPIEGDWNGAGCHTNYSTKSMR

SEQ ID NO: 38955 - protein, 185 aa, Oryza sativa
  misc_feature (69)..(69): Xaa can be any naturally occurring amino acid
  misc_feature (99)..(99): Xaa can be any naturally occurring amino acid
  misc_feature (121)..(121): Xaa can be any naturally occurring amino acid
  misc_feature (140)..(140): Xaa can be any naturally occurring amino acid
  misc_feature (151)..(151): Xaa can be any naturally occurring amino acid
  misc_feature (159)..(159): Xaa can be any naturally occurring amino acid
  unsure (1)..(185): unsure at all Xaa locations
TTGSPGLQEFGTSVMASSATTVAPFQGLKSTAGMPVARRSGNSSFGNVSNGGRIMCMHVWPIDGINNFXTLSYLPPLTVEDLLKQIEYLLRSKWVPCLXCTKVGLVYRENDRSAGFYNGWXWTMWKLPMFGCTDSTQVLXELEEAKKALPXDHAVRIIXETTSGRCKLIIFIAYKPPGCEESGGN

SEQ ID NO: 38956 - protein, 414 aa, Synechococcus elongatus PCC 7942
MAAPARAFVYQAYQAANQLARTKPLVRSQALQAIAQAIDSARDDILEANTLDLEACQDSEMPDLLRRWLKLTPERLDRTVEILERLSVRSDPIQQVMRASFQHEHSQAYSQLMPLGVIAFVYEALPELAAIATGLCLRVGNSILLKGGTEAVHTNQAIVSVMQEALESTELPTTSLILLPEDDPATSLAALVTQDQWIDLVIPYGRPELVQQVARLATSPVLRTSMGNCYLYWASGGELETVRWMILDSHASEPDAVNAIEKVLIDRDCNLSKLTVLMDSLRSKGFRLKGDEELVQEMPELELARHEDWSRPYLSRTVAFKLVPGIEAATDWINTHSSGHADSIVTDSYEDSRAFSRELNSAMVHVNASPRFSRSPRHSNEIALGMSNQKGYRRGRITLETLTTIKQVVLGLGQ

SEQ ID NO: 38957 - protein, 65 aa, Protea odorata
MPGQWEYQVGPSVGIEAGDHIWCSRYLLERITEQAGVVLTLDPKPIEGDWNGAGCHTNYSTKSMR

SEQ ID NO: 38958 - protein, 447 aa, Rhodospirillum centenum
MSDEQNTLQGRLARYARVGTAMGGIAARVAGERFLGIRLEREAHAAELRTALGGLKGPLMKVAQILSTIPDALPQEYVSELAQLQADAPSMGWPFVKRRMSAELGPDWASRFQSFEREAASAASLGQVHRAVARDGRRLACKLQYPDMQSAVEADLRQLRVVFGIYARYDTAIRTDQIYGEIGDRLREELDYDLEARHMRLYRDMLAGVEGVHVPEVLPELSSRRLLTMTWLDGRRIIDFKEAPLEVRNRLAMNMFRAWYVPLYYYGVIHGDPHLGNYTVREDHDINLLDFGCVRVFRPAFVAGVIDLYEALRTGDEERAVHAYEAWGFRNLDRRMVDVLNIWARFVYAPILEDRTRSIDETNSGRYGQATAAKVHMALREVGGVEIPREFVFMDRAAIGLGSVFLHLKAEINWYRSFQDLIAGFDAATLAARQTELLARNGVPLPH

SEQ ID NO: 38959 - protein, 113 aa, Rhodothermus marinus
GRRGRSDRTRLGPALDTLEALLDEGAAGTFDLAFIDADKASYDAYYERALQLVRPGGLILLDNLLMGGRVADPSNREPSVEAIRRLNEKLCRDLRVDYALLPLADGLGLARRR

SEQ ID NO: 38960 - protein, 171 aa, Verticillium fungicola
TVEEFWGVYNNVANVSDLAVKSDYHLFKAGVRPEWEDPQNKHGGKWSYQYKDKRNVDVNRLWLQVVMAAIGETLEEEDDGEVMGVVVNVRKAFYRIGVWTRTIGKSIPGRGDGDVAGGKGRSNEKGKDILLSIGRRFKEILELPNSEQVEFSGHTDSAHAGSTRAKAKHVV

SEQ ID NO: 38961 - protein, 173 aa, Agaricus bisporus
TVEEFWGLYNNIVPPSQLPQKANYYLFKEGIIPAWEDEANKYGGKWSIQLPKDKNRANVDKMWLYTMLAAIGEMFDPTPDNAEGPLSQSLITGVIVSIRPQFYRISIWTRLAPAPTEEDRLRERIETVGRYFKMNVLGYAEGARLAGPLATEVEFLSHKDSEKKGKSAKKIVV

SEQ ID NO: 38962 - protein, 353 aa, Burkholderia fungorum LB400
MEFLRNTWYAAGWSQDLAAGAMLGRTMLNEQLVLFRADDGTVSALSDICPHRFAPLHLGKIVDGCRIQCAYHALEFDGTGACVKNPHGKQKIPAAAKLQAYPVVEKHSLIWVWMGEQAAADPSVIPDFSMLDPDSGFQVSRRDWLHMDASYDLVVDNLMDLSHTAFLHDGILGSKYTIKADTSLEQTGETVKVTRLMPNVPVPGFFDLMFNRDGGIVDYWTEIRWNLPGCLMNNTGVTLPGAPRSEGTGVYGMHFLTPETDVSCWYHFAAVRQNPRTWGEPIDTEIKEKISDLRRYAFEEQDQWIIKAQQQTILRAKGNLQPVSLETDIGIERYKRILKAALVAERSGSTMAA

SEQ ID NO: 38963 - protein, 83 aa, Orchidantha sp. nov. 'serinsim'
CITTKELGTVMRSLGQNPTEAELQDMINEVDADGSGTIDFPEFLNLMARKMKDTDSEEELKEAFRVFDKDQNGFISAAELRLV

SEQ ID NO: 38964 - protein, 100 aa, Rhodothermus marinus
MAKVKIKPLSDRVVIKPEPPEEKTESGLYIPDTAKEKPQRGTVIAVGPGRVENGTKIEMSVKEGDKVLYGKYAGTEITIDGEEYLIMRETDILGIIEEEK

SEQ ID NO: 38965 - protein, 721 aa, Arabidopsis thaliana
MSDELWNAIQHMDLGREEPELYIPYHAYVGALASNRLSLLGRILNPQTQSVERAILELPYQWGLGTQRWEDFPTEDFLTFIDVWVHIRGIPLPYVSERTVEIIASTLGEVVAMDFNEETTSQITFIRVKVRMDFTEPLRFFRRVRFASRERAMIGFEYEKLQRVCTNCCRVNHQVSHCPYVVHQEEMDNEPDVLVSPERYDDEDSLNQEDHGRHSQSSVISSFSSLTPISLNAPPVVNWNDNMIGNIPHRFPSTSVSSSHTVSDGYLAASEWRPKDQVSYEVGESSKRKKGKQVLEVPERSIRQRRMGSGISSKEKPTLGGTRIKTRKRNIAAPLDPAAFSDAVVQIYHDNAGDLELVAKSIESSDLNFTRYGDIFFEVIFIGGRTQPGTVKSDEGERHTYSVIDCEPKREAILPSVVYIQKILRRKPFLIKNLENVTRRFLQSLELFEENERKKLAIFTALAFSQKLSGLPPETVFQPLLKDNLVAKGIVLSFVTDFFKEYLVENSLEDLISILRRGKMEDNLMDFLPPVRRSAESFAEHFTNEGLTDLVEYHSKKMFEVKLREIKTVLTSKVTEESNVDEVIESVKQQIKDAKLPDIEVVRVVWDGLMDAVQWSGKNQQQNANSVLRQVKTWAPLLNTFCTSGKLELELMYKVQMQCYEDAKLMKVFPEVVRSLYELDVLAEDTILHWFRKGTNSKGRQTFVKSLEPFVNWLEEAEEEE

SEQ ID NO: 38966 - protein, 613 aa, Bacillus cereus ATCC 14579
MKKVGFFQSIHLKFVLIYMLLILIAMQVIGVYFVRELEKSLVQGFRDSLTQQTNLLSYNLKQEFKKSYTKAETESTDETIKTSIRKFASDQKKVIQEVSVFDSHRKLLAISDESKQNKVNRTSTDIAVQRVLVQKKPEVKIEKDGSTGHRVQVMLTPILDDNGKDALGVIYIVASMEDVYKQMKDINQIFATGTVIALLVTAVLGILLAQTITRPISDMRRQAIEMAKGNYSRKVKVHSHDEIGQLALSFNNLSKKLQQARSSTESERRKLSSVLSHMTDGVIATDRKGDIILLNDPAEKMLNVSRETALDQSVLEVLGIQEEFTLDHLYEEPDSVLLDFSTRNEPYILRASFSVIQKETGKANGLIAVLYDVTEQERIERERREFVANVSHELRTPLTTMRSYLEALTDGAWQDPNIAPQFLTVTQEETERMIRLVNALLQLSKLDSTEHRLMKEWVDFTDFFNNIIDRFEMSKEQNVSFKRSFSKKSRFIDMDTDKITQVLYNIISNALKYSPEGGTVTYRLRDRGDLLEISVSDQGMGIPKENVDKIFERFYRVDKARSRQMGGTGLGLAIAKEMIEAHGGSIWAKSEEGKGTTIYFTLPMAADEEDDWE

SEQ ID NO: 38967 - protein, 448 aa, Bacillus licheniformis ATCC 14580
MNQSFVEKSKQYLWLPFTQMKDYDENPLIIESGQGIKLKDIDGRVYYDGFSSVWLNVHGHRKKELDEAIKKQLGKIAHSTLLGMTNVPATELAEVLIKITPENLTRVFYSDSGATAMEIALKMAFQYWKNIGKPEKQKFISMKNGYHGDTIGAVSVGAIELFHHVYGPLMFESFKVNVPYVYRSKSGNPDECRDECLAELERLLSERHDEIAALSVESMVQGASGMIVMPEGYLAGVRELCTKYDVLMIVDEVATGFGRTGKMFACEHERVQPDLMAAGKAITGGYLPIAVTFATEEIYEAFYDDYNKLKTFFHGHSYTGNQLGCAVALENLRLFESEKIVAQVAEKSKILESLFHDLAALPHVGDIRQLGFMSGIELVQSKETRQPYPPEERIGYRVSLKMRELGMLTRPLGDVVAFLPPLASTADDLRAMVSIMKEAIQEVTGRAY

SEQ ID NO: 38968 - protein, 98 aa, Oryza sativa (japonica cultivar-group)
MAAAAASSAAWKRWIRPEVYPLFLATGVAVSICVGQLVRNITGNPEVRVLKEKRAAGVLENFDEGKRYSQHGFRKFIDGKRPEIMPGINSFFSDPPKY

SEQ ID NO: 38969 - protein, 320 aa, Burkholderia vietnamiensis G4
MLRRARDPGARGAQRDDAMSGGTFPAFVSAGDILTDMVRAGDAQWTSVPGGAGWNVARAVARLGLPSALAGAIGEDCFSDVLWRASEAAGLDLRFLQRVPRAPLLAIVHETRPPAYFFIGDASADLAFDPARLPQGWAEHVKWAHFGCISLVREPLASTLVALAAQLHARGVKISFDPNYRNLMTAAYRPTLEKMAGLADLIKVSDEDLRHLFGGDGPDAVAAVRALNPRAAVFVTRGAQAATLYAGDDVLEASPPRVEVVDTVGAGDASIGGMLFSLMAAPQRSWREHLAFALAAGAAACRHTGAHAPTLDEVVALLER

SEQ ID NO: 38970 - protein, 771 aa, Thellungiella salsuginea
MVASAFLPELWTEILVPVCAVIGIAFSLFQWFIVSRVRVTADQGASSSSGGSNNGKNGYGDYLIEEEEGLNEQSVVAKCAEIQTAISEGATSFLFTEYKYVGVFMVFFAAIIFVFLGSVEGFSTKNKPCTYDDTKTCKPALATAAFSTVAFVLGAVTSVLSGFLGMKIATYANARTTLEARKGVGKAFIVAFRSGAVMGFLLAASGLLVLYITINVFKIYYGDDWEGLFEAITGYGLGGSSMALFGRVGGGIYTKAADVGADLVGKIERNIPEDDPRNPAVIADNVGDNVGDIAGMGSDLFGSYAEASCAALVVASISSFGINHDFTAMLYPLLISSMGILVCLITTLFATDFFEIKAVKEIEPALKNQLIISTVIMTVGIAIVSWVGLPSSFTIFNFGTQKVVKNWQLFLCVCVGLWAGLIIGFVTEYYTSNAYSPVQDVADSCRTGAATNVIFGLALGYKSVIIPIFAIAASIFVSFSFAAMYGVAVAALGMLSTIATGLAIDAYGPISDNAGGIAEMAGMSHRIRERTDALDAAGNTTAAIGKGFAIGSAALVSLALFGAFVSRAGVHTVDVLTPKVIIGLLVGAMLPYWFSAMTMKSVGSAALKMVEEVRRQFNTIPGLMEGTAKPDYATCVKISTDASIKEMIPPGCLVMLTPLIVGFFFGVETLSGVLAGSLVSGVQIAISASNTGGAWDNAKKYIEAGVSEHAKSLGPKGSEPHKAAVIGDTIGDPLKDTSGPSLNILIKLMAVESLVFAPFFATHGGILFKYL

SEQ ID NO: 38971 - protein, 178 aa, Glycine max
IRLEGGYMEVTGFSAEVREQIYKVASVNLCSNISGQILASLVMSPPKVGDESYDSFMAEKENILASLARRAKTLEDAFNKLEGVTCNKAEGAMYLFPQIRLSEKAIKAAEAANATPDNFYCKRLLNATGVVVVPGSGFGQVPGTWHFRCTILPPEEKIPAIVTRLTEFHEKFMDEFRD

SEQ ID NO: 38972 - protein, 548 aa, Colwellia psychrerythraea 34H
MAAKDVLFGNDARTKMLRGVNVLADAVKVTLGPKGRNVVIDKSFGGPTITKDGVTVAKEIELDDKFENMGAQMVKEVASKANDEAGDGTTTATVLAQAIVNEGLKSIAAGMNPMDLKRGIDKAVIAAVAALKDASTPVTDNKAIEQVGTISANSDETVGQIIATAMDKVGAEGVITVEEGQALTDELDVVEGMQFDRGYLSPYFINKQENGTVELENPFILLVDKKVSNIRELLTTLEAVAKSGKPLLIIAEDVEGEALATLVVNNMRGIVKVAAVKAPGFGDRRKAMLQDVATLTAGTVISEEIGMELEKATLEDLGQAKRVVISKDTTIIIDGIGEEADIKARVSQIRGQIEDSSSDYDKEKLQERLAKLAGGVAVIKIGAATEIEMKEKKARVEDALHATRAAVEEGVVAGGGVALVRAAEAIKDLEGINEDQTHGINVAIRAMEAPLRQIVANCGDEASVVLNEVRNGEGNYGYNAGNSTYGDMIAMGILDPTKVTRSALQFAASVAGLMLTTEAMITDAPQDSAPAMPDMGGMGGMGGMGGMM

SEQ ID NO: 38973 - protein, 245 aa, Glycine max
MVVHVSSTPDEVGLAVSQLIFDLSKQAIATNGRFTVALSGGSLPKILNKGLQTVKNDVDFSKWFVYFADERCVSLDHDDSNYKACKAALFDFISVPESQIYSINASLTPVAMAVDYTKKLAKVWGNNILPRFDLILLGMGPDGHTCSLFPGHPLLEEKTLFVASIEDSPKPPPQRITLTYPVVNNAANVAFVATGAGKADLVPHMVGIEKRTPPLPAASVNPTDGVIYWFIDEDAAIKLSEEARM

SEQ ID NO: 38974 - protein, 220 aa, Trichodesmium erythraeum IMS101
MSSSVLNYNSDLRNYLWSVGIREPEILKKLRIETLKDKSAIMQICPEQGAFMANLVRIMGANKAIEVGIYTGYSSLAVALALPEQGTLVACDVSEEWTAVAKRFWEEAGVAHKIQLYLAPAKETLQAKIDSGESGTFDLMFIDADKTNYEIYYEKGLQLLRKGGLIIIDNVLWSGAVINDQINDQSTVALRNINNLICKDERVDISMLPIGDGITLAVKR

SEQ ID NO: 38975 - protein, 180 aa, Spinacia oleracea
MASSVLSSAAVATVSRTPAQASMVAPFTGLKSTVGFPATKKNDDITSLASNGGRVQCMKVWPTQNMKRYETLSYLPPLTTDQLARQVDYLLNNKWVPCLEFETDHGFVYREHHNSPGYYDGRYWTMWKLPMFGCTDPAQVLNELEECKKEYPNAFIRIIGFDSNRQVQCVSFIAYKPAGY

SEQ ID NO: 38976 - protein, 122 aa, Zea mays
  misc_feature (65)..(65): Xaa can be any naturally occurring amino acid
  unsure (1)..(122): unsure at all Xaa locations
MDSSLASAAAIADQRQKIEQYRHILASVLSSSPPDISQAKRFLDHMVSDEVPLVVSRQLLQTFAXLGKLESDAQKEVAHYALTQIQPRVVSFREQVVVIKEKLAELYESETQWSKQHNGLGD

SEQ ID NO: 38977 - protein, 753 aa, Escherichia coli
MSQHNEKNPHQHQSPLHDSSEAKPGMDSLAPEDGSHRPAAEPTPPGAQPTAPGSLKAPDTRNEKLNSLEDVRKGSENYALTTNQGVRIADDQNSLRAGSRGPTLLEDFILREKITHFDHERIPERIVHARGSAAHGYFQPYKSLSDITKADFLSDPNKITPVFVRFSTVQGGAGSADTVRDIRGFATKFYTEEGIFDLVGNNTPIFFIQDAHKFPDFVHAVKPEPHWAIPQGQSAHDTFWDYVSLQPETLHNVMWAMSDRGIPRSYRTMEGFGIHTFRLINAEGKATFVRFHWKPLAGKASLVWDEAQKLTGRDPDFHRRELWEAIEAGDFPEYELGFQLIPEEDEFKFDFDLLDPTKLIPEELVPVQRVGKMVLNRNPDNFFAENEQAAFQPGHIVPGLDFTNDPLLQGRLFSYTDTQISRLGGPNFHEIPINRPTCPYHNFQRDGMHRMGIDTNPANYEPNSINDNWPRETPPGPKRGGFESYQERVEGNKVRERSPSFGEYYSHPRLFWLSQTPFEQRHIVDGFSFELSKVVRPYIRERVVDQLAHIDLTLAQAVAKNLGIELTDDQLNITPPPDVNGLKKDPSLSLYAIPDGDVKGRVVAILLNDEVRSADLLAILKALKAKGVHAKLLYSRMGEVTADDGTVLPIAATFAGAPSLTVDAVIVPCGNIADIADNGDANYYLMEAYKHLKPIALAGDARKFKATIKIADQGEEGIVEADSADGSFMDELLTLMAAHRVWSRIPKIDKIPA

SEQ ID NO: 38978 - protein, 500 aa, Triticum aestivum
RASPPSESRAPLRAPQRSATRQHQARQGPRRMCNGGRGPPYWTAGVTSAPARQTPLFSGRPSGGLSDPNEVAAVILGGGTGTQLFPLTSTRATPAVPIGGCYRLIDIPMSNCFNSGINKIFVMTQFNSASLNRHIHRTYLGGGINFTDGSVEVLAATQMPGEAAGWFRGTADAWRKIIWVLEDYYKNKSIEHILILSGDQLYRMDYMELVQKHVDDNADITLSCAPVGESRASEYGLVKFDSSGRVVQFSEQPKGDDLEAMKVDTSFLNFAIDDPAKYPYIASMGVYVFKRDVLLNLLKSRYAELHDFGSEILPRALHDHNVQAYVFTDYWEDIGTIRSFFDANRALCEQPPKFEFYDPKTPFFTSPRYLPPTKSDKCRIKEAIILHGCFLRECKIEHTAFSRLNSGSELKNAMMMGADSYETEDEMSRLMSEGKVPIGVGENTKISNCIIDMNARIGRDVVISNKEGVQEADRPEEGYYIRSGIVVIQKNATIKDGTVV

SEQ ID NO: 38979 - protein, 173 aa, Glycine max
MKREREVDSITMANYLMLLSRTTTNLNTSNNRVFECKTCNRRFASFQALGGHRASHKKPRLMGESDSQVLIHGSPPKPKTHECSICGLEFAIGQALGGHMRRHRAAAASNGNMHTTINSWLSSSNSGGSTVDNTLPPNMNNKANNTKRVLFPDLNLTPLENDLEFLKFGHCFN

SEQ ID NO: 38980 - protein, 540 aa, Rhodothermus marinus
MAAKQITFNADARMALKRGVDKLADAVKVTLGPKGRNVIIEKKFGAPTVTKDGVTVAKEIELEDKLENVGAQMVKEVASKTSDVAGDGTTTATVLAQAILTAGLKSVTAGANPMDLKRGIDKAVEVVVAELRKMSQEVQDKNRIAQVATISANGDKAIGQLIADAFEKVGKDGVITVEEAKGTETTLEVVEGMQFDRGYLSPYFVTNPDTMEAVLEDAYILIHDKKISAMKDLLPILEKVVQTGRPLLIIAEDVEGEALATLVVNKLRGVLKVAAVKAPGFGDRRKAMLEDIAILTGGTVISEEKGYRLENATLDYLGQAERIIVDKDNTTIVGGKGDPAQIKARANQIRQQIEETTSDYDREKLQERLAKLAGGVAVLKIGAATEPEMKEKKARVEDALHATRAAVEEGIVPGGGVAYIRAIAALDKVEVENEDQKIGVQIVQRALEEPLRQIAANAGWEGSIVVQRVKEGQGDFGFNAQTEEFGNLLEQGVIDPTKVARTALENAASVAGLLLTTEAVVAEKPEKEKAAAPSPGDMDF

SEQ ID NO: 38981 - protein, 464 aa, Solibacter usitatus Ellin6076
MPYDLIVIGSGPGGYSAAIRAGQYGLKTALIEKQPRLGGTCLLVGCIPTKSLLHTADVWDHFVHAEADGIVAENPRLDFPKVQARKDGIVSKHSKGVEFLLKRAKVERISGYATIKGGGKIEVKTDAGVQTLEARNIIIATGSEARMLPGMQPDPEFILTNIEILNLAAVPKSLIIIGAGAVGVEFASIFKRFGTDVTVIEMLPRIVPVEDEDISKELERVFKKQKIRVETGARAENIQKTGTGVKLTLTTKDGKQEQLEAEKLLVAVGRKPNTDAIGLENTKVQLDRGFIKVDQYQQTGEPGVYAIGDVVAGTPQLAHVATREGMIAVAHMAGKPAVPINKNRIPGATYTTPGIGSVGLTEAQARAQGYQVKVGKFPFAGDSRATILGQHEGFIKVVADEKYGEILGVHIIGPDGFELIAEAVAAMEAEATVDVMMQTIHAHPTLYEAVGEAFNAVYGLSINA

SEQ ID NO: 38982 - protein, 598 aa, Thermobifida fusca YX
MREYTTPAVKELDPDTRLTDTVFTRAAQEPNAVMFRRLVDGAWRDVTCAEFHRDVMGVAKALIAAGINHGDRVALMSRTRYEWTVIDYAIWTIGGVTVPIFDTSSEEQVEWILRDSGSTLAFVENDEHAERVRAVSAQLLEPDRIVQIESDSFPAFVATGADVADSVVEERRAATGLDDLATLIYTSGTTGRPKGCELTQRNLAFDVMSVNSGPMKDVFTMEGRSTLLFLPLAHSLARIIQVGCVETKTVMGHFPSTGPDLLDALASFRPMFLLAVPRVFEKVYNKAEQKAIASGKGDIFRKAAETAIAYSKALDTGKVSLGLRLKRAVFSLLVYRKILAAVGGQAKYAVSGGSALGERLGHFFRGIGLTVLEGYGLTETSAPTTANAPDTNKIGTVGRPIPGTSIRIADDGEILVKGDNVMRGYWNNPKATKEAFTEDGWYRSGDIGELDEEGFLRITGRKKEIIVTAGGKNVAPAVIEDRIRSHAIVSQCMVVGDNRKFVAALITIDPEAFEFWKKQHNKTGTIAELVDDPDLRATVQKAVDDGNKAVSRAESVRKFAILPVDFSEAEGHMTASLKLKRHVIEKQFSAEIEALYAE

SEQ ID NO: 38983 - protein, 605 aa, Mucor racemosus
MADFTDSLIKNIGVHSSSPVMTSVNMGQLGEKLRQARTTTLASLSQALSKKPEAAAAAATAPNAVNESTTTPTTMQLPASEKATSQLEINVVEARNLTIADARKADTYCIVHYEGNTTSTLDKVDDGILPSTPLVIKSQVASGAFKAFEIMMSASSPKWMHRVNFDVTAGNKEITVFVYDRGNKLPNGEDRFLGMSSIVPNLVNKKTVELIFPLHGRPDDDQEVTGDVRLQVTFIDPKKANLKPEDFRIVRMIGQGSVGKVYEVIKRDSGRTYAMKVLSKRLLLAENEVDTAFNERNVLVQSLSSPFIANLKYSFQTTNHLFLVMDYFPGGELFDFLERERCLSEKRCQFFAAEIVCAFDNIHARNIVYRNLKPESILLDAHGHIALTDFGLCKQLKNKMDLIQGVPQVITQEYLAPEMVMQKPYGMAADWWSLGVLMFELLTGSPPFHSVEQGELFRQILEAPIKFPAGGCITEEAKDFICQLLERDPAKRLGSHGDVAQVKAHPFFKDLNWDVVYKKQMQLPFVPEVEEQLREEAIAAAAAISIPVTNSKTESTNANVMPVADQSKFKGFSYIREDVMAKKGEHRLGVNPEDEDPEVDFWFRQ

SEQ ID NO: 38984 - protein, 223 aa, uncultured bacterium 313
MKAFQSIKYWIFDLDNTLYSGKTKVFEQVEKKMSKYVSDKLNVNIDEAKKIQKNYFHEYNTTLNGMIKNHKIDANEFLEFVHDIDIEFLKKDLKLSEELKKLDGKKIIFTNGPRKHAINVTQKIGIDQHFDDIFDIIDSNFVPKPAMEPYKKLVEKHKIDPNLCVFVEDIARNLKPAYEIGMKTVWIENEVPWAKKFSDANFINYKTNNLSEFLKKINLLKAA

SEQ ID NO: 38985 - protein, 436 aa, Debaryomyces hansenii CBS767
MAQQQSESNNLKKIFNKLSGQPSSYSRKSLYTFGKTLGAGSFGIVRYARNNETNEEVAVKIILKKALKGKVETITDELNLLQELLHPNIVGFRDWFESKDKFYIVTQLATGGELFDRIIEKGRFTEFDASLVIVAMLEAIKYLHNKNIVHRDLKPENILYLTPADNSNVVLADFGIAKRLESPDEKLTSSAGSFGYAAPEVILGTGHGKPCDIWSLGVITYTLLCGYSPFRSENVSDFIEEVKHNNAVIFHADYWKDVSKDARRFIIKALQFDPNNRPDAETLLNDKWLVSIASEHKELDLLPNLKENFNAKQKFKQAIEMVKLNNKIKKLKELQGDDDDDPNEINLFGDEGALISSDVSSKQGAGSEGGLGSWKALSSALNSIDDRSSAASVSSTSAPKKKSDLASDAFVQLVHAATNNKERVANYKEGDNSSAN

SEQ ID NO: 38986 - protein, 161 aa, Ustilago maydis 521
MVSFYDLKAKKPSQEDYTFDQLKGKVVLVVNTASKCGYTPQFAELEELNKKYADQGLQIIGFPCNQFAGQDPGSDESIGEFCQRNYGVTFPMMAKSDVNGSNTNEVFQFLKKEKAGILGTEMIKWNFTKFLIDKEGNVIERYGSNTKPSAIAPAIEKLLSQ

SEQ ID NO: 38987 - protein, 452 aa, Burkholderia fungorum LB400
MQEAASQSVDEFIDSQPVSGYQRSIIFFCFLVVALDGFDSACIGFVGPAIRAHWQLTVAALSPVFGAGLFGTMAGGILLGPVADRYGRKTVLVASVALFGLASVVSAFSPDIHFLAFMRFVTGIGLGGAMPNSITLTSEYCPGAKRSGYVTLMFCGFTIGASAGGLLTAEIVGTVGWQGILVAGGVLPLLLVPFLMGFLPESIRYLLLIDRAKSYVRVASIASRVAAPGVTVPRLRADEKVRRSPVKALFEKGVVTGTLLIWTIFFSSLLIIYLLTSWMPVLLSSAGIPLESAALISMMHQVGAALGCIWLGRQMDRFNPHRVLAWSYFVAIPIIVLCAFSGSHKALLVLSVFALGFLISGGNIGAYALVSGYYPTSSRSTGVSWANAVGRVGAALGSMAGGLMMAAGLRLQEIILVLAIPAAVATGCLCLLGIIRSHRKAGPVGEPVHSLH

SEQ ID NO: 38988 - protein, 346 aa, Debaryomyces hansenii CBS767
MRSQQQQFQQYKQKAKNISNANELLPGLNDISDAFEALPLDLIKYFTLLKEIDAKYINTVPVINRNIKSYIDRLHITKNSPPGMKEMNKPTKIDKLTVIRDKIHEIIPCLEEKMHVTSVATDLLHKHLYRINADYKLIVNNNEIPESIRIGPLNHPAMIMDSAGPVDANGNLSAQSQRSESRREALAAKKAHKDHYDDDEPKKRKAMGNKEVSPSSDVPLASKLASNSKKRSRKDPEEMSSRSDTPSMSTVLNGPNKKRNTTKPKKDDKDVSNDVVHPGPSHTSANSSEPTYCYCNQVSFGEMVGCDGDDCKREWFHLPCIGFKNPPKGKWYCDDCLMKMKKLRKV

SEQ ID NO: 38989 - protein, 745 aa, Arabidopsis thaliana
MAQAAAAASLFSPPLTKSVYASSGLSLALEQPERGTNRGEASMRNNNNVGGGGDTFDGSVNRRSREEEHESRSGSDNVEGISGEDQDAADKPPRKKRYHRHTPQQIQELESMFKECPHPDEKQRLELSKRLCLETRQVKFWFQNRRTQMKTQLERHENALLRQENDKLRAENMSIREAMRNPICTNCGGPAMLGDVSLEEHHLRIENARLKDELDRVCNLTGKFLGHHHNHHYNSSLELAVGTNNNGGHFAFPPDFGGGGGCLPPQQQQSTVINGIDQKSVLLELALTAMDELVKLAQSEEPLWVKSLDGERDELNQDEYMRTFSSTKPTGLATEASRTSGMVIINSLALVETLMDSNRWTEMFPCNVARATTTDVISGGMAGTINGALQLMNAELQVLSPLVPVRNVNFLRFCKQHAEGVWAVVDVSIDPVRENSGGAPVIRRLPSGCVVQDVSNGYSKVTWVEHAEYDENQIHQLYRPLLRSGLGFGSQRWLATLQRQCECLAILISSSVTSHDNTSITLGGRKSMLKLAQRMTFNFCSGISAPSVHNWSKLTVGNVDPDVRVMTRKSVDDPGEPPGIVLSAATSVWLPAAPQRLYDFLRNERMRCEWDILSNGGPMQEMAHITKGQDQGVSLLRSNAMNANQSSMLILQETCIDASGALVVYAPVDIPAMHVVMNGGDSSYVALLPSGFAVLPDGGIDGGGSGDGDQRPVGGGSLLTVAFQILVNISQRQNSRLSRWRLSTT

SEQ ID NO: 38990 - protein, 121 aa, Arabidopsis thaliana
  misc_feature (82)..(82): Xaa can be any naturally occurring amino acid
  unsure (1)..(121): unsure at all Xaa locations
MESEGKIVFTEEQEALVVKSWSVMKKNSAELGLKLFIKIFEIAPTTKKMFSFLRDSPIPAEQNPKLKPHAMSVFVMCCESAXVQLRKTGKVTVRETTLKVAWGQAYDHLVAAIKAEMNLSN

SEQ ID NO: 38991 - protein, 199 aa, Pinus radiata
  misc_feature (133)..(133): Xaa can be any naturally occurring amino acid
  unsure (1)..(199): unsure at all Xaa locations
MARGKTQMRKIESATSRQVTFSKRRNGLMKKAYELSVLCDAQLGLIVFSPRGKVYEFSSTCMQKMLARYEKCSEGSDTSTSKEQDVQCLKRESANMEERIEILESMQRKMLGEELASCALKDLNQLESQVERXLRNVRARKERILSEENAFLSKKFVDPQSFSTTPGSESGSIQNSEVETQLVMRPPCTNAHFLINSSH

SEQ ID NO: 38992 - protein, 338 aa, Triticum aestivum
  misc_feature (52)..(52): Xaa can be any naturally occurring amino acid
  unsure (1)..(338): unsure at all Xaa locations
MAPLGDAVAPAAAAAAPGLVVSFGEMLIDFVPDVAGVSLAESGGFVKAPGGXAPANVACAISKLGGSSAFIGKFGDDEFGHMLVEILKQNGVNAEGCLFDQHARTALAFVTLKSNGEREFMFYRNPSADMLLTEAELNLDLIRRARIFHYGSISLITEPCRSAHVAAMRAAKSTGILCSYDPNVRLPLWPSAQAARDGIMSIWKEADFIKVSDDEVAFLTQGDATDEKNVLSLWFEGLKLLIVTDGEKGCRYFTKDFKGSVPGYSVNTVDTTGAGDAFVGSLLVSVSKDDSIFYNEAKLREVLQFSNACGAICTTKKGAIPALPTTATALELISKGSN

SEQ ID NO: 38993 - protein, 261 aa, Candida albicans SC5314
MGVHKLIILRHGESQWNHENKFCGWIDIPLSQKGKQEAIYAGELIKKNHLDPDILYTSKLMRSIETGLTILEVLHKPWIDHIKTWRLNERHYGQYQGRDKHEVFVELGKDKEKFQYIRRDYHGLPPLIEYGQDKSIDEKYKDVLNKDILPRGESLSMVMDRLIPFFKYEILDNQMIQLNKTVLIVTHGSIVRSLIKYLNHVSDDDISKINVPTGIPLVFELNDRGELIKPYYYLDQEKAEKGIAKVKMEGLERKGQTDEKL

SEQ ID NO: 38994 - protein, 127 aa, Vibrio parahaemolyticus RIMD 2210633
MAYSEKVIDHYENPRNVGSFDKEDPSVGSGMVGAPACGDVMKLQIKVTPEGIIEDAKFKTYGCGSAIASSSLVTEWVKGKSIDEAAAIKNSEIAEELELPPVKVHCSILAEDAIKAAVADYKKKHQE

SEQ ID NO: 38995 - protein, 405 aa, Polaromonas sp. JS666
MLIDHLNRQQLEREAQGLQRQRRIAESPCAPRQWVSQDGQPAREMLAFCSNDYLGLANHPALVEALAEGARQFGAGSGASHLISGHSRAHAALEGDLAAWLAPSIPNAAALYFCTGYLANLALLTALGDASATIFADKLNHASLIDGALLAKATMQRYAHRNLTVLASQLESCTTPIKLIVTDAVFSMDGDLADLPALLALAERFDAWLIVDDAHGFGVLGDQGRGSLSHFGLRSERLIYMGTLGKAAGLGGAFVAAHPSIIDWLVQAARPYIYTTAAPPAVAHALRESLRLISSAEGEQRRAHLQQLIIQLRTQLSALIGAHPTLGWRLADSSTAIQPLIVGDNAAALALMAALDAQGLWVPAIRPPTVPVGTARLRITLSATHSAADVQRLVDGLACAARELP

SEQ ID NO: 38996 - protein, 147 aa, Kluyveromyces lactis NRRL Y-1140
MSQNLTEEQIAEFKEAFALFDKDNSGSISASELATVMRSLGLSPSEAEVADLMNEIDVDGNHAIEFSEFLALMSRQLKCNDSEQELLEAFKVFDKNGDGLISAAELKHVLTSIGEKLTDAEVDEMLREVSDGSGEINIKQFAALLSK

SEQ ID NO: 38997 - protein, 154 aa, Pinus taeda
AVTALPGFLSVASETVGDLESSSGKSALHLFGVYDGHGGSEVANFCKERLHGALIEELEAEMREGDRGEDECSWQRQWERAFVACFNKVDAEIGGVEPRNLRCENAAVEVGGRGNDESSARAAPEAAPADAVGSTAVVAVVGSSQIIVSNCGDS

SEQ ID NO: 38998 - protein, 220 aa, Triticum aestivum
MISIGGSSSSSSSAAAGVRMGGAKRRGKPGGAAAPGAAGTPQTRWRSGTQERIYGRRLLDALRATRSGAASSAQPPQPRAVKAAADSALALTARGQSRWSRAILLAGAASCRRRVLVKAGGKIRRHRRPPARAAAAASAGEPPLLKERKVKDRLRVLGRLVPGCRKLQAPDLLEETADYVAALEMQVKAMRALADALAAAQLSSPPPPAAAGDDEAEMER

SEQ ID NO: 38999 - protein, 602 aa, Escherichia coli K12
MQTFQADLAIVGAGGAGLRAAIAAAQANPNAKIALISKVYPMRSHTVAAEGGSAAVAQDHDSFEYHFHDTVAGGDWLCEQDVVDYFVHHCPTEMTQLELWGCPWSRRPDGSVNVRRFGGMKIERTWFAADKTGFHMLHTLFQTSLQFPQIQRFDEHFVLDILVDDGHVRGLVAMNMMEGTLVQIRANAVVMATGGAGRVYRYNTNGGIVTGDGMGMALSHGVPLRDMEFVQYHPTGLPGSGILMTEGCRGEGGILVNKNGYRYLQDYGMGPETPLGEPKNKYMELGPRDKVSQAFWHEWRKGNTISTPRGDVVYLDLRHLGEKKLHERLPFICELAKAYVGVDPVKEPIPVRPTAHYTMGGIETDQNCETRIKGLFAVGECSSVGLHGANRLGSNSLAELVVFGRLAGEQATERAATAGNGNEAAIEAQAAGVEQRLKDLVNQDGGENWAKIRDEMGLAMEEGCGIYRTPELMQKTIDKLAELQERFKRVRITDTSSVFNTDLLYTIELGHGLNVAECMAHSAMARKESRGAHQRLDEGCTERDDVNFLKHTLAFRDADGTTRLEYSDVKITTLPPAKRVYGGEADAADKAEAANKKEKANG

SEQ ID NO: 39000 - protein, 427 aa, Clostridium thermocellum ATCC 27405
MTLSKSKLLFERAKKVIPGGVNSPVRAFGAVGGYPPFIKKAKGARIYDADGNEYIDYVGSWGPMILGHSHPRVLEAVSKTMVDGLSFGAATELEVQMAELITELVPSVEMVRMVNSGTEAVMSAIRVARGYTKREKIIKFAGCYHGHADSMLVKVGSGAMTNGIPNSGGVTAGAAKDTLIARYNDIDSVKLLFEQNKGNIAAVIVEPVAANMGVVPPKDNFLEELRKLCDKEEALLIFDEVITGFRLAIGGAQQYFGVNADLVTYGKIIGGGMPVGAYGGRREIMECVAPVGDVYQAGTLSGNPIAMSAGIATLRELYENPGIFENINRLGQRLSEGLGKITKYTVKAVGSLVCVFMTEEEVNDYDSAVKSDTGLFGRYFNHLLNNGIYIAPSQFEAMFVSNAHTDKDIDETLEKVSLFFARKSPPA

SEQ ID NO: 39001 - protein, 333 aa, Bordetella bronchiseptica RB50
MSQPTTYTVAFMDVLAPAVQRVILSVFRPPFEVRFAANYDDRHQLALCREADFLVPGWARLTAGMLEAATRVRAVHKWGIGVDRIDVDAARRLGIPLAITAGSNAGPVAELAVALILGVYRRLCYVNREMRAGQWPKAEMRESCFQIHRKTIGLVGFGNIGRKLARRLSGFEPDAILYCDQQAAPAEVERALGARRVELPELLAASDIVSLHLPCTASTRRLIDAAALQHMKKGAVLINTARGELVDEAALAEALQRGHLLGAGLDAFDPEPPDPANPLLALDQVVVTPHAGGGVFDNVAPVAAHVLGNLERFVAGQPLPAQDLIVSEDRRKP

SEQ ID NO: 39002 - protein, 352 aa, Symbiobacterium thermophilum IAM 14863
MQAVDFQVSEHRDGRGRAMKEATMARHEALGLTADQVREMYYYMLLTRRLDERLWLLQRGGKIPFVISPQGQEAAQVGAAFAFRRRQDWFTPYYRDLGVNLVVGVTPREVMLSAFARGADPASGGKQMPSHWGNRPLNIVSGSSPVTTQVLHAVGIAQAARMRGDDVVVYTACGEGSSNQGDFHEALNWAGLHKLPVIFMVQNNEYAISVPLSQQVAGGSVAARGRGYGMPGVEVDGTDVLAVYEVVKEAHERARRGEGPTLIEARCIRITSHSSDDDQRRYRDPEEIAAVQVRDPIRKARQYLFEHGLMDEAAEQELERKVAAIVDDATDWAEAQPYAAPEEALRHVYKEG

SEQ ID NO: 39003 - protein, 471 aa, Symbiobacterium thermophilum IAM 14863
MSHSFDVVVIGGGPGGYVAAIRGAQLGLRVALVEQDKVGGTCLHRGCIPTKAYLRSAEVLHTLRQSREYGVLTGGVDLDFAAVRSRKDKVVSNLHKGIQGLLKKNGVAVFQGRGALVPPSIFSPNGLVSVMVGDQQELLEFNKVIIATGSRPKTLGIPVDGAHVMTSDEALARPDLPASVIIIGAGVIGMEWASLYADFGVRVTVLEFLDRILPTEDEAVAAELHKLMTRRKVEIVTGAAVLPESVQAEGGQVRVQARVGEQVREFQAEALLIAVGREPVTRGFGLENRERVTYGPGGFIQVDGFGRTGDPAIYAIGDVAGGGLAHVASHQGIIAMEHIAGLNPEPFAPVRVPRCVYTRPEVASVGLTEAQAREQGREVRVGTFPWRGIGKALVHGSVDGFAKIVADAATGDVLGVHLIGPDATNLIAEAGLALTLNASAWELGQVIHPHPTLAEIFGEAALAVEGRAIHM

SEQ ID NO: 39004 - protein, 229 aa, Zea mays
MAVSFANLNSEAGLKKLDEYLLTRSYITGYQASKDDLAVYTSFSAAPSSKYINVARWFNHIDALVRLSGITAEGQGVKVESSAVPSAPTPDVAEAQAPVAEEDDDDDVDLFGEETEDEKKAAEERAAAAKASGKKKESGKSSVLLDVKPWDDETDMAKLEEAVRSVQMEGLLWGASKLVPVGYGIKKLQIMMTIVDDLVSVDTLIEDYLCAEPVNEYVQSCDIVAFNKI

SEQ ID NO: 39005 - protein, 307 aa, uncultured bacterium 313
MRTGIVTTDTYLNHDTGQGHPERADRVTVVINHLKKIKSKSLIWKKATKFDLKYLEFAHDENYLNNVKDSFPKQGLNFLDGDTIVSPGSKEATRDAVGSILTAIDGVMKKDLDNAFCAVRPPGHHAEKQKAMGFCVYNNIAVGAYYLLEKYKLKKVAIIDFDVHHGNGTQDIFYDNEKVLYISSHQYPYYPGSGAANEKGSKDNVLNVPLSAGTQSHEFLNAYDSIFKKLKTFKPEFILLSAGFDAHKDDPLAQINLESKDYYTLTKRILSLAKELCDGKVVSILEGGYDLNALKESVDYHVKSLLE

SEQ ID NO: 39006 - protein, 785 aa, Cucumis sativus
MNLSRPTNLGCFTASSSASLFPGLDVGTKTKTGALRFEETKERIKKLFKNVELSISAYDTAWVAMVPSPNSLNKPLFPECINWVLDHQNPDGSWGILHDHQLVMKATLLSTLACVLTLKRWDIGDDHMSKALSFIKSNIASATDENQRSPVGFDIIFPGMIEYAKDLNLNLPLASMNVDALVQKKELELRSCCSNSEGGKAYLAYVSEGIGKLQDWEMVMRYQRKNGSLFSSPSTTAVAFMHRNDDGCFNYLRSVLQKFHSSVPAIYPLDIYARLHMVDSLQKLGIDGHFKDEIRSVLDETYSCWMQGEENIFLDASTCAMAFRMLRVEGYDVSSDQLTQFSEGLFSNCLGGHLKDFSASLELFKASQIIIYPDEFILENINSWTSRFLNHGLSSGSVHSDRTERLVKQEAVNAFEFPYNSTLERLSNKRALESYSGDIVRISKTAYACLNFGHQDFLELAVEDFNTLQGIHRKELKELEKWVIENKLDKLKFARQKLAYCYFSAAATLTSPELCDARLSWAKNGVLTTVVDDFFDVGGSEEELVNLIQLVEKWDASGETGYCSKEVEIIFLALHSTICEIGKKALPWQGRSVMRNVIDIWLALLESMRKEAEWLKNKVVPSLDEYMENGYVSFALGPIVLPTLYFVGPKLPEEIVGNCEYKKLFKLMSTSGRLLNDTRTFDRESSEGKLNALSLYMISAGGKLTKEEATEAMKGDVDRTRRELLRLVLQENSTIPRACKDLFWKMSCVVHLFYRKDDGFTSHELMNSAKALFEQPMVLDELLNK

SEQ ID NO: 39007 - protein, 2111 aa, Mycobacterium tuberculosis H37Rv
MESRVTPVAVIGMGCRLPGGINSPDKLWESLLRGDDLVTEIPPDRWDADDYYDPEPGVPGRSVSRWGGFLDDVAGFDAEFFGISEREATSIDPQQRLLLETSWEAIEHAGLDPASLAGSSTAVFTGLTHEDYLVLTTTAGGLASPYVVTGLNNSVASGRIAHTLGLHGPAMTFDTACSSGLMAVHLACRSLHDGEADLALAGGCAVLLEPHASVAASAQGMLSSTGRCHSFDADADGFVRSEGCAMVLLKRLPDALRDGNRIFAVVRGTATNQDGRTETLTMPSEDAQVAVYRAALAAAGVQPETVGVVEAHGTGTPIGDPIEYRSLARVYGAGTPCALGSAKSNMGHSTASAGTVGLIKAILSLRHGVVPPLLHFNRLPDELSDVETGLFVPQAVTPWPNGNDHTPKRVAVSSFGMSGTNVHAIVEEAPAEASAPESSPGDAEVGPRLFMLSSTSSDALRQTARQLATWVEEHQDCVAASDLAYTLARGRAHRPVRTAVVAANLPELVEGLREVADGDALYDAAVGHGDRGPVWVFSGQGSQWAAMGTQLLASEPVFAATIAKLEPVIAAESGFSVTEAITAQQTVTGIDKVQPAVFAVQVALAATMEQTYGVRPGAVVGHSMGESAAAVVAGALSLEDAARVICRRSKLMTRIAGAGAMGSVELPAKQVNSELMARGIDDVVVSVVASPQSTVIGGTSDTVRDLIARWEQRDVMAREVAVDVASHSPQVDPILDDLAAALADIAPMTPKVPYYSATLFDPREQPVCDGAYWVDNLRNTVQFAAAVQAAMEDGYRVFAELSPHPLLTHAVEQTGRSLDMSVAALAGMRREQPLPHGLRGLLTELHRAGAALDYSALYPAGRLVDAPLPAWTHARLFIDDDGQEQRAQGACTITVHPLLGSHVRLTEEPERHVWQGDVGTSVLSWLSDHQVHNVAALPGAAYCEMALAAAAEVFGEAAEVRDITFEQMLLLDEQTPIDAVASIDAPGVVNFTVETNRDGETTRHATAALRAAEDDCPPPGYDITALLQAHPHAVNGTAMRESFAERGVTLGAAFGGLTTAHTAEAGAATVLAEVALPASIRFQQGAYRIHPALLDACFQSVGAGVQAGTATGGLLLPLGVRSLRAYGPTRNARYCYTRLTKAFNDGTRGGEADLDVLDEHGTVLLAVRGLRMGTGTSERDERDRLVSERLLTLGWQQRALPEVGDGEAGSWLLIDTSNAVDTPDMLASTLTDALKSHGPQGTECASLSWSVQDTPPNDQAGLEKLGSQLRGRDGVVIVYGPRVGDPDEHSLLAGREQVRHLVRITRELAEFEGELPRLFVVTRQAQIVKPHDSGERANLEQAGLRGLLRVISSEHPMLRTTLIDVDEHTDVERVAQQLLSGSEEDETAWRNGDWYVARLTPSPLGHEERRTAVLDPDHDGMRVQVRRPGDLQTLEFVASDRVPPGPGQIEVAVSMSSINFADVLIAFGRFPIIDDREPQLGMDFVGVVTAVGEGVTGHQVGDRVGGFSEGGCWRTFLTCDANLAVTLPPGLTDEQAITAATAHATAWYGLNDLAQIKAGDKVLIHSATGGVGQAAISIARAKGAEIFATAGNPAKRAMLRDMGVEHVYDSRSVEFAEQIRRDTDGYGVDIVLNSLTGAAQRAGLELLAFGGRFVEIGKADVYGNTRLGLFPFRRGLTFYYLDLALMSVTQPDRVRELLATVFKLTADGVLTAPQCTHYPLAEAADAIRAMSNAEHTGKLVLDVPRSGRRSVAVTPEQAPLYRRDGSYIITGGLGGLGLFFASKLAAAGCGRIVLTARSQPNPKARQTIEGLRAAGADIVVECGNIAEPDTADRLVSAATATGLPLRGVLHSAAVVEDATLTNITDELIDRDWSPKVFGSWNLHRATLGQPLDWFCLFSSGAALLGSPGQGAYAAANSWVDVFAHWRRAQGLPVSAIAWGAWGEVGRATFLAEGGEIMITPEEGAYAFETLVRHDRAYSGYIPILGAPWLADLVRRSPWGEMFASTGQRSRGPSKFRMELLSLPQDEWAGRLRRLLVEQASVILRRTIDADRSFIEYGLDSLGMLEMRTHVETETGIRLTPKVIATNNTARALAQYLADTLAEEQAAAPAAS

SEQ ID NO: 39008 - protein, 659 aa, Cytophaga hutchinsonii
MIAFERNNIDQETLIRLYKELVKPRMIEEKMLFLLRQGKISKWFSGIGQEAVSVGVACALEKEEYILPLHRNLGIFTSRGVPLHRLFCQFQGKPSGFTKGRDRSFHFGSKEHHIVGMISHLGPQMAVADGIALAEKLSRSNRATLVFTGDGGTSEGDFHEALNLASVWNLPLIFLVENNGYGLSTPLEEQFKIKSFKEKGPAYAIETHTIDGNNILEVYSKIRVLADYVRRESRPVLVEAITFRMRGHEEASGTKYIPEQLFEAWAKKDPVENYERYLLNEAILTIQEIESIKQKIKDGIDEAWQYTENEKEPVADASIEEEDMYAPYVHIRTRPRTTLKSPKRFIDAISDGLRLAMDKYPRLIQMGQDIAEYGGVFKVTEGLVERYSKERVRNTPLCESAVIGAGYGLAIKDYKSVIEMQFADFITSGFNQVVNNLAKSHYRWEQAADVVIRMPTGAGTSGGPFHSQSNEAWFFHTPGLKIVYPSNPYDAKGLLLAAIEDPNPVLYFEHKALYRSITEEIPDDYYTVPIGEAILAEEGDDLTIVAYGNAVWWAKEAVKKEAASADIIDLRSLLPWDKELVLKSVLKTGRVLVINEDTLTGSISAEIAAWISENAFESLDAPVMRVGSLDTAVPFSKSLEDNFLPVKRIQDKLKELQYY

SEQ ID NO: 39009 - protein, 502 aa, Magnaporthe grisea 70-15
MRLLGALLIAPAAVSATISFELMRSTTDSPHPHLGKRSTFVESIANNVTGGGYYLDVKIGTPGQDARMILDTGSSDAWVVSTRADLCGNARLQRQYGDSCGATYNESKSSTYSLKERNGFQIRYLDGSAARGDYIKDDFTIGKTTIKGLQMGVASTTVRGTGILGVGFSSHVTAKEKYPNIIDELVAQKIIQTKAYSLWLNDRRSPSGRILFGGIDTAKFIGALKVIPLIPDVTTKNITSFTVALSGFDIELSNKTKTKIDLRSDSNPALLDSGTTLTYLPAAMADKVFAMFGAVEDKNVTGLAYVSCEYLQKEKDMVMSFTFARGGGTIKVPGYEMILDVVRNLDGFQTPKGLPFKDVCLFGIQSTGQFAQQYNSLEGADFTLLGDTFLRSAYVVYDLDHNQVGIAQANLNATESKIVNLTSSDNGLPRLTGVASQVVNIAVQTTVTGADGLPTVTTTEVPAASESKNAAAGLVVGLGREVASLVGAWTLFAVFGGVFFVL

SEQ ID NO: 39010 - protein, 82 aa, Brassica rapa
PKELRNLEGRLDRSVNRIRSKKNELLFAEIDYMQKREVDLHNDNQLLRAKIAENERNNPSMSLMPGGSNYEQIMPPPQTQPQ

SEQ ID NO: 39011 - protein, 236 aa, Nicotiana tabacum
MNQPIYTELPPANFPGEFPVYRRNSSFSRLIPCLTETWGDLPLKVDDSEDMVIYTLLKDALNVGWSPFNFSAGEVKSEQREEEIVVSPAETTAAPAAELPRGRHYRGVRRRPWGKFAAEIRDPAKNGARVWLGTYETDEEAAIAYDKAAYRMRGSKAHLNFPHRIGLNEPEPVRVTAKRRASPEPASSSENSSPKRRRKAVATEKSEAVEVESKSNVLQTGCQVELLTRRHQLLVS

SEQ ID NO: 39012 - protein, 160 aa, Debaryomyces hansenii CBS767
MSFYDLSPLDTNDKPFPFEELKGKVVLVVNVASKCGFTPQYKELEELNKKYQDKGLQIIGFPCNQFGGQEPGSSEEIASFCSLNYGVSFPVLKKVDVNGDKTDPVYKYLKGEKLGLLGLNRIKWNFEKFLIDKNGKVIERYSSLTKPASLLSTIEELLKK

SEQ ID NO: 39013 - protein, 73 aa, Brassica oleracea
LEGRLDRSINRIRSKKNELLFAEIDYMQKREVDLHSDNQLLRAKIAENERNNPSMNLMPGGSNYEQIIPPPQT

SEQ ID NO: 39014 - protein, 399 aa, Debaryomyces hansenii CBS767
MSIRNASIRMARMASNNAAKQVASKRALSALANAARPVVARKSIAPAAARGVKTINFGGMDEIVHERADWPREKLLEYFKNDTLALIGYGSQGYGQGLNLRDNGLNVIIGVRKDGASWKAAIEDGWVPGENLFDVNEAIGKGTYIMNLLSDAAQSETWESIKPQLTEGKTLYFSHGFSPVFKELTHVEPPTNIDVILAAPKGSGRTVRTLFKEGRGINSSYAVWNDVTGKAEEKAIALAVAIGSGYVYQTTFEREVNSDLYGERGCLMGGIHGMFLAQYEVLRENGHTPSEAFNETVEEATQSLYPLIGKYGMDYMYDACSTTARRGALDWYPRFKDALKPVFNDLYESVKNGTETQRSLDFNSQSDYRARLEEELETIRSMEIWRVGKEVRKLRPENQ

SEQ ID NO: 39015 - protein, 294 aa, Vigna unguiculata
MEQYEKVEKIGEGTYGVVYKARDRVTDETIALKKIRLEQEDEGVPSTAIREISLLKEMQHRNIVRLQDVVHSEKRLYLVFEYLDLDLKKHMDSSPEFVKDPRQVKMFLYQILCGIAYCHSHRVLHRDLKPQNLLIDRRTNSLKLADFGLARAFGIPVRTFTHEVVTLWYRAPEILLGSRHYSTPVDVWSVGCLFAEMVNRRPLFPGDSEIDELFKIFRILGTPNEETWPGVTALPDFKSTFPKWPPKDLATMVPNLDAAGLNLLSSMLSLDPSKRITARIAVEHEYFKDIKFVP

SEQ ID NO: 39016 - protein, 84 aa, Glycine max
  misc_feature (15)..(15): Xaa can be any naturally occurring amino acid
  unsure (1)..(84): unsure at all Xaa locations
ICDCKIHHSVDGLRXISEGDIIEDSLLMGTDYYETEADKELLADKGGIRISIGKNSCIRRAIIDDNARIGDNVKILIAVIVQEA

SEQ ID NO: 39017 - protein, 348 aa, Streptococcus mutans UA159
MNSPYTRSPRTIKHAFVTGATGLLGNNLVRALLKQGIKVTALVRSMEKARLQFGDLPIQYVKGDILNPEAFRSAFTDCDTLFHTAAFFRDSHKGGKHWQELYDTNVTGTTHLLKAAYEEGIRQMIHTSSIAVLKGERHQLIDETMSRDPSTKLDYYRSKILSENAVSNFLKEYPDLFLCYVLPGSMYGPGDMGPTATGQLILDYMQQKLPGIITKASYSVVDTRDVADIHILALKYGRRNERYLAAGRHMTMESIVKTLEEITGIPAPKRHIPIFLVQALAQWNELYHKITGKPVLVSKEIADITAEEYLRTYFSHKKTEQELGGQFRPFEETLLDTVRWYRNHGYLN

SEQ ID NO: 39018 - protein, 272 aa, Magnaporthe grisea 70-15
MTGRLANKVAIITGASSGIGRATALLMAREGAAVVCSDIRQGPPTDSNSSSSISTHEEIQRLGGRATFVSCDTSDSAQVQALVKSAVAEFGRLDIMFNNAGVGKEGDNYPDTMIWQYDEDDFDLTMAVNVKGVFLGCKYAAAQMKDQEPLVPGGDRGWIVNTGSILGVNAIKGVTAYAASKHAVLGITKAAALDCAPFNIHVNAVNPGFVKTVMTKNMLEDSVGSEALAARHPFKGIGNVEDIAKTVLFLVSDDASWITGTSLCVDGGYTTM

SEQ ID NO: 39019 - protein, 166 aa, Brassica napus
MSQTVVLKVGMSCQGCVGAVNRVLGKMEGVESFDIDIKEQKVTVKGRVEPEAVFQTVSKTGKKTSYWPVETEAEPKAEVEPKAETETKAEAETKTEGKVVEVLDAKVDATKVEPEANVEPKFAETETKTEGKADDEVLDAKVDPKVDAKADVEPKLVEAETKPPQV

SEQ ID NO: 39020 - protein, 229 aa, Lactobacillus sakei subsp. sakei 23K
MAKLVFIRHGQSEWNLSNQFTGWVDVNLSEEGVRQAQNAGALLKKEGILFDQAYTSVLTRAIKTLHYALEGSDQLWIPETKSWRLNERHYGALQGQNKAEAAEKWGDEQVHIWRRSYDTLPPLLDASDEGSAANDRRYAHLDPKAIPGGENLKVTLERVIPFWEDEIAPKLIDGQNIIVAAHGNSLRALTKYIENISDEDIMDVEMATGEPVVYDLDENLNVVSKKKLN

SEQ ID NO: 39021 - protein, 370 aa, Burkholderia pseudomallei K96243
MTPFHEPQATDDMAIPVTILTGFLGSGKTTLLKRILNEQHGMKIAVIENEFGEENIDNEILVQDSTEQIIQMSNGCICCTIRGDLARALADLAAKKRDGTFDFDRVVIETTGLANPGPVAQTFFIDSEIADEFLLDAVITLVDAKHANAQLDEHEVVQRQVGFADRLFITKADLVDDEAVSELKHRLLHMNPKAAIKVVNFGDADIKEIFDLRGFNLNAKLEIDPDFLAEDDHAHAHHDDHDHDHAHCDHDHGHCEHDHGHGHHDHHHAHHDDKIKSFVYRNDRPFDPNKLEDFLGGILQIYGERMLRYKGVLYMKGVDRKVVFQGVHQMMGSDLAAKWLPAEKKTNKMVFIGVDLPRDLITDGLDACLA

SEQ ID NO: 39022 - protein, 454 aa, Aeropyrum pernix K1
MEEVVKRLAEIRAMDARGEGGRLFTYLYETGDPGVKEVSLRAFEMFLDTNALDPTVFKSALFFERELVSFASSLAGGVEGVVGTVTYGGTESIILAAMAAREWYRSLGGSRTPGIVAPQTVHPSVRKAARYLGMRLSIAPVDPGSKRVDIDSLVSLVDDRTAMVVVSAPNYPYGTVDDVRSVAEALSSQRVWLHVDACVGGFILPFMRELGLYSGAFAFDVEGVYSVSMDLHKYGYSPKGASVLLFRDGSLKKHSIFADLRWPGYPFINTTVLSSRSVAPLAAAWAVTNYLGRRGYLELARKAVEARDEIMRGLESIGFRSLAPIESTILSVALDDPADTLRFHANMSRRGWILGLQPGVEGLAPPNIHLTISPIHKLVSPQFLGDARASSSEPLPKELEEAWRLLESRGPLELAGMIGRTQYDQVIIAWILSSIPPDLAEDLARELTVEVYRG

SEQ ID NO: 39023 - protein, 404 aa, Pseudomonas aeruginosa UCBPP-PA14
MGPDVVDVRGLTATGHFTFDPGFMSTASCESKITYIDGDKGVLLHRGYPIEQLAEKSDYLETCYLLLNGELPTAAQKEQFVGTIKNHTMVHEQLKTFFNGFRRDAHPMAVMCGVIGALSAFYHDSLDINNPKHREVSAHRLIAKMPTIAAMVYKYSKGEPMMYPRNDLNYAENFLHMMFNTPCETKPISPVLAKAMDRIFILHADHEQNASTSTVRLAGSSGANPFACIASGIAALWGPAHGGANEAVLRMLDEIGDVSNIDKFVEKAKDKNDPFKLMGFGHRVYKNFDPRAKVMKQTCDEVLQELGINDPQLELAMKLEEIARHDPYFVERNLYPNVDFYSGIILKAIGIPTSMFTVIFALARTVGWISHWQEMLSGPYKIGRPRQLYTGHTQRDFTALKDRG

SEQ ID NO: 39024 - protein, 322 aa, Trichodesmium erythraeum IMS101
MKAFVTGASGFIGANLVRLLLQQGYAVRSLVRPTSRLDNLQGLDIEVVVGDLNDSYLFELIEGCQVLFHVAAHYSLWQKDKELLYKNNVLGTRNVLAAARRAKIERTVYTSSVAAIGVGVSSTVVDETYQSPLKKLVGDYKKSKFLAEQEAMRAVTLGQDVVIVNPTAPVGAWDIKPTPTGDIIVRFLRRQMPVYVDTGLNIIDVRDVAWGHLLALERGKSGDRYILGNQNLTLKELLDLLQEVTGLPAPRQTIPIWLPLTIAWVDEKILAPLGKQPSIPLDGVRMSQKKMYYDASKAIKKLGLPQSSIRVALENAINWFDI

SEQ ID NO: 39025 - protein, 336 aa, Trichodesmium erythraeum IMS101
MTAVNTQKLDVYGVGNALVDILALVEEDFITKFSLQKSGMTLMDAQKQGGILAGLKDISLKKRSGGSAANSMIALAQSGGTGIFVAKVASDPNGELYRQDMLNFKMDFNVPPAPTADNPTGTCVVLTTPDAERTMCTNLGVSVNLSVSDIDVEQIKRCKYSYVEGYLWTGDSTKEACKQAMQYSKDEKVKVCFTFSDQFLVDMFADEFRSLLLDYCDVLFCNADEARSFCKKDSLDDSAKSIGELVETAFITNGKEGCLVVKDKQITSVPGFNATAIDTVGAGDAFAGGVLYGLTHGYEPTQAARWGNYLASNVVQIQGPRLEGSWADKVQQIINA

SEQ ID NO: 39026 - protein, 435 aa, Neurospora crassa
MRRVVVTGLGAITPLAVGIRPTWRRLLDSHSGIVSVADLEPQDKWKELTSTVGGLVPTPARNKQNVDEQHTWKAADWLEPSDQRRMSLFAQYSVAATEMALQDAGWKPTRQEDLEATGVCMGSGIGNLDDFYNTSVTYDKEGYKRVSPLFVPKILINLGAGHIAMRYGFRGPNHSATTACTTGAHSIGDASRFIAFGDADVMVAGGSESCIHPLTFAGFGRSRSLSTAYNHDPTSACRPFDKDRAGFVVSEGAAVLILEELEHAKRRGARILAELTGYGCSGDAHHMTAPRDDGSGAFLSMKRALKNAGVKPGDVDYINAHATGTAVGDAAEAIAIRSLMMGEEGVDDESRITVSSTKGAIGHLLGAAGAIESVFSILAIAEGAIPPTLNLTSPNVGVGFNFVPVQAQQKEVKVAMSNSFGFGGTNASLVFSKFE

SEQ ID NO: 39027 - protein, 412 aa, Brucella melitensis 16M
MCFSSAWCWRSVSWRSTFLSGSAPYCWRSLCWARSGRRRALAMGRMKRFPCGKWPAREMAAVSGERLADLLTDPMIVFDHTATVRFANVAALEAFQSLQNGTALYLRFRAPEMLALIQGVIADGEPRNIEYFERVPIDRWYKAMVKALRDAEGKPELFVLIFRDQSETRRIDRMRSDFIANASHELRTPLASLRGFIETLQGPARNDAAARDRFLDIMQKQAERMSRLIDDLLSLSRLEMRAHLAVNESVDVAATLAHVADTLTPLAAGLGVTIERHLPEHPVHVMGARDELIQVFQNLVENACKYGQEGKRVIIRLSEEDTGNATEVVASIQDFGPGIAAEHLPRLTERFYRIDVETSRAHKGTGLGLAIVKHILARHRGRLVVRSQLGEGSTFMVRLPGQNARSAEAATI

SEQ ID NO: 39028 - protein, 331 aa, Clostridium thermocellum ATCC 27405
MAKIYYDSDCNLGLLKGKTVAIIGYGSQGHAHAQNLRDSGIDVVVGLPEGSKSRQKAVEDGLRVENTDVAAKMADVVMMLVPDQLQQDIYENSIKPNLEEGNVLAFAHGFAIHFKTIVPPPEVDVIMIAPKGPGHTVRSQYVEGKGVPSLIAVYQDASGKAKDYALAYAAGIGAGRAGILETTFKEETETDLFGEQAVLCGGVTELMKAGFETLVEAGYQPEIAYFECIHEMKLIVDLINQGGFSYMRYSISDTAEYGDYITGKKIITEETRKAMKAVLKDIQDGVFASKWITENKAGGRAQFLAMRRNEAEHQLEKVGAELRKMMSWLKK

SEQ ID NO: 39029 - protein, 588 aa, Vibrio sp. Ex25
MSIPVREFDAVVIGAGGAGMRAALQISEQGLSCALLSKVFPTRSHTVSAQGGITVALGNSHKDDWQWHMYDTVKGSDYIGDQNAIEYMCKNGPESVIELEKMGLPFSRFDNGTIYQRPFGGQSKEFGGEQAARTAAAADRTGHALLHTLYQQNVKHKTTIFSEWYALDLVKNQDGAVMGCTAICMETGEICYFKSKATILATGGAGRIYASTTNAHINTGDGVGMALRAGVPMQDMEMWQFHPTGIAGAGVLVTEGCRGEGGYLLNKDGERFMERYAPNAKDLAGRDVVARSMMIEIREGRGCDGPWGPHIKLKLDHLGKEVLESRLPGICELSRTFAHVDPVKEPIPVIPTCHYMMGGVPTQVSGQAIKQKADGSEMEVQGLYACGEIASVSVHGANRLGGNSLLDLVVFGRATGLHLGETLAAQAEARPATESDIEASLARTMRWENSTGGEDPVQIRKDLQACMQNSFSVFREGDAMATGLEELKVIRERLKDAHLADKSSEFNTQRIECLELDNLMETAFSTAVAANYRTESRGAHARFDFPERDDENWLCHSIYNPETEAMTKRDVNMTPTHREAFPPKVRTY

SEQ ID NO: 39030 - protein, 401 aa, Triticum aestivum
NKFVQKSRPVPVRNSRDIVDPRVRAVSGLTKGIEGLFKKNKVEYVKGFGKLVSPSEVSVDLVDGGSTIVKGKNIIVATGSDVKSLPGVTIDEKKIVSSTGALALTEIPKKLVVIGAGYIGLEMGSVWNRLGSEVTVVEFAPDIVPSMDGEIRKQFQRMLEKQKFKFMLKTKVVGVDTSGSGVKLTVEPAAGGEQTVIEADVVLVSAGRVPYTAGIGLDAIGVETDKGGRVLVDNRFMTNVKGVYAIGDAIPGPMLAHKAEEDGVACVEFIAGKEGHVDYDTVPGVVYTHPEVASVGKTEEQVKASGVAYQVGKFPLLANSRAKAIDDAEGMVKVISEKETDRILGVHIMSPGAGEIIHEAVLALQYGASSEDIARTCHAHPTVSEALKEACMNTYDKAIHM

SEQ ID NO: 39031 - protein, 154 aa, Brassica napus
ESAQSQFWVVDAQGLITEGRDNIDPEALPFARKTKEMERQGLKEGASLVEVVREVKPDVLLGLSAVGGLFSKEVLEAMKGSTSTRPAIFAMSNPTKNAECTAQEAFSILGDNIIFASGSPFKNVDLGNGHVGHCNQGNNMYLFPGIGLGVLLSG

SEQ ID NO: 39032 - protein, 411 aa, Anaplasma platys
MKENAVLMCGDKKVSLPMLSGTDGIQLIDITTLYRDHKVLTYDPGFMSTAACSSEITFIDGEKGILRHRGLDIADLIGIKGGFCSVAHLLLYGVLPSDTVFEQFLAAIGAQHALSSDVLGVISSFRRDAHPMAILMACFSTLAAKYHGDNRGNEELAVLAIAQVPSLVAAIYRHRMGLELVSPDPSLSYTGNFVKMMFGALEKTRADAIEEALDAIFIMHADHEQNASTATVRMAGSAGTELFACLAAGTATLWGPAHGGANEAVIRMLESIGSPDKVEEFIGFVKDNNSKVRLMGFGHRVYKSYDPRAKILGQISRSVLDNLGCSDELLGVAEELERCALQDEYFVERKLYPNVDFYSGIVLRAMGVPVEMYTTFFALARTAGWVSQWCELLRGSESLKICRPRQLYAGK

SEQ ID NO: 39033 - protein, 464 aa, Clostridium perfringens str. 13
MLFGKNELGSQFETPIFGTVESNESIPKYELAKKSIAPQVAYRLIKDDLLDEGNARQNLCTFCQTYMDDEAVKLMAETLEKNAIDKSEYPQTTDLENRCVNILADLWHAPKDESFMGTSTVGSSEACMLGGMAMKFRWRNRAKALGMDVTSRKPNLVISSGYQVCWEKFCVYWDIEMRLVPMDEEHMSINVDKVLDYVDDYTIGVVGILGITYTGKYDDIKALDKKLEEYNKTAKLTVPMHIDAASGGMFAPFIEPELEWDFRLKNVVSISTSGHKYGLVYPGIGWVLWRDKEYLPQELVFDVSYLGGKIPTMAINFSRSASQIIGQYYNFLRYGFEGYRQIHQRTKDVAMFLASELEKTGLFQIYNNGENLPIVCYKLRDDVNVDWTLYDLADRLLMKGWQVPAYPLPADLQDTIIQRIVCRADLSHNLAELYLRDLKAAIEDLNNARVLNQKSKTGVQGFTH

SEQ ID NO: 39034 - protein, 326 aa, Lactococcus lactis
MTVLVLGGAGYVGSHAVDMLLKRGYDVAVVDNLVTGHRESVPANVRFYEGDVRDHAFLASVFEKENIEGIMHFCAYSLVGESMQKPLMYFNNNVGGAQVILETMEEFGVKHIVFSSTAATFGIPEKSPISEKTPQKPINPYGESKLIMEKMMKWQSQATDMTYVALRYFNVAGAKDDGSIGEAHKNETHLIPIILQTALGQREFITIYGDDYHTPDGTCIRDYIDMEDLIEAHIKALEYLKAGGQSDQFNLGSSKGYSNLEVLETARKVTGKEIPSQMGERRAGDPDELVADSTKAGEILGWKAQNDLEHIITNAWKWHQSHPKGY

SEQ ID NO: 39035 - protein, 311 aa, Oryza sativa
MGSSGADAPTKTSKASAPQEQQPPASSSTATPAVYPDWANFQGYPPIPPHGFFPSPVASSPQGHPYMWGAQPMIPPYGTPPPPYVMYPPGVYAHPSMPPGAHPFTPYAMASPNGNADPTGTTTTAAAAAAGETDGKSSEGKEKSPIKRSKGSLGSLNMITGKNSTEHGKTSGASANGAISQSGESGSESSSEGSEANSQNDSHHKESGQEQDGEVRSSQNGVSRSPSQAKLNQTMAIMPMTSSGPVPAPTTNLNIGMDYWANTASSTPAIHGKATPTAAPGSMVPGEQWVQVCSISPSLQEPCTCNIFFPL

SEQ ID NO: 39036 - protein, 338 aa, Cordyceps bassiana
MAPVKVGINGFGRIGRIVFRNAVEHNDIDVVAVNDPFIEVKYAAYMLKYDSSHGLFKGEVAIDGNDLVINGKKVRFYGERDPAAIPWKETSAEYVVESTGVFTTTEKAKAHLQGGAKKVIISAPSADAPMYVMGVNEKSYDGSADVISNASCTTNCLAPLAKVIHDKFGIVEGLMTTIHSYTATQKTVDGPSAKDWRGGRGAAQNIIPSSTGAAKAVGKVIPELNGKLTGMSMRVPTANVSVVDLTARLEKGASYDAIKAAIKEAADGPLKGILGYTEDEVVSTDLNGNTNSSIFDAKAGISLNDNFVKLVSWYDNEWGYSRRVLDLISYVAKVDASK

SEQ ID NO: 39037 - protein, 562 aa, Bacillus licheniformis ATCC 14580
METKENPWWKKAVVYQIYPKSFKDTTGNGVGDIRGIIEKLDYIKELACDVIWLTPIYQSPQNDNGYDISDYYSIHEEYGTMADFEELLEEAHKRGIKVIMDLVVNHTSTEHRWFKEAASGKENLYRDFYIWKDMKPNGAPPTNWESKFGGSAWEFHAESGQYYLHLYDVTQADLNWENEAVRKKVYEMMHFWFEKGIDGFRLDVINVISKDQRFPDDDEGDGRRFYTDGPRVHEFLNEMNREVFSKYDSMTVGEMSSTTIADCIRYTNPESRELDMVFNFHHLKADYPNGEKWALADFDFLKLKKILSEWQTEMNKGGGWNALFWCNHDQPRIVSRYGDDGKYRKKSAKMLATAIHMLQGTPYIYQGEELGMTNPKFDDISLYRDVESLNMYRILKEAGKPEAEIIEILKAKSRDNSRTPVQWNGEENAGFTAGTPWIPVPDNYKEINAEEALNDPDSIFYHYKKLNELRKEFDIITTGDYQLILEDDQELYAYLRNGADEKLLVINNFYGKETEFQLPDDIDIEGYDAKVLISNDTDLPESFKRFTVKPYQSIVYHLAKPC

SEQ ID NO: 39038 - protein, 681 aa, Glycine max
MLLKLLPLLVFLLIPVSSQPNQLFYAGFKGLGSNNMTLDGVAEIEPNGVLKLTNDSSKVMGHAFYPTPFRFKNSSGGKAFSFSSSFALAIVPEFPKLGGHGLAFTIAPSKDLKAHPSQYLGILDSSNIGNFSNHLFAVEFDTAKDFEFGDIDDNHVGIDINSLASNASASAGYYTGDDDSSKQNLTLQSRVPILAWVDYDAAKSVVHVTISASSTKPKRPLLSYHVDLSPILKESMYVGFSASTGLLASSHYILGWSFKINGPAPPLDLSSLPQLPGPKKKHTSLIIGVSVSVVVLALCAVLFGIYMYRRYKNADVIEAWELEIGPHRYSYQELKKATKGFKDKELLGQGGFGSVYKGTLPNSNTQVAVKRISHDSNQGLREFVSEIASIGRLRHRNLVQLLGWCRRLGDLLLVYDFMENGSLDKYLFNEPETILSWEQRFKVIKDVASALLYLHEGYEQVVIHRDVKASNVLLDGELNGRLGDFGLARLYEHGTNPSTTRVVGTLGYLAPEVPRTGKATPSSDVFAFGALLLEVACGLRPLEPKAMPEDMVLVDCVWNKFKQGRILNMVDPKLNGVFNEREMLMVLKLGLLCSNGSPTARPSMRQVVRFLEGEVGVPDELRKPGEGGYQEGFDEFLHSLESSSFDQMNTGSYGRNRDMDSSFPSLTGTSLFSPHGKGQTM

SEQ ID NO: 39039 - protein, 287 aa, Aeropyrum pernix K1
MGLLINYPGVEFGVGFMSRLNIAVLQVASTREKDANLESVKRLASRVKNSPDIVLTPEYLMLDPTGLGRDAIYDAAEDLEGRWSRELSKIAESLGSCLLGHLFLKTPSGRVANAAVLYSRDGGIIGVYRKTHLFDAYGYVESSFTEPGDELWEPRKACGASIGVAICYELRFPEIFRTQSLVGGVDIFLVPAAWYRGPGKEEALSVLSRARAQENTSYVAVASNAGANFVGRSMIIHPLGYTLAQAPPWEWVLEHEIDLREIERARKSLPVLEHVKPHLYRYLMKQG

SEQ ID NO: 39040 - protein, 293 aa, Candida glabrata CBS138
MDSDLEIQNKTQVEHVDKMGDSDVPESVSNSANMLRSRFNIGPDSVRNHVIAFMGELCGTFMFLWCAYVIANIANHDVSLKDSPPHGSHPGQLIMIALGFGFSVMFSIWCFVGVSGGALNPAVSLSLALARAITPTRCVVMWIAQILGGMAAGGAASAMTPGPVKFDNGLGLGCSRTRGLFLEMFGTAILCLTVLMTAVEKGESNFMCALPIGISLFIGHLALTAYTGTGVNPARSFGAALAKRYFPHYHWIYWIGPLLGAILAWFVWQVLQWLDYANYVAREKEAAEKAKTH

SEQ ID NO: 39041 - protein, 355 aa, Pinus sylvestris
MSLLTDLINLDLSDITEKIIAEYIWIGGSGMDIRSKARTLSHPVTDPKDLPKLNYDGSSTGQAPGKDSEVILYPQAIFRDPFRRGNNILVICDTYTPAGEPIPTNKRANAQKYLAIQMLFAEEPWYGIEQEYTLLQKDVNWPLGWPVGGYPGPQGPYYCGTGADKAYGRDIVDAHYKACLYAGINISGINGEVMPGQWEFQVGPTVGISSGDQVWAARYLLERITEVAGVVLSFDPKPIQGDWNGAGAHTNYSTKSMREEGGIKVIKKAIEKLGLRHKEHIAAYGEGNERRLTGRHETADINTFSWGVANRGASIRVGRDTEREGKGYFEDRRPASNMDPYIVTSMIAETNHPLK

SEQ ID NO: 39042 - protein, 279 aa, Oryza sativa
  misc_feature (129)..(129): Xaa can be any naturally occurring amino acid
  unsure (1)..(279): unsure at all Xaa locations
MAATAAQAVAVKGSVAVPPCGSRGRRRGAVASVRMAAAAATSALRIGRRSPFLGRRLAVGPRRSRPVPRNLVAPVQMNLAFAKATKWWEKGLQPNMREVESAQDLVDSLTNAGDNLVIVDFFSPGCGGXRALHPKICQIAEQNPDVLFLQVNYEEHKSMCYSLHVHVLPFFRFYRGAQGRLCSFSCTNATIKKFRDALAKHKPDRCSLGPTRGLEESELLALAANKDLQFNYTKKPELVPSGDAAAAQELDRGSTKLSPPAKPLVKQGSEERSLVSSGR

SEQ ID NO: 39043 - protein, 438 aa, Oryza sativa (japonica cultivar-group); identical to SEQ ID NO: 1104

SEQ ID NO: 39044 - protein, 591 aa, Saccharomyces cerevisiae
MLCSVIQRQTREVSNTMSLDSYYLGFDLSTQQLKCLAINQDLKIVHSETVEFEKDLPHYHTKKGVYIHGDTIECPVAMWLGALDLVLSKYREAKFPLNKVMAVSGSCQQHGSVYWSSQAESLLEQLNKKPEKDLLHYVSSVAFARQTAPNWQDHSTAKQCQEFEECIGGPEKMAQLTGSRAHFRFTGPQILKIAQLEPEAYEKTKTISLVSNFLTSILVGHLVELEEADACGMNLYDIRERKFMYELLHLIDSSSKDKTIRQKLMRAPMKNLIAGTICKYFIEKYGFNTNCKVSPMTGDNLATICSLPLRKNDVLVSLGTSTTVLLVTDKYHPSPNYHLFIHPTLPNHYMGMICYCNGSLARERIRDELNKERENNYEKTNDWTLFNQAVLDDSESSENELGVYFPLGEIVPSVKAINKRVIFNPKTGMIEREVAKFKDKRHDAKNIVESQALSCRVRISPLLSDSNASSQQRLNEDTIVKFDYDESPLRDYLNKRPERTFFVGGASKNDAIVKKFAQVIGATKGNFRLETPNSCALGGCYKAMWSLLYDSNKIAVPFDKFLNDNFPWHVMESISDVDNENWIAIIPRLSP

SEQ ID NO: 39045 - protein, 684 aa, Trichodesmium erythraeum IMS101
MNLETISSGAHQEDFNSSSQKLDILEVEAMQLKNIDRDTLKSQSSTQTAESNTNTPRYDPEVITAFYSKRPLQVWKRRIDILWTFVLFAFNWWLDKVTGNAAKNERKRAIWLRGILTNLGPAFIKVGQALSTRPDLASPVYLDELTKLQDQLPAFPNEVAYHFIEEELGFPPKEVYAELTPDPIAAASLGQVYKGKLKTGEIVAVKVQRPGLAESIALDIYILRTLAIWANKNIQRLRSDLVAIMDEFGTRIFEEMDYTQEGRNAEKFKELYGHLKDIYIPKIYWLYTGRRVLTMEWITGTKLTNLEAIKEKNIDAKYLIEIGVQCSLRQLLEHGFFHADPHPGNLLASPDGKLVYLDFGMMSEVKPYQRYGLLEAIVHLVNRDFEGLAQDYVKLEFLTPETDLTPIIPALTGVFNNALGASVAELNFKSITDQLSALMYEYPFRVPAYYALIIRSLVTLEGIAINVDPNFKVLSKAYPYVAKRLLTDTSPELRNSLKDLLFKDGNFRWNRLENLLKNASNSDDYEISKVLDQALDFLLSERGDFIRVHLVNELINGLDLASINTLINARTKVSKWLGIKVEKTSIATSRNPQEEKRTEHIKNIWKIIQDTPGFDAMELVQLIPNILGKPEMQRMGQQVAGGLTQRALARLIRQLLLSPEHPDTDGNSHQSKTKPQLSLPAFLP

SEQ ID NO: 39046 - protein, 372 aa, Glycine max
MAPSLETSNGEAMHLKQVEEEQDGILFAMNMMSTMVYPFVVRTAIELGIFDIIAKAGEGAKLSAEEIIEQLGTKNPEAPTMLDRLLRLLASHSMLSSSLDTEDLQHGQNSPKRLYSLTYASKYFVTDADGVSFGATLNLLLDKVFLESWTELKGAILEGGVAFNRVHSMHSFEYPAVDPRFNDVFNKAMFNLTTIVMKRVLEFYEGFKNINRLVDVGGGLGINLNLITSKYPHVQGVNFDLPHVIEHAPTYPGIEHVGGDMFESVPNGDAIFMKWILHDWSDEQCLKLLKNCHKAIPSDGKVIVVDLILPILPESTVTAKSGFQADLLMMTQNSGGKERTQHEFMELALSSGFSGIKIVCSVSGFWVMEFYK

SEQ ID NO: 39047 - protein, 746 aa, Ustilago maydis 521
MSLVPQRSAPPPPSSSANRAASSLAFQPASTSNSASPTSSSTSTFANGSSSSTTAYRPQPTINTSVSALQGPRSGLPAQTGLAFSVSSLSNNPPAASPITAPSSALPWSSQNPAASGSTATFPPRPVRSNTAGPDTLHTISSVSASQTVAPVMVQRSHSSIAAHQASPSLNQSSPTLDADGPASLTTQSHFVHPSRDRERSRDGTTTPGSRNTFKSVFGGFVNSMSDVFSAQKKIEISTPYDPVHLTHVGFNSDTGEFTGLPKEWQQLLQESGISRQDQEANPQAVIDIVAFYQDATQSQGGSDVWKKMGAAKGNKAPATPRTDTSSEDGIYRVAPQPVLYEKPRTAPAPPGITHPNRPSEFGSPDLRQPPSNASTSSADTALRPSRSTPAPGAAPPPNAKTTSSSNPPPCKPSPASRAPDAPAAVSAASKNAKGPGSVPRRRETKKSTIKDSEVIAKLQAICTDADPTKLYRSLQKIGQGASGGVFTAYQVGTNVSVAIKQMNLEQQPKKDLIINEILVMKESRHRNIVNFIDSFLFKGDLWVVMEYMEGGSLTDVVTCNIMTEGQIAAVSREVLEGLRHLHQHGVIHRDIKSDNVLLSLQGDIKLTDFGFCAQIGESQAKRTTMVGTPYWMAPEVVTRKEYGPKVDIWSLGIMCIEMVEGEPPYLNENPLRALYLIATNGTPKINNPENLSNTFKDFLTTSLDVDAERRPDALGMLAHPFLKRSESLRTLTPLIKAAREQTRKS

SEQ ID NO: 39048 - protein, 248 aa, Brucella melitensis 16M
MAAHLADRVKSIRAVLFDKDGTLIDFDRTWFSISWQLAQWSAQGDEVLARALLDAGGYDWLAERFRANSVIAAGTVEDIVSLWHPGLAGPQLRSLIEKYDAYCIAEGARSAIAIEAVHETLAVLRGAGYRLGIATNDSEAGARVTAKALGIDHLFDVMIGYDTAARPKPFPDPLLYFAEKLGLSPHEIAMVGDNLHDLETAHAAGAGLAVGVLSGNSPREALEPHADLVLESVAGLPAILQPFVLPSA

SEQ ID NO: 39049 - protein, 504 aa, Pericallis cruenta
MSILTLICTFITGLMFYGLVNLLSRRASRLPPGPTPWPIIGNLMHLGKLPHHSLADLAKKYGPLIHVRLGSVDVVVASSASVAGQFLKVHDANFANRPPNSGAKHMAYNYHDMVFAPYGPRWRMLRKMCSMHLFSAKALADFRQVRQEEVMILTRVLAGTEQSAVKLDQQLNVCFANTLSRMMLDRRVFGDGDPKADDYKDMVVELMTLAGQFNIGDYIPWLDLLDLQGIVKRMKKVHSQFDSFLDTIIDEHTIGTGRHVDMLSTMISLKDNADGEGGKLSFIEIKALLLNLFSAGTDTSSSTVEWGIAELIRHPQLMKQAQEEMDIVIGKNRLVTEMDISQLTFLQAIVKETFRLHPATPLSLPRIASESCEVKGYHVPKGSILFVNVWAIARQSELWTDPLEFRPGRFLIPGEKPNVEVKPNDFEIVPFGGGRRICAGMSLGLRMVNLLIATLVQAFDWELANGLELEKLNMEEVFGISLQRVQPLLVHPRPRLARHVYGTG

SEQ ID NO: 39050 - protein, 177 aa, Helianthus annuus
MSIVPSLFGSRRSSIFDPFSLYVWDPFRDFPISTSSEVSRETSALVNARVDWKETPEAHVFKADLPGIKKEEVKVEVEDGNILQITGERNVEKEDKNDKWHRVERSSGKFTRRFRLPENAKMDQVKAAMENGVLTITVPKEEAKKPDVKSIEISVKKIYEFARFIVLDRLYDLYVFI

SEQ ID NO: 39051 - protein, 289 aa, Streptococcus mutans UA159
MDVTWTVKYITEFIGTALLVILGNGAVANVELKGTKGYKSGWVIITLGYGFGVMLPALMFGNVSGNHINPAFTLGLAISDLFPWKQVLPYILAQMLGAIFGQLIIVATHAPYYRQTESSDGILGTFSTISAVDDGTDASKKASLINGFLNEFAGSFVLFFGALALTKNYFGGEIVQQLNTMGTDVTSSTFKFSQVGLTVGANVNSGLAIAHLGLGFLVMALVASLGGPTGPALNPARDLGPRLLHHFLPESVLGKSKGNSKWWYSWVPVIAPILAGIAGVALFKYLYMK

SEQ ID NO: 39052 - protein, 155 aa, Helianthus annuus
MSIIPSLFAGRRSSVFDPFSLDVWDPFRDFPISSSSDVSRETSALVNARVDWKETPEAHVFKADLPGIKKEEVKVEVEDGNILQITGERNVEKEDKNDKWHRVERSSGKFTRRFRLPENAKMDQVKAAMENGVLTITVPKEEVKKPDVKSIEISG

SEQ ID NO: 39053 - protein, 873 aa, Nocardia farcinica IFM 10152
MLKHLARAGVLSARGAAEYSLAALRDRDPASRDRRRAEAVLDFLVRMGPIYIKMGQIAATRSDLFGPDWVSTLRVLQDQTPHMTAAQSRRAVERELGRPLTQVFRRFDAEPVASASVAQVHVAELLDGRKVAVKLVKDGVPEQIEESLKSIATLLRLLNRATPRLRELDVATRFDEIARLLRPQADMTHEAAQQRRIHANFAGHPYVTVPAVLDELVTSRMLVMQFMDGIPGKRVEEVGFPRDQLARRLQDVIYTMLYMHGVCHGDPHPGNVMFGPTGELILLDYGVTVELTEDEKWGLSSFYYACTRKEWHNAIDRFTRYFVLADEKLHRNRAAYDAEMAEVLRYHFDISSSQWSTISYFNDVSAVLRKYDSRYTTNFTKVELVFLSCEGFASQIDPDIDIWANARRFTDRYSPYMSAEVEARFAAGFAEQMPTSLRLRDRAQATLVAPTHIDRYFFPSGFPVFVESAAGGRVRDFDGNDYLDLSGGYGPHLLGYGHPAITEAITTGVRRGLVNGIGNPGEIELAEQLVRAFPAADKAVLCNSGTEAILFAIRMARGYRRRATVAKFEGHYHGFSDQGMVSSWFRFSGDRHRPDPVAGSQGVDPATVANTVVMQYGDLDGLARIREHADELACVILEPMPTSVVALNVEFLTALRGLCTELDIPLIFDEVVSGFRVAYGGVQVLADVHPDLTCLGKVIGGGLPCGAVVGRAELIDTAKSSQDPFYDYENKVFAGGTLSGNSLTCAAGLAVLRHLDAHREIYDELESNTQRLAGMLREATAQREIACRINASRSIFSLNFSHRAAGLYRDRMAGSNFKATIALAYYMRKHQVYLPELHSFLISAAHTTEDLDQIAHAFDKSLDEMLADNLFVL

SEQ ID NO: 39054 - protein, 81 aa, Brassica rapa
  misc_feature (57)..(57): Xaa can be any naturally occurring amino acid
  unsure (1)..(81): unsure at all Xaa locations
PKELRNLEGRLDRSINRIRSKKNELLFAEIDYMQKREVDLHSENQRLRAKIAENERXNPSMNLMPGGYEQTMQPPQTQSQP

SEQ ID NO: 39055 - protein, 271 aa, Thermus thermophilus HB27
MTTLEAFAKARSEGRAALIPYLTAGFPSREGFLQAVEEVLPYADLLEIGLPYSDPLGDGPVIQRASELALRKGMSVQGALELVREVRALTEKPLFLMTYLNPVLAWGPERFFGLFKQAGATGVILPDLPPDEDPGLVRLAQEIGLETVFLLAPTSTDARIATVVRHATGFVYAVSVTGVTGMRERLPEEVKDLVRRIKARTALPVAVGFGVSGKATAAQAAVADGVVVGSALVRALEEGRSLAPLLQEIRQGLQRLEANPGLKESSKKPLS

SEQ ID NO: 39056 - protein, 306 aa, Arabidopsis thaliana
  misc_feature (169)..(169): Xaa can be any naturally occurring amino acid
  unsure (1)..(306): unsure at all Xaa locations
IDSMNWLPEAEAEDDFKGLLSGDFFDDLINHLDVPLDDIDTTNGEGDWVDRFQDLEPPPMDMFPTLPSDLTSCGSGMAKAPRVDIQRNIPALKQSYSSEALSSTLHQSSAPPEIKVSKLFQSLSPVSVLENSYGSLSTHNNGSQRLAFPVKGMRSKRKRPTTLRLSYLXPSEPRKPEKSTPGKPESECYFSSEQHAKKKRKIHLTTRTVSSTLEASNSDGIVRKCTHCETTKTPQWREGPSGPKTLCNACGVRFRSGRLVPEYRPASSPTFIPAVHSNSHRKIIEMRRKDDEQFDSSMIRAVISRG

SEQ ID NO: 39057 - protein, 319 aa, Vibrio vulnificus YJ016
MGKLIEGVWHDVWYDTKQTKGKFVREDAGFRDWIENKPQAPFQPESGRYHLYVSLACPWAHRTLIFRKLKGLEEHIDVTVVCPDMLSDGWKMGLPEPLFGHTKLHQIYTQAKPDYTGRVTVPVLWDKKTNTIVSNESSEIIRMFNSAFNQLTGNQDDYYPDSLREVIEEWNAFIYPNINNGVYRCGFATTQEAYEEAYYALFSALDRVEHHLATHRYLAGSQMTEADWRLFTTLIRFDAVYVGHFKCNQKRIADYPHLNGYMKELYQIDGIAETTDFYHIKRHYYFSHIGINPTQVVPLGPNLDLDSDHGREGIGRQGI

SEQ ID NO: 39058 - protein, 318 aa, Cicer arietinum
MASQNRILVLGPTGAIGRHVVWASIKAGNPTYALIRKTPGDINKPSLVAAANPESKEELLQSFKAAGVILLEGDMNDHEALVKAIKQVDTVICTFGRLLILDQVKIIKAIKEAGNVKRFFPSEFGLDVDRHDAVDPVRPVFDEKASIRRVVEAEGVPYTYLCCHAFTGYFLRNLAQFDATEPPRDKVIILGDGNVKGAYVTEADVGTYTIRAANDPRTLNKAVHIRLPHNYLTSNEVVSLWEKKIGKTLEKSYISEEKVLKDINVSTFPHNYLLALYHSQQIKGDAVYEIDPAKDAEAYDLYPDVKYTTADEYLDQFV

SEQ ID NO: 39059 - protein, 374 aa, Solanum melongena
LQEFDPDQMGLAENQLCFDLIQEWIVNNPKASICTYEGVQDFQDIAIFQDYHGLPEFRKAVARFMEKVRGDRVTFDPERIVMSGGATGAHESLAFCLADPGDAFLVPTPYYPGFDRDLRWRTGVQLFPVVCESSNNFKVTKEALEEAYKKAQESNIKVKGLLINNPSNPLGTILDKETLKDILRFINDKNIHLVCDEIYAATALCQPSFISISEVMNEVVGCNDDLVHIVYSLSKDLGFPGFRVGIIYSYNDVVVNIARKMSSFGLVSTQTQRLIASMLSDTIFVENFIAKSAMKLSQRHDLFTKGLGQVGITTLKSNAGLFIWMDLRRFLENSTFDDELKLWHIIINKVKLNVSPGCSFHCSEPGWFRVCFAA

SEQ ID NO: 39060 - protein, 354 aa, Bacillus licheniformis ATCC 14580
MTVHFGLIGCGYMSRKHLQALAECDDAKLSAVSDLQEERMKEAEEYYASLAGEESRMTRYPQYQALLSDPKIEAVIIAAVSGLHAEMAKHALLAGKHVIVEKPMTLSLRDADELIELAEQNGLKLMVCHQMRHRPIMKKLKETIEEGKLGKIYLGTVSLRLNRSPAYYEAASWRGSWEKDGGMLVNQGIHLIDLLQWFLGDVKGVYGDMLGGSGAKETEDVAVGILTFASQAKGVVEANIVTQPNNIGSSLSIFGENGTISLEGPALNRISRWYIHGEKADAEEAAKLIDIGGEQTAMYQNFISALKRQDTLLVDGYEGKKAIETIFGIYQSVLQKQPVQLPLSSFQTTDMKNK

SEQ ID NO: 39061 - protein, 398 aa, Ustilago maydis 521
MRLLHISLTLLVLAATALAGNVLDLTATKDFDKHIGKSQSVLVKYYAPWCGHCKNLAPIYEKVADAFADQKDAVLIAKVDADKNKELGQKAGIRGFPTLKWYPAGSTEPEEFNSGRDLDSIAKLVTEKSGKKSAIKPPPPPAAEQLTSRNFDKIVLDQDKDVLVEFYAPWCGHCKNLNPTYQQVAQDFAGDDDCVVAQMDADNEANKPIAQRYGVSSYPTLMFFPKGDKSNPKPYNGGRSEEEFIKFLNEKCQTWRIKGGLLSELAGRMPTLDGFAARWYTSSTDKRDTIYNEFIDYVNTMKTSPKSDKKKNDVGDVYLRVLEKASKSAGYIEKETKRLSTILKKHADGTSQLAAKKVDELTKKKNVLLAFVNERIAAQAEKQKKEAEKRKEEHKDEL

SEQ ID NO: 39062 - protein, 572 aa, Enterobacter cloacae
MRAALQISQSGQTCALLSKVFPTRSHTVSAQGGITVALGNSHEDNWEWHMYDTVKGSDYIGDQDAIEYMCKTGPEAILELDHMGLPFSRLENGTIYQRPFGGQSKNFGGEQAARTAAAADRTGHALLHTLYQQNLKNHTTIFSEWYALDLVKNADGAIVGCTALCIETGEVVYFKARATVLATGGAGRIYQSTTNAHINTGDGVGMAIRAGVPVQDMEMWQFHPTGIAGAGVLVTEGCRGEGGYLLNKHGERFMERYAPNAKDLAGRDVVARSIMIEIREGRGCDGPWGPHAKLKLDHLGKEVLESRLPGILELSRTSRTFAHVDPVKEPIPVIPTCHYMMGGIPTKVTGQALTVNEQGEDVVIPGLFAVGEIACVSVHGANRLGGNSLLDLVVFGRAVGLHLQESIAEQGALRDATDDEIDASLERLNRWNGNRNGEDPVEIRKALQECMQHNFSVFREGDAMAKGLEQLKAIRERLKNARLDDTSSEFNTQRVECLELDNLMETAFATAMSANFRTESRGAHSRFDFPDRDDENWLCHSLYLPESESMTRRSVNMEPKLRPAFPPKIRTY

SEQ ID NO: 39063 - protein, 665 aa, Listeria monocytogenes str. 4b F2365
MSRIDEQMVNSIRVLSMDMIEKANSGHPGLPMGAAPMAFSLWKNHLKFNPEHPTWFNRDRFVLSAGHGSAMLYSLLHLFGYDLPMSELKNFRQTGSKTPGHPEFGHTVGVDATTGPLGQGFAMGVGMAMAEAHLGAKFNQPEFPVVDHNTYVLCGDGCLMEGISYEAASLAGHLKLGKLVVLYDSNDISLDGDLNESFSEDIELRFRAAGWQTLRVDDGNDLDALDAAIHLAKTEKSRPTLIEVKTVIGYGSPGKAGKSAAHGSPLGEKELKLAKEAYDWQMPPFELPKTVENQKEFYHSKGRASESSWLRTFNAYKQKYPALAESLQQLMDDNLDADWDAELPVFDENADKAVATREVSGIVLQELEKKLPNLFGGAADLASSNKTHLKASERFAPGNYAAKNISFGVREFAMGAAVNGMTLHGGVQAFGATFFVFSDYLRSAIRSAALMGIPSTFIMTHDSIAVGEDGPTHEPIEHLASFRAMPGLHVIRPADGNETVEAYRYAFTQKEQPTMLVLSRQNLPILPNSAAKAQTGLAKGAYILADSPLDKLDIILLASGSEVHLMTAVRDNLAKKGFGARVVSMPSFDLFDKQSPEYKESVLPKAVKNRFAAEMGASYGWHKYLGDTGQILAIDSFGMSGPGDELARRFGFTVENLTELALKQL

SEQ ID NO: 39064 - protein, 444 aa, Arabidopsis thaliana
  misc_feature (122)..(122): Xaa can be any naturally occurring amino acid
  unsure (1)..(444): unsure at all Xaa locations
MSFRGIVQDLRDGFGSLSRRSFDFRLSSLHKGKAQGSSFREYSSSRDLLSPVIVQTSRWANLPPELLFDVIKRLEESESNWPARKHVVACASVCRSWRAMCQEIVLGPEICGKLTFPVSLKXGPRDAMIQCFIKRDKSKLTFHLFLCLSPALLVENGKFLLSAKRTRRTTRTEYIISMDADNISRSSNSYLGKLRSNFLGTKFLVYDTQPPPNTSSSALITDRTSRSRFHSRRVSPKVPSGSYNIAQITYELNVLGTRGPRRMHCIMNSIPISSLEPGGSVPNQPEKLVPAPYSLDDSFRSNISFSKSSFDHRSLDFSSSRFSEMGISCDDNEEEASFRPLILKNKQPRWHEQLQCWCLNFRGRVTVASVKNFQLVAARQPQPQGTGAAAAPTSAPAHPEQDKVILQFGKVGKDMFTMDYRYPLSAFQAFAICLSSFDTKLACE

SEQ ID NO: 39065 - protein, 257 aa, Oryza sativa
MRIQCDACEAAAATVVCCADEAALCARCDVEIHAANKLASKHQRLPLDAALPAALPRCDVCQEKAAFIFCVEDRALFCRDCDEPIHVPGTLSGNHQRYLTTGIRVGFSSVCSANADHLPPPAPKGNSKPPASGIAAAAAPKPAVSAAAQEVPSSPFLPPSGWAVEDLLQLSDYESSDKKGSPIGFKDLEWLDDIDLFHVQSPAKGGSTAAEVPELFASPQPASNMGLYKASGARQSKKPRVEIPDDDEDFFIVPDLG

SEQ ID NO: 39066 - protein, 561 aa, Methanothermobacter thermautotrophicus str. Delta H
MINMNIGPYNNRPDMGRLREIIRVMTKYHFGNILEAVGLKNRLFETLKLYIKSPEEVHEPAHVRLRLVLEELGTTFIKLGQVLSTRADLVGREVAEELAKLQDEAPPFPFEDVKRVLESELGVPMEEVFAEFQEEPVASASIGQVHRARLRNGDAVAVKVQRPGIADTVKSDIILMKYLAKLANDRVPGLRYYNLPGIVAEFERAIRKELDYHQEANNVERFRAMFMDDETVYAPYVYREYSTGRVLTMEYVDGVKLTDILKSDIKFNARVIAERGARCYFKQIFIHGFFHADPHPGNILVQKGNVLCFLDFGMMGHLDRSFRDRLAELFILLMNYDVNGIVNQLRYMNILTEETDLEEVKYDIIDLLDRYYGADVRKVGEILTEFTMPGMIRRHRIRIPRDFVLLARVMSMAEDLGERLDPRFNGLAVAWEMTHKLIRNRLNPLRNLDEVPAAIIELEHIMNDLPRGLISALQKLEEGKLKMELEHRNLDEISVRIERSTNRISVAMLVSALIIGSSLVTIPREALILEKFPFLGIFGFAVSFLIALALIVSIIKSRRLS

SEQ ID NO: 39067 - protein, 432 aa, Aeropyrum pernix K1
MDVLASGEKSRMLFERTKELFPGGVNSPVRAAVKPYPFYVKRGEGAYLYTVDGARIVDLVLAYGPLILGHKHPRVLEAVEEALARGWLYGAPGEAEVLLAEKILGYVKRGGMIRFVNSGTEATMTAIRLARGYTGRDLILKFDGCYHGSHDAVLVAAGSAAAHYGVPTSAGVPEAVARLTLVTPYNDVEALERVFAEYGDRIAGVIVEPVIANAGVIPPRREFLAALQRLSRESGALLILDEVVTGFRLGLEGAQGYFNIEGDIIVLGKIIGGGFPVGAVAGSREVMSLLTPQGKVFNAGTFNAHPITMAAGLATLKALEEEPVYSVSREAAKALEEAASEVLDRTGLPYTINRVESMMQLFIGVEEVSNAAQARKADKKFYVKLHEEMLRRGVFIAPSNLEAVFTGLPHQGEALEIAVEGLRSSLKTVLGS

SEQ ID NO: 39068 - protein, 581 aa, Zea mays
  misc_feature (110)..(110): Xaa can be any naturally occurring amino acid
  misc_feature (237)..(237): Xaa can be any naturally occurring amino acid
  unsure (1)..(581): unsure at all Xaa locations
MAAASTLAFGHPKTLAAAGAKPLPAATSTSVSFPATHQPACLLSSPAPGSLRRRDVAAMVSAPPAVGTAMPSLDFDTSVFNKEKVSLAGHDEYIVRGGRNLSPLLPEAGXKQIGVIGWGSQGPAQAQNLRDSLAEAKSDIVVKIGLRKGSKSFEEARAAGFTEESGTLGDIWETVSGSDLVLLLISDAAQADNYEKIFSHMKPNSILGLSHGFLLGHLQSLGLDFPKNISVIAVCPXGMGPSVRRLYVQGKESHGAGINSSFAVHQDVDGRATDVALAWSVALGSPFTFATTLEQEYKSDIFGERGILLGAVHGIVEALFRRYTEQGMDEESAYKNTVEGITGIISKTISKKGMLEVYNSLSEEGKKEFNKAYSASFYPCMDILYECYEDVASGSEIRSVVLAGRRFYEKEGLPAFPMGNIDQTRMWKVGEKVRATRPEGDLGPLHAFTAGVYIALMMAQIEILRKKGHSYSEIINESVIESVDSLNPFMHARGVAFMVDNCSTTAPLGSRKWAPRFDYILTQQAFVAVDKDAPINLDLISNFLSDPVPGAIEVCAELRPPVDIFVPANPDFVRPELRQSS

SEQ ID NO: 39069 - protein, 467 aa, Triticum aestivum
  misc_feature (372)..(372): Xaa can be any naturally occurring amino acid
  misc_feature (380)..(380): Xaa can be any naturally occurring amino acid
  misc_feature (382)..(383): Xaa can be any naturally occurring amino acid
  misc_feature (407)..(407): Xaa can be any naturally occurring amino acid
  misc_feature (410)..(410): Xaa can be any naturally occurring amino acid
  misc_feature (439)..(439): Xaa can be any naturally occurring amino acid
  unsure (1)..(467): unsure at all Xaa locations
MTLRSIVRDLRESFGNLSRRNFEAKISSVPSLSGHHRGKSLESASDLQDSLVTNLQGNWASLPPELLRDVMKRLEEDDSNWPSRKDVVACASVCTTWREMCKDIVRNPEFCGKLTFPVSLKQPGSRDGLIQCFIKRDKSKLTYRLYLSLTSAVLDDNGKFLLSAKRSRRTTYTDYAISMDPKNISRSSSGYIGKLRSNFLGTKFIIYDTQPPYNASKLCPQERTSRRFSSRKVSPKVPAATGSYPIAQVNYELNVLGTRGPRRMQCTMNSIPTSAVDPDGVVPGQPKELLPRLFEESFRTTASSRYSTDFSSCRFSEFGGGPLREEGGDENAGDKESPLVLKNKSPRWHEQLQCWCLNFRGRVTVASVKNFXLIAAPAPXPXXSGGEAAPEPSSQTQPPQQQPNSAXAQXQPAGSSLSASSSSSHHDTVLLQFGKVSKXFHMDYRYRCRLSGLRICLTSFDTKLACE

SEQ ID NO: 39070 - protein, 438 aa, Alicyclobacillus vulcanalis
  misc_feature (238)..(238): Xaa can be any naturally occurring amino acid
  unsure (1)..(438): unsure at all Xaa locations
KVAMVERGTIGGTCVNIGCVPSKTLLRAGEINRLAMQHPFQGLATSAGRVDLGQLVNQKNELVERLRQNKYIDLIDEYGFMMIRGEARFVDPRTVEVNGNRISARFFLIATGASPDVPDIPGLRDVDYLVSTTALELREVPKRLAVIGSGYIAMELGQWLHNLGSEVVLMQRGQRVLKSYDSEISEAITRAFTEQGIEIITGATFQRVEQKGNVKRVYITVDGEEKVIEAEALLVATXRKPNTDSLNLQAANVQLGPRGEVLVDEYLQTSNPYIYAAGDVTMGPQFVYVAAYQGAIAAENALSGNRRRADLSVVPAVTFTHPSVATVGMTEEQAKRAGYEVLTSVLPLDAVPRALANRETNGVFKLVADATSRKLLGAHVVAENAGDVIYAALLAVKFGLTIEDLNSTLAPYLTMAEGLKLATLTFDKDVAKLSCCAG

SEQ ID NO: 39071 - protein, 219 aa, Magnetospirillum magnetotacticum MS-1
MLLFRKRPEMPAPSEALPGRPEALPTAERHFVNGQPLKGPYPEGIETVVLGLGCFWGAERKFWQLPQGIHVTAVGYAGGYTPNPTYEEVCTGRTGHNEVVLVAFDPAVLPLEAVLKTFFESHDPTQGYRQGNDVGTQYRSGIYTTSEAQAQTARAVRDTYARALDAKGYGPVTTEIVPLETFFFAEEYHQQYLAKNPGGYCGLGGTGVSCPVGVGVAAE

SEQ ID NO: 39072 - protein, 620 aa, Neurospora crassa
MSDKSITSLTSQDRREAEAQVVAEHLPAGYTAEFDPEHNSITTQHGSEATTHSQANKTVSAGSAEGSSSTRTRSTTPTPNEVEAGGAASSLKLQGGDIHRNIFKIDASAKLQQLHRRANTFHTPREFEQNTEVPMTVSDQLAPGGARRAFLHRKHGGGGNDFLAARMPITRNFVEFLDLYGSFAGEDLADSDEEAVEEEEEEEETRIGETTALLRHRRPSMRVPKARPHTAGTTKTFFTLIKAFVGTGIMFLPKAFANGGLLFSSLAMVIVSAVTMIAFHLLLQCTHHHGGGYGEIGAAIAGERMRTLILASITISQLGFVCAGIVFVAENLTSFLTAVTPGSQAPLSSVALIAIQVVLLVPLAWIRNISKLGPAALLADACILIGVSYIYQFDIRALAANGIHKSVVLFNPERYTLMIGSAIFTFEGIGLILPIQSSMAQPQRFEWLLAIVMVIITLVFTSVGALSYATFGTETQIEIINNFPQDSKLVNAVQFLYSVAVLVGTPVQLFPALRIIEGKVFGHRSGKRSQRTKWIKNMFRLGLLVLCAVVAVLGTGNLDKFVALIGSTACVPLVYVYPAYLHYKGVATARWAKVGDVAMMVLGVVCMVYTTAVTIYYSFM

SEQ ID NO: 39073 - protein, 180 aa, Salmonella typhimurium
GSMQTIKCVVVGDGAVGKTCLLISYTTNKFPSEYVPTVFDNYAVTVMIGGEPYTLGLFDTAGQEDYDRLRPLSYPQTDVFLVCFSVVSPSSFENVKEKWVPEITHHCPKTPFLLVGTQIDLRDDPSTIEKLAKNKQKPITPETAEKLARDLKAVKYVECSALTQKGLKNVFDEAILAALE

SEQ ID NO: 39074 - protein, 225 aa, Parachlamydia sp. UWE25
MNKNHPNPEELREYLDRRFGQEDAVLHHIRQNSVIKGLPSIQIPIYLGKLLHFLASTLQAKHILEIGTLGGYSTVWLARALPETGYMISLEANPQYCQIAQEHLHKAELSHLVKIRQGYAVDLLAQIATENLASFDFVFIDADKENNVLYLDWAIHLSQPGSLILIDNLIPKGKHVGYPNHEEAQTIYAFNDYLAVHPKLETVLIPTLVREGRLDGLALARVKKS

SEQ ID NO: 39075 - protein, 1044 aa, Clostridium perfringens str. 13
MRFISERIRKTYEEIGRYVYSNTLNIDNYKFIAGKYDNIDEIKNAPEKGWIDFKTGDLWGEESHGWFKTSVKVPEEFAGQTIALSFHTFLGDWDNTTNPQFILYVNGEHIQGLDVNHQETILTHNAVAGEVYDIDLHAHIGRIEGKKSTLHGKLVTIDEEARKLYFNLSVPHIVATKLHDEDKRRIDMLTVLNDTINLIDLRRPFTKEYNESLKIANKYIEENFYDKMCGHEDMVATCVGHTHIDVAWLWTVAQTREKVARSFSTVLKLMEEYPEYIFMSSQPQLYKFLKEDHPKVYEKVKEKVREGVWEPEGAMWLEADCNVTSGESLIRQILHGKRFFKEEFNVDNEILWLPDVFGYSAALPQILKKSDVNYFMTTKISWNQINKMPYDTFMWKGIDGTEILTHFITTTYPDQDPFKETMTTYCGNIHPGSIMGAWNRYQQKNINNDVLVAFGFGDGGGGATYEMLENGKRLSKGIPGAPKVKIGKAKDYFKKLEETVKDNNKLPKWVGELYLEYHRGTYTSMGRNKRDNRVCENLYTSAEKFNSMAMLLGKNYPLADLNAAWETILLNQFHDILPGSSIKEVYDVTKEEYKDLIEKGNNFVGSALDNITSEINLKERSVVVFNSLVFERDDIATFDVPEDIENPAVLDGEEEIICQRIDDWEKAIFFAKGIPANGYKSFKIIESTNKEVENVSLNEKEAENDFLRIKFNEEGNIVSLFDKRAEREVLKEGTLGNRLQAFEDKPMEYSNWDIDIYYKEKMWNVDDVQSIEVVEEGPVRSTLRIERKFLESTIVQNIYVYRDLDRIDFNSYVDWKEHEVLLKTSFPIDLNATEATYEIQYGNVKRPTHSNTSWDEARFEVCGQKWADLSEGDFGVSLLNNCKYGHDIQDGDMRLTLLKSGTHPWTETDQEEHFFTYSIYPHMGTWKEAHTVQKAYELNQPLYTRVCEKHEGILEDTLGLVKVNKDNIMIEVIKKAEDTDHLIIRMYEFFNSRTKSTLEFSREIEEAFECNLMERNLEEAKFEGEKIEFTINPFEIKTFKVKLK

SEQ ID NO: 39076 - protein, 128 aa, Brassica napus
MTPAIKAPLLPSHDPSSSSPPEEKHGSLAGAIFNVSTSIVGAGIMSIPAAFKVLGVIPSLSIIVIIAWLSNVSAGFLMKSTVAGDATTYAGVMKESFGKPGSVAVQVITMVVTFGSMIIFSIIIGKMF

SEQ ID NO: 39077 - protein, 413 aa, Corynebacterium glutamicum ATCC 13032
MSTLLAFVLGVVLMGLALPAYTKIKDRMRRHKSAVTLSENQVTTVGQVLHLAIQGSPTGITVVDRTGDVILSNGRAHELGIVHERSVDGNVWRVAQEAFQDQETHSLDVHPDRNPRRPGSRITAVQAVVKPLTLIDDRFVIIYASDESENVRMESARRDFVANVSHELKTPVGGMALLAEALMESSDDPEQVEYFGSRLHREAHRMADMINELISLSKLQGAERLPDMEPVQADDIISEAIERTQLAADNANIEIIRGDRTGVWVEADRSLLVTALANLISNAINYSPKSVPVSVSQSIRNDVVMIRVTDRGIGIAPEDQGRVFERFFRVDKARSRQTGGTGLGLAIVKHVMANHGGSISLWSRPGTGSTFTLELPVYHPESKEPAGSKQGPSLDSPIRTTASKASGRRKEKS

SEQ ID NO: 39078 - protein, 238 aa, Photobacterium profundum SS9
MMNYRVFETSDHVVQSLAETMLAFSQEGRPVHISLSGGSTPKLLFKTLAQSPFSEQIVWKNLHFWWGDERCVEPTDTESNFGEANELLFKHIALPNANIHRIRGEDEPEQESGRLAAEMDAVIPHKNGLPAFDWILLGMGTDGHTASLFPNQTNFNDPALTMIAAHPESGQLRISKTACLLENADRITYLVLGASKADVIKEINDQPAEALPYPAAKIKAVHGQTEWFLDSDAAKALV

SEQ ID NO: 39079 - protein, 503 aa, Ustilago maydis 521
MTPSAQVANVDPNPYFGDKVGDLASTSETYPKASRVDPARFLSQVSHDRPASAIRSLFPAELIPGMLSLLAGKPNPDTFPFESLSLNLKPEAEAGPTQLNIQGEDLVSALQYGATSGIPKLVQWITELQVHMHKREAVTPGSKLDGVAGRTPWRVTTGNGSQDLLNKTFDALLNPGDVILVESPAYTGILPSLVMIKANIVPVTSDDQGMMSSRLAEILANWETDPQTASLARPKCLYTTPTGANPAGTTASDERKRQILALARQYDFLVLEDDPYYYLHFEGLDQDAVTRPRCRSYWSLEEEHRERWGTGRVIRFESFSKILAAGLRLGFATGPNEILDAVDANTAMSNLQPSGLAGVVAYTLLNYWGIPGFLRHVDNVARYYAKRRDNFEAKANKVLGAAGVAQWVTPVAGMFLWLRLNLPPTGQGESEGDSFALISDKAKAAGVLAVPGVAFIPDGSKSCYVRTSFSIIAEDDVEEAFNRLRNVVLDAWKDAGKPMPELA

SEQ ID NO: 39080 - protein, 419 aa, Triticum aestivum
  misc_feature (176)..(176): Xaa can be any naturally occurring amino acid
  unsure (1)..(419): unsure at all Xaa locations
MIRPSSKESLNYDNNSQKVYPQPIDENMNQNMGSMIGRIFNNISSLKAAYIQLQEAHTPYDPDKIQTADKLVIDELTSLSELKHTYRERNPKPVAASPQDSRLLSEIQEQQNLLKTYEVMVKKFQSQIQNRDTEITHLQQQTDEAKHRKTKLEKKLKQRGLLNKESEESDEEESYXSVELTPSLFTSTADNAYQSIHEFSKPLINMMKAAGWDLDAAANAIEPDVVYTRRAHKKYAFESYICQRIFSGFHQENFLIDAANATVSNEAFFHQFLAVRAMDPLDVLSQNPDSVFGKFCRSKYLLLVHPKMEGSFFGNMDQRNYVMSGGHPRTPFYQAFLKLAKSIWLLHRLAYSFDPKVRVFQVKKASEFSEIHMESVVKNIVLDENAERPRVDLMVMPGFLIGTSVIQSRVYLSGVKCDD

SEQ ID NO: 39081 - protein, 336 aa, Euglena gracilis
MAQTIPDQTALPDTTNWQLSDLTLKETLGTGTFGRVRLCLHKSSGNYYAIKCLKKSEVLRMKQVEHILAEASILGSIRHPFIVNMLKTFQDDKRLYIVLEYVVGGELFSHLRKAGKFPNDVAKFYAAEVILAFEYIHSMDILYRDLKPENLLLDVGGHIKITDFGFAKKVPERTFTLCGTPEYLAPEIIQSKGHGKAVDWWALGILTYEMLVGYPPFFDESPFRIYEKILEGKVQFPKWVDGRAKDLIKGLLTTDHTKRLGTLKRGVTDIKKHKWFYGVDWDMLLARKIPAPIPVKVTTPGDSRYFDRYPESKEDKSQPLTPAQQELFKGFGPYST

SEQ ID NO: 39082 - protein, 517 aa, Zea mays
MAMAAIASPSSRTLIPPRHHGAAPSPSTSGDSSLRLLCAHPRHGRRGRAMSVSTPAARSRPFVFSPRAVSDSKSSQTCLDPDASTSVLGIILGGGAGTRLYPLTKKRAKPAVPLGANYRLIDIPVSNCLNSNISKIYVLTQFNSASLNRHLSRAYGNNIGGYKNDGFVEVLAAQQSPDNPNWFQGTADAVRQYLWLFEEHNVMEFLILAGDHLYRMDYEKFIQAHRETDADITVAALPMDEKRATAFGLMKIDEEGRIIEFAEKPKGDQLKAMMVDTTILGLDDERAKEMPYIASMGIYVFSKDVMLQLLREQFPGANDFGSEVIPGATSIGKRVQAYLYDGYWEDIGTIEAFYNANLGITKKPIPDFSFYDRSAPIYTQPRHLPPSKVLDADVTDSVIGEGCVIKNCKIHHSVVGLRSCISEGAIIEDTLLMGADYYETEADKKLLAENGGIPIGIGKNSHIRKAIIDKNARIGDNVKILNADNVQEAARETDGYFIKGGIVTVIKDALLPSGTVI

SEQ ID NO: 39083 - protein, 351 aa, Bacillus licheniformis ATCC 14580
MSRFFFWMMAAGVPLSVAGSLLHWPQVLLFIIYCLTIIALASYMGRATESLAIIAGPRIGGLLNATFGNAVELIISIFALREGLIGIVLASLTGSVLGNLLLVAGLSFFIGGLKYKRQEFNVYDARHNSGLLMFAVIVAFVIPEVFSAEMTEPRKLSMSVGISIIMILLYLAALYFKLVSHRGVYQTNQNEQEESHEEPEWSGKRATLILFLATVAVAYISEHLVHTFDTVAEQFGWSELFIGVIIVAIVGNAAEHASAVIMAYKDKMDVAVEIAIGSTLQIAMFVAPVLVISSLFFPTSMPLVFTLPELVAMASAVLLMIIISNDGDTNWFEGATLLAAYIIMGIGFFLL

SEQ ID NO: 39084 - protein, 579 aa, Zea mays; identical to SEQ ID NO: 1081

SEQ ID NO: 39085 - protein, 301 aa, Triticum aestivum
DYNQTHFVRNKEFKEAADKLQGPLRQIFVEFLERSCTAEFSGFLLYEELGRRLKKTNPVVAEIFSLMSRDEARHAGFLNKGLSDFNLALDLGFLTKARKYTFFKPKFIFYATYLSEKIGYWRYITIYRHLKENPEFQCYPIFKYFENWCQDENRHGDFFSALMKAQPQFLNDWQAKLWSRFFCLSVYVTMYLNDCQRTSFYEGIGLNTKEFDMHVIIETNRTTARIFPAVLDVENPEFKRKLDRMVVSYEKLLAIGETDDASFIKTLKRIPLVTSLAPEILAAYLMPPVESGSVDFAEFEP

SEQ ID NO: 39086 - protein, 273 aa, Methanothermobacter thermautotrophicus str. Delta H
MIVMSGAKSMSYAEMFRRADGCAFVPFVVAGDPDMETSLEIIRTLVDAGADALEVGFPFSDPIADGTSVQGADLRALRAGMTTEKCFQLIERVREFTSIPIGLLVYYNLIYRMGVDEFYRRAAEAGVTGILAADLPPEEASDALRAAEKYDIDQIFIVAPTTGSERLKRISEVSSGFHYLVSVMGVTGARSRVEDATIELIKRVKAEGSLPVMVGFGVSRPEHVRMLRDAGADGVIVGSAIIDVISGNLGDRELMLQRIHEMAGTLKAAGGSG

SEQ ID NO: 39087 - protein, 228 aa, Oryza sativa
  misc_feature (10)..(10): Xaa can be any naturally occurring amino acid
  misc_feature (144)..(144): Xaa can be any naturally occurring amino acid
  misc_feature (190)..(190): Xaa can be any naturally occurring amino acid
  unsure (1)..(228): unsure at all Xaa locations
HEGLYDSIAXGNFPEWKLFVQGIDPEEEERFDFDPLDDTKTWPEDEVPLRPVGRLVLNRNVDNFFNENEQLGFGPGLVVPGIYYSDDKMLQCRVFAYADTQRYRLGPNYLMLPVNAPKCAHHNNHYDGAMNFMHRDEEVDYYPXTPRPVVGRRQKATIHKQNDFKQPGERYRSWAPDRQERLHPPLRRRXAHPKVSPELRAIWVNYLSQCDESLGVKIANRLNVKPSM

SEQ ID NO: 39088 - protein, 254 aa, Brassica rapa subsp. rapa
MGRGRVEMKRIENKINRQVTFSKRRAGLLKKAHEISILCDAEVSLIVFSHKGKLFEYSSESCMEKVLERYERYSYAEKQLKAPDSHVNAQTNWSMEYSRLKAKIELLERNQRHYLGEDLESISIKELQNLEQQLDTSLKHIRSRKNQLMHESLNHLQRKEKEILEENSMLTKQIKERESILRTHQNQSEQQNRSHHVAPQPQPQLNPYMISHQASPFLNMGGMYQGEDPTAVRRNRLDLTLEPIYNCNLGYFAA

SEQ ID NO: 39089 - protein, 280 aa, Escherichia coli
EFGEVSVDDQLIGDRATQIKTLTNGCICCSRSNELEDALLDLLDNLDKGNIQFDRLVIECTGMADPGPIIQTFFSHEVLCQRYLLDGVIALVDAVHADEQMNQFTIAQSQVGYADRILLTKTDVAGEAEKLHERLARINARAPVYTVTHGDIDLGLLFNTNGFMLEENVVSTKPRFHFIADKQNDISSIVVELDYPVDISEVSRVMENLLLESADKLLRYKGMLWIDGEPNRLLFQGVQRLYSADWDRPWGDEKPHSTMVFIGIQLPEEEIRAAFAGLRK

SEQ ID NO: 39090 - protein, 122 aa, Arabidopsis thaliana
MNKGSIFKMDNDFEKRKAEAGRIREKYPDRIPVIVEKAEKSEVPNIDKKKYLVPSDLTVGQFVYVIRKRIKLSAEKAIFIFVDNVLPPTGELMSSVYEDKKDEDGFLYITYSGENTFGASSI

SEQ ID NO: 39091 - protein, 217 aa, Medicago sativa
MAGYRADDDYDYLFKVVLIGDSGVGKSNLLSRFTKNEFNLESKSTIGVEFATRTLNVDSKVIKAQIWDTAGQERYRAITSAYYRGAVGALLVYDVTRHGTFENVRQMAERTAKPHRFQHCCVLVGNKADLRHLVAVSTEDGKSYAEKESLYFMETSALEATNVENSFAEVLTQIYRILSKKAVEGAENGNASVPAKGEKIDLKNDVSALKRVGCCSS

SEQ ID NO: 39092 - protein, 424 aa, Methanosarcina acetivorans C2A
MVSEVTLDKSRQMYEKAKTLIPGGVSSPVRAIKPYPFYTASADGSKIRDLDGNEYIDYCLAYGPAVLGHNHPVIKAAIKEQLDKGWLYGTPTELEVTLAEKVAGYYPSIDMLRFVSTGTEATMSALRLARGFTRKNKFIKIEGGFHGAHDAVLVKAGSGATTLGEPDSLGIPADFTKYTLQAPYNDIETMTTLVEKNRDDLAAVIIEPVLGNIGPILPLPGYLKELRKLTKENDVLLIFDEVITGFRLAMGGAQEYFGVVPDMTTLGKIVGGGLPIGVFGGRREIMEMIAPSGAVYQAGTFSGSPCSVAAGIAVLDYLKKEDIHAKLNSTGDYMRAVVSEIVEDEGLDYTVCGIASMFKIFFGAEPHNYQEALKCDKEGYLSFFHRMLANGVFLPPSQFETNFISAAHSEEDIEKTLEAYVENL

SEQ ID NO: 39093 - protein, 466 aa, Nocardia farcinica IFM 10152
MEKSRVAPKSKVDTVANLAKRRGLVYPCGEIYGGTKSAWDYGPLGVELKENIKRQWWRSMVTSREDVVGLDSSVILPRQVWEASGHVATFTDPLVESLITHKRYRADHLLEAYEEKHGHPPANGLADIRDPETGEPGRWTEPRNFSGLLKTFLGPVDDEEGLHYLRPETAQGIFINYKNVETTARKKPPFGIAQIGKSFRNEITPGNFIFRTREFEQMEMEFFVKPGEDEQWHQYWIDTRLAWYTDLGIDPENLRLYEHPKEKLSHYSTRTVDIEYRFRFQGSEWGELEGVANRTDYDLKTHSEHSGTELSYFDQANNERYIPYVIEPAAGLTRSLMAFLVDAYAEDEAPNAKGGVDVRTVLRLDRRLAPVKAAVLPLSRNADLTPKAKDLAAQLRKHWNVEFDDAGAIGRRYRRQDEIGTPFCITVDFDTLEDQAVTIRERDSMAQERIALDKVEGYLAQHLIGV

SEQ ID NO: 39094 - protein, 662 aa, Debaryomyces hansenii CBS767
MSGPRKIQELTGSSSRRLSIAKLARSPISESPITSPSIRNGIHSHSFTANSPFLKEDSSRNYNECIESSSSKSSSKYNGSEVFHSGNEVADIPTLNGVETDFSTGMDDPKIMKQVHKHLRDQEVNALQMEGGDITRDLYKIADQEYRPKAPKRSRSLSSSEMETRRRGSTASSLNVPGGFRRQFIMNNTLRTRNPNFLTKNFVEFLSIYGHFAGEDLEDQNDLIACHYKAHIPNFDDSIDEESLLLPNQESVKINAKGTATDKKAYFLLLKAFIGTGVLFLPKAFSNGGLMFSSLVLAFFGLLSFWCYLILIHAKLATKVSSFGDIGLKLYGKWLQQLILTSIIISQIGFVAAYIVFTSENLKAFVGSVTSINTSDIHIMYFILIQLIIFLPLSLIRDITKLSLLALLANIFILIGLVTILYYSFYELLFLNHGAFGKDIEFFFNKESFSLFIGVSIFAFEGIGLIIPIQESMIYPNNFPRVLFLVIATISTIFIGIGSLGYLTFGKYVKTVIILNLPQDSPFVIMVQLLYAFAILLSTPLQLFPAIRLVELKLFTKTGKYSLRVKWLKNFFRFGFVLLTAVVALVGGQNLDRFVSFVGCFACIPLVYMYPPILHLKSCCKYSDTFNQAENRKRFWLGCLDCILVVIGGVAMIYTTYQIVVG

SEQ ID NO: 39095 - protein, 494 aa, Triticum aestivum
MSYNKTASITAETINPKVKIFDYEPCGEIARHAERLEQEMEKSPGSRPFPEITYCNLGNPQALGQRPITFFREVLSLCDNPALLRRDETRMLFSPCAINRARKIIESMPGRNSGAYTNSQGIRSLREAVASGIAARDGFPSRPEDIFLTDGASSAINLSMQILIRSQEDGVLCPLPEYPLYSASIILHGGTMVPYNLSEDGDWGLEIFEVKRCLEEARIAGLTVRAMVIINPGNPTGQVLSVTNQEEIVEFCRKEGLVMLADEVYQDNVYVEDRKFHSFKKVARSLGYDENDISIVSFHSVSMGFSGECGRRGGYMEICGFGDDVMGEIRKVASVTLCPNIGGQILTSLAMDPPKLGDGCFENFMAEKEDIRLSLAKRAKTLAGAFSSLEGMTCNRVEGAIYAFPRIHLPAAAIKAAKAEGMSPDLFYACRLLDATGIAVVPGSGFHQVSGRNKATGTWHIRCTILPGEDKIKVMIPRLKEFHESFMNEFRDRS

SEQ ID NO: 39096 - protein, 286 aa, Lactobacillus sakei subsp. sakei 23K
MQKLSALTAPMALSNGVTIPGLGYGTYQTPNEETKKAVLEALSVGYRHIDTAAVYGNEQGVGDALKESDIAREDIFVTSKLWNTERGYDATKAAFAKTIATLGVDYLDLYLIHWPANTKQFGAKAAELNAETWRAMEDLYNEGKIRAIGVSNFMPHHLDELMKTAVIKPMVDQIEVHPGWPQAEAVRYNQAHDILVEAWAPLGEASALSNETIAAIATKHGKTAAQVCLRWGIQQGVLPLPKSTHQERMAQNTDIFDFELTDAEMTQISALENLGGQCMVPDEVDF

SEQ ID NO: 39097 - protein, 428 aa, Candida albicans SC5314
MSIIDEYESLEVIGKGSFGTVRRVRHKDGQILVRKEIEYTSMTSQERNHIISELRILRELDHPHIVKYYRHDHIPEKKMIHIYMEYCEGGDLAKVIKNFRASKSRIPEEFVWQVLVQVLLALYRCHYGVDAEKVNLFKTASEPKYANSIIHRDIKPDNIFVGSCIKLGDFGLAKMLSANDFAKTYVGTPYYMSPEVLLDDPYSPVCDIWSLGCVLYELCTLEPPFKAKSHLQLQAKIKRGVIEEVPDFYSSQLRTLIRSCITVDPEERPTCFDLIDSLAVRFLRKEMELKEMNENLEEYKKQLLKRSKELKETSKELDEYKQELVRKSEELSKREKYLDEEFELRKQAIELESKEIRMEYQREFNLVVEQEVKRRLEQRKPHGPRPLEDVSPRSPLKERNRPRVTDALERLHLEKRHTPEFEYISKYR

SEQ ID NO: 39098 - protein, 581 aa, Methanococcoides burtonii DSM 6242
MDRYEQVIELAKRRGFLWNSFELYGGAAGFYDYGPLGCTLKRRIEQIWRELYVIHEGFMEIETPTVGIEDVFVASGHVGGFSDPLCECQECEEAFRADHLVDKIVEVADALSNEELDRLIKENDIGCPECGGKLGKAYEFNLMFKTNIGPGTGRQGYMRPETAQGMFINFQRLSRYYRDKLPFGATQIGKSYRNEISPRQGVIRLREFTQAEAEIFTHPKEKGHPNFERFAEVTLNLYSDEAQEKGAIEQMTVREAVENDIIAHEFLAYHIALTNHFLQRVGIAADKLRFRQHQKDEMAHYAIDCWDAEILTDRFGWIEVVGIADRTDFDLKAHAKTSGTKLEIHIEYDEPKMVEQFVVKPDMGKLGPLFKGKAKAVADALRELSEDELSKDEIKVIVNGEKFTVPSEIISYAQETVKVSGEKIVPHVIEPSYGIDRILYCTMEHAFDEEKVEVEGDEEEEERMVLRFRNEVAPVQVAILPLLTRDELIEPAKAIAQKLRERGLLVAYDDSRAIGRRYRRNDEIGTPYSITIDYDTLEDNSVTIRDRDTMKQVRASVEGIENSIYDLVYGKLDLENTGVSI

SEQ ID NO: 39099 - protein, 154 aa, Debaryomyces hansenii CBS767
MPVDPEKLAKLQKASVAKKVGGSRVKAKKNVKTEQDDTKLIEALGKLKAQKIEGIEEANFFKEDGKVLHFNRVGVQGAAQHNTFALTGYPQEKDVTQLIPQILPQLGAENLEILRKLAEQIQAGKNPELNAGGAEGAEEDIPDLIEGQKFDDVE

SEQ ID NO: 39100 - protein, 126 aa, Schizosaccharomyces pombe
MSAAEKKPASKAPAGKAPRDTMKSADKKRGKNRKETYSSYIYRVLKQVHPDTGISNQAMPILNSFVNDIFERIATEASKLAAYNKKSTISSREIQTAVRLILPGELAKHAVTEGTKSVTKYSSSAQ

SEQ ID NO: 39101 - protein, 405 aa, GIBBERELLA ZEAE PH-1
MASRNLSKALRGPARQLASAPRVQQRTFVSAARAAVRAGAVARPVASGPIQQQIRGVKTMDFAGHKEDVYERADWPQEKLLEYFKNDTLALIGYGSQGHGQGLNLRDNGLNVIVGVRKNGKSWKDAEQDGWVAGKNLFDVDEAIGRGTIVMNLLSDAAQSETWPAIKPQLVKGKTLYFSHGFSPVFKDLTKVEVPTDIDVILCAPKGSGRTVRSLFREGRGINSSFAVYQDVTGKAEEKAIALGVAIGSGYLYKTTFEKEVYSDLYGERGCLMGGIHGMFLAQYEVLRERGHSPSEAFNETVEEATQSLYPLIGANGMDWMYEACSTTARRGAIDWSPKFKDALKPVFNSLYDAVKDGSETKRSLEYNSQPDYREKYEAEMKEIRELEIWRAGKAVRSLRPENQK

SEQ ID NO: 39102 - protein, 245 aa, Frankia sp. EAN1pec
MGRLEDKVTIVTGAGSGIGKAAALLFAQEGAKVVCADMNGSEKDTAAEIGPNAVAVQVDVAVGAQVENMVDTAVREFGKLDVLYNNAGISGSFGPIHELDEETLDRLLAVNIKGVFFGIKYAVPVMLANGGGSIINTASNAGMVGWKHKAGYSAAKGGVVLLTKSAALDYAKSGIRVNAVCPGMTWTGLAAAQAPAPPEDLKVPNPMARFAKPSELAAAALFLASDESSFVTGVAMPVDGGYVAR

SEQ ID NO: 39103 - protein, 363 aa, Pseudomonas fluorescens
MNDIQLDQASVKKRPSGAYDATTRLAASWYVAMRSNELKDKPTELTLFGRPCVAWRGATGRAVVMDRHCSHLGANLADGRIKDGCIQCPFHHWRYDEQGQCVHIPGHNQAVRQLEPVPRGARQPTLVTAERYGYVWVWYGSPLPLHPLPEISAADVDNGDFMHLHFAFETTTAVLRIVENFYDAQHATPVHALPISAFELKLFDDWRQWPEVESLALAGAWFGAGIDFTVDRYFGPLGMLSRALGLNMSQMNLHFDGYPGGCVMTVALDGDVKYKLLQCVTPVSEGKNVMHMLISIKKVGGILRRATDFVLFGLQTRQAAGYDVKIWNGMKPDGGGAYSKYDKLVLKYRAFYRGWVDRVASER

SEQ ID NO: 39104 - protein, 445 aa, GIBBERELLA ZEAE PH-1
MSLTNASPEAVASAAKTASFTLATLPASERNNALEAIHAALTASKDDILAANAKDLELAKKAAAEGGLSQALVSRLDLGKKGKWEDMLKGILDVRDLNDPVGQIQMRTKLDDDLMMERVSCPIGVLLIIFEARPEVIANIASLAIKSGNAAILKGGKESTESFVAISKVISSALETTKVPNSAIQLVTTRDAIAELLAQDRYIDLVIPRGSNELVRYIKESTKIPVLGHADGLCHIYLTASADKEKAITAIVDSKTSYPAACNAVETLLVQESALNSVFPGVASALAAKGVSLRVDEASKAAITSLSLEGVQDATTQDYDTEHLSLTIGVKTVSSIDEAITHINTHGSHHTDAIMTSDSAEAERFMNEVDSAGVYWNAATRLADGMRYGFGTEVGISTNKIHSRGPVGLDGLTIYKYKIRGDYQATADYGDGEGKKPWKHEKLSL

SEQ ID NO: 39105 - protein, 414 aa, GIBBERELLA ZEAE PH-1
MTVATPRELPEFLRPLWAWIEATPVYVLVVLFIGLITLAVFELYVILHLVAPKPRPVHPAEKQYITSHPTTGRTQPQPLPCWYDRWLAERQDSEQHIKPSEAYPTPDAGNIEPAQVRLSVVFPAYNEEDRVIPTLVEAVAYLDEYFGRTTAPPTSSTSPSSKRHGRTAPKEELGGYEILVVDDGSRDKTVDVVLQFAQENGLHDILRVISLERNRGKGGATTHGFRHVRGEYILFADADGASRFCDAGKLIEGCEEVVDGSYRGIAIGSRAHLVGSEAVVKRSALRNFLMRSFHLVLMILTPPATSRIRDTQCGFKLFSRASLPHIIPYMHTEGWIFDIEMLMLAESAPATPVLGHDGSVIGTSPGIKVAEVPIEWHEVGGSKLNVIQDSIKMAIGLAVLRASWMFGVYRRRLT

SEQ ID NO: 39106 - protein, 500 aa, GIBBERELLA ZEAE PH-1
MASILTTTEAQTRRREQYHEADVVVVGAGVFGCTMAFALANQGRSVLLLERWLKEPDRIVGELLQPGGVASLQKLGLGHCVEGIDAKPCYGYTIFYHGEKVLVPYPGIDDEGSPTHAWGGHSTGDRSTRPSGCSFHHGRFINKLRESCIAHKNITVVETEVVKTLRGEVSDQILGVESRTMNKETGKKEQDYYFGQLTIIADGYDSKWRQEVLKTKPKVCSKFYALELIDCDLPQPGHGHVIIGNAFPILLYQIGTHETRALIDVPQGIPEASPENGGVRGYIRNFVLPALPPSIRPSAEKALEDGKIPRSMPNSWLPPTKQRANGAILLGDAMNMRHPLTGGGMTVAFNDVVILSELLHPDKVGDLGDSKLINNALEELYWRRKPLTGIINVLAQALYSLFAANDRQLRALQYGCFTYFKNGDTDGPVALLAGILQRPFILAYHFFSVAFLAIWLNACSVVGCGILGIFKFPLAIIDAVLILWKACIVFIPIMWRESFQ

SEQ ID NO: 39107 - protein, 528 aa, Kluyveromyces lactis
MSTNNRLLPHGRADELNNLENASSNNKGVTFTPHLLLSMLVACLGSLQYGYHMGELNAPEDYITCKAELNPGYADSFLGRLGLAQCIPLTDSQFGLITSVFSVGGLIGSLVAGPLADSYGRKPISYWNCSVGILGAVCLFSSNNYLGMLFGRLLAGISCGSLIVVTPLFINEMSPVHLKGSLGSMNQVSINCGILVTQSLAMLWANMLQWRWILLFGGLISLLNFGLLFRINESPRWLVSKGNMTDAEDVLSQLRGNSRQESRQEIDGWLQGSQPVRTFSDLEAHTNSQMNLGSNLNLERPSSTRSSLRDSESITVVEYWKDPKYKYPRRVITTILMAQQFCGINSIVFYGVKVIKKAFPDTAIIINFAISIVNVLMTFFSSPLVDHWGRKPLLISSSTLMSICSFMICFGIVGNAPMILVIFVILYITAFAGGLGPIPFLIISELSHPETVGVAQSYGTTMNWIATFMVGYGFPALNSVMDGYVFLLFSAVAICFSFYVYRFVPETKGKLDYTDIWKSHDPRIAYTQ

SEQ ID NO: 39108 - protein, 466 aa, Triticum aestivum
AYLGDLQNKFVQKSRLVPVRNSRDIVDPRVRCTIMYTSGTTGDPKGVLISNKSIITIVSAVDEFLHNSNEQIREDDVYISYLPLAHIFDRVIEEVFIHHGASIGFWRGDVKLLVEDIGELKPTIFCAVPRVLDRIYGGLQDKVSTGGFLKKTLFNVAYKYKQGNMIKGSKHEDAASIFDKLVFTKVKRGLGGRVRVILSGAAPLSNHVEEFLRVVTCSHVLQGYGLTETCAGSFVSLPNNMSMLGTVGPPVPYVGVRLESVPEMGYDALSKESPRGEICIRGDTLFSGYYKREDLTKEVLVDGWFHTGDIGEWQHDGSMKIIDRKKNIFKLSQGEYVAVENLENIFGQAPNVDSIWVYGNSFESCLVAVINPNKQGLERWAESNGVSGDFASICGDAKAKEFILEELSKTGKEKKLKGFEMIRAVHLEPVLFDMERDLITPTYKKKRPQLLKYYQGIIDEMYKSMK

SEQ ID NO: 39109 - protein, 136 aa, Brassica napus
  misc_feature (133)..(134): Xaa can be any naturally occurring amino acid
  unsure (1)..(136): unsure at all Xaa locations
MKLLHASLCLISLLLILPSIFAASSSEDFDFFYFVQQWPGSYCDTQRSCCFPTSGKPAADFGIHGLWPNYKDGTYPSNCDNTKPFDSSSISDLISSMQKSWPTLACPSGSGETFWEHEWEKHGTCSESVIDQXXYF

SEQ ID NO: 39110 - protein, 765 aa, Mesembryanthemum crystallinum
MASHIVGYPRMGPKRELKFALESFWDGKSTAEDLKKVSADLRSSIWKQMADAGIKYIPSNTFSYYDQVLDTTAMLGAVPPRYGWTGGEIEFDVYFSMARGNASVPAMEMTKWFDTNYHFIVPELGPEVNFSYASHKAVLEYKEAKALGVDTVPVLVGPVSYLLLSKQAKGVDKSFDLLSLLPKILPIYKEVVAELKEAGASWIQFDEPLLVMDLESHKLQAFSAAYADLESTLSGLNVVVETYFADVTAEAYKTLISLKGVTGYGFDLVRGTKTLDLVKAEFPSGKYLFAGVVDGRNIWANDLAASLATLEALEGVVGKDKLVVSTSCSFLHTAVDLINETKLDDEIKSWLAFAAQKVLEVNALAKALSGQKDEAFFSANAAALASRKSSPRVTNEAVQKAATALKGSDHRRATTVSSRLDAQQKKLNLPILPTTTIGSFPQTVELRRVRREYKAKKISEEEYVKAIKEEISKVVKLQEELDIDVLVHGEPERNDMVEYFGEQLSGFAFSANGWVQSYGSRCVKPPIIYGDVSRPNPMTVFWSSMAQSMTARPMKGMLTGPVTILNWSFVRNDQPRHETCYQIALAIKNEVEDLEKAGINVIQIDEAALREGLPLRKSEHDFYLKWAVHSFRITNVGVQDTTQIHTHMCYSNFNDIIHSIIDMDADVITIENSRSDEKLLSVFREGVKYGAGIGPGVYDIHSPRIPPTEELADRIRKMLAVLESNVLWVNPDCGLKTRKYGEVNPALSNMVAAAKQLRQELASAK

SEQ ID NO: 39111 - protein, 550 aa, Methanosarcina acetivorans C2A
MPETVIQYLLNRLKQLGIRDIFGVPGDYAFPINNAICDDKELRWIGCCNELNAAYAADGYARINGMSALSTTFGVGELSALCGIAGSYAEHNLVFHIVGMPATPVQERNALVHHTFGNGEFDQFMTMATPAVCAKTMLTPGNCIQEVERVIAAALGYRRPVYIAIPHDYVHENISHVHEKILSSQAPANVPVKSDPEVLEEAVSTIINRLSGAEKACIIPGIFVDRFGLKDLTTEVVNASGLPYVTMPMDKSVIDETNPSYLGLYMGQLVNPEIREFVESCDCVLTIGTILFDVNTGMFTAKLDRDRIISIVPYDVHIGYAGYTNLKMSDVLEELARRLRKRTDIRGPAARQPATPEVDAGSPITADYLYASCTKFFKPDDIIIADSGTSFYGLLPVFLPEGARLHSQTLWGAIGWATPASFGAALAAPDRRVILITGEGAHQMTAQEVSQFYRYGLKPIIFVLNNHGYLIERMLSRKLDYCYNDLAQWQYHKLPEALGCSGWVIRKATTCGDLDKIMAELDNAGTGAYVEITTPEMSAPPIMETVHSNL

SEQ ID NO: 39112 - protein, 764 aa, Solenostemon scutellarioides
MASHIVGYPRMGPKRELKFALESFWDGKSSAEDLEKCQLILGIHLKQMSDAGIKYIPSNTFSYYDQVLDTTAMLGAVPPRYNWTGGEIGFSTYFSMARGNASVPAMEMTKWFDTNYHFIVPELGPDVKFSYASHKAVNEYKEAKALGVDTVPVLVGPVSYLILSKPAKGVEKTFPLLSLLDKILPIYKEVIAELKAAGASWIQFDEPTLVLDLESHQLDAFTKAYAELESSLSGLSTLIETYFADVPAPAYKTLTSLSGISGFGFDLVRGAQTIELIKGGFPSGKYLFAGVVDGRNIWANDLASSITTLQALEGIVGKDKLVVSTSSSLLHTAVDLVNEPKLDQEIKSWLAFAAQKIVEVNALAKALTGHKDEAFFSPNAAAQASRKSSPRVNNEAVQKAAAALRGSEHRRVTNVSARLDAQQKKLNLPILPTTTIGSFPQTVELRRVRREFKPTRISEEEYVKAIKEEINKVVKLQEELDIDVLVHGEPERNDMVEYFGEQLSGFAFTANGWVQSYGSRCVKPPIIYGDVSRPKPMTVFWSTAAQSMTQRPMKGMLTGPVTILNWSFVRNDQPRFETCYQIALAIKDEVEDLEKAGITVIQIDEAALREGLPLRKSEHAFYLDWAVHSFRITNVGVQDTTQIHTHMCYSNFNDIIHSIINMDADVITIENSRSDEKLLSVFREGVKYGAGIGPGVYDIHSPRIPSTEEIADRINKMLAVLETNILWVNPDCGLKTRKYAEVKPALENMVAAAKLLRTQLASAK

SEQ ID NO: 39113 - protein, 485 aa, Debaryomyces hansenii CBS767
MAPVYTNSNGCPIPEPFATQRVGQHGPLLLQDFNLIDSLAHFDRERIPERVVHAKGSGAYGYFEVTDDISDVCSAAFLDTIGKKTKVLTRFSTVGGESGSADSARDPRGFSTKLYTEEGNLDLVYNNTPVFFIRDPSKFPHFIHTQKRNPETHLKDPTMFWDYLTSNQESIHQVMTLFSDRGTPASYREMNGYSGHTYKWSNKKGEWYYVQVHFISDQGVKTLTNEEAGELAGSNPDFAQEDLFKEIAKGNAPSWTCYIQTMTQEQAKKAPFSVFDLTKVWPHKDYPMRRFGKLVLNENPKNYFAEIEQAAFAPAHTVPYMEASADPVLQSRLFSYADTHRHRLGTNYTQIPVNCPITGRVFNPHMRDGGMNVNGNLGSHPNYLATSKPVEFKNFSIQEEQEVWEGAACPFHWKCTDKDYSQATALYNVLAKYPNQQKNLAHNVAVHVSGAETHIQDKVFDMFAKVHPELSANIKKEALQLSPRK

SEQ ID NO: 39114 - protein, 891 aa, Schizosaccharomyces pombe
MEYRTNNVPVGNETKSAALNALPKIKISDSPNRHHNLVDAFMQSPSYSTQPKSAVEPLGLSFSPGYISPSSQSPHHGPVRSPSSRKPLPASPSRTRDHSLRVPVSGHSYSADEKPRERRKVIGNYVLGKTIGAGSMGKVKDAHHLKTGEQFAIKIVTRLHPDITKAKAAASAEATKAAQSEKNKEIRTVREAALSTLLRHPYICEARDVYITNSHYYMVFEFVDGGQMLDYIISHGKLKEKQARKFERQIGSALSYLHQNSVVHRDLKIENILISKTGDIKIIDFGLSNLYRRQSRLRTFCGSLYFAAPELLNAQPYIGPEVDVWSFGIVLYVLVCGKVPFDDQNMSALHAKIKKGTVEYPSYLSSDCKGLLSRMLVTDPLKRATLEEVLNHPWMIRNYEGPPASFAPERSPITLPLDPEIIREMNGFDFGPPEKIVRELTKVISSEAYQSLAKTGFYSGPNSADKKKSFFEFRIRHAAHDIENPILPSLSMNTDIYDAFHPLISIYYLVSERRVYEKGGNWNRIAKTPVSSVPSSPVQPTSYNRTLPPMPEVVAYKGDEESPRVSRNTSLARRKPLPDTESHSPSPSATSSIKKNPSSIFRRFSSRRKQNKSSTSTLQNSAPLETSQSPPTPRTKPSHKPPVSYKNKLVTQSAIGRSTSVREGRYAGISSQMDSLNMDSTGPSASNMANAPPSVRNNRVLNPRGASLGHGRMSTSTTNRQKQILNETMGNPVDKNSTSPSKSTDKLDPIKPVFLKGLFSVSTTSTKSTESIQRDLMLVMGMLDIEYKEIKGGYACLYKPQGIRTPTKSTSVHTRRKPSYGSNSTTDSYGSVPDTVPLDDNGESPASNLAFEIYIVKVPILSLRGVSFHRISGNSWQYKTLASRILNELKL

SEQ ID NO: 39115 - protein, 303 aa, Photobacterium profundum SS9
MLDTLFPFKRNFLSRNGHKLHYVNEGQGEPVVMVHGNPSWSFYYRNLVTELSQNHQCIVPDHIGCGLSDKPDDAGYDYTLKNRIDDLEALLEHLEVRENITLVVHDWGGMIGMGYAARYPDRIKRLVILNTGAFHLPDTKPFPWALWICRNTLLGTGLVRGFNAFSSIASYIGVKRKPMSPEVRKAYVSPFNSWANRISTLRFVQDIPLRKGDRNYELVSEIAASLPKFSHVPTLICFGLKDFVFDKHFLAVWREKMPHATVHEFEDCGHYILEDASDEVVPLISDFMKMPLATDNKPSEADL

SEQ ID NO: 39116 - protein, 119 aa, Oryza sativa
MARTSFKLEHPLERRQAESARIREKYSDRIPVIVEKADKTDVPEIDKKKYLVPADLTVGQFVYVVRKRIKLSPEKAIFVFVKNTLPPTASLMSAIYEENKDEDGFLYMTYSGENTFGSA

SEQ ID NO: 39117 - protein, 338 aa, Sorghum bicolor
MMLSGHGGGRRLFTASQWQELEHQALIFKYMASGAPVPHDLVLPLRLATGVDTAPSLAFPPQPSPSLAYWGCYGAGAPFGRKAEDPEPGRCRRTDGKKWRCSREAHGESKYCEKHIHRGKSRSRKPVEVTSPAAAAYRPSALSISPPRAADAPPPSLAHPHQHLRHGAASAAAAARGAPGQATAGALQLHLDASLHAASPPPSYHRYAHSHAHYTPPPSLFPGGGGGYDYGQSKELREAELRRRHFHALGADLSLDKPLAATAAGSAAAEKPLRRFFDEWPRESGDTRPSSWAGAEDATQLSISIPAASPSDLAASAAARYHNGEPSGERKTPLLLVP

SEQ ID NO: 39118 - protein, 337 aa, Volvariella volvacea
MVVNVGINGFGRIGRIVYRNAVENDQINVVAINDPFIDLAYMVYMFKYDSVHGRFKGTVESKDGKLVINGKSITVFSEKDPAAIPWGTAGADYIVESTGVFTTTEKASAHLKGGAKKVIISAPSADAPMFVVGVNLDAYDPKYTVISNASCTTNCLAPLAKVIHDEFGIVEGLMTTVHATTATQKTVDGPSHKDWRGGRSVANNIIPSSTGAAKAVGKVIPSLNGKLTGMSFRVPTLDVSVVDLVVRLEKPTEYSAIKAALKKAAEGEYKGIIDYTEDPVVSTDFIGNPASSIFDASAGIQLNPNFVKLISWYDNEWGYSKRVCDLVVYVAGKDGNL

SEQ ID NO: 39119 - protein, 120 aa, Arabidopsis thaliana
  misc_feature (27)..(27): Xaa can be any naturally occurring amino acid
  unsure (1)..(120): unsure at all Xaa locations
ERSNVGLGYDIMRPPPQVEKEVGEKRXVGYHGTRRSIALEIKFSDVTAGCESPNEEKDASSQGLFKWVNEQFEILGFVVKHRRGVEASSSGVYLSQPGNKSLVSGMHKHNQGKMLEKKKK

SEQ ID NO: 39120 - protein, 370 aa, Schizosaccharomyces pombe
MVKRHKNTIGVWRLGKTLGTGSTSCVRLAKHAKTGDLAAIKIIPIRYASIGMEILMMRLLRHPNILRLYDVWTDHQHMYLALEYVPDGELFHYIRKHGPLSEREAAHYLSQILDAVAHCHRFRFRHRDLKLENILIKVNEQQIKIADFGMATVEPNDSCLENYCGSLHYLAPEIVSHKPYRGAPADVWSCGVILYSLLSNKLPFGGQNTDVIYNKIRHGAYDLPSSISSAAQDLLHRMLDVNPSTRITIPEFFSHPFLMGCTSLSSMDSTTPPTPSLSIDEIDPLVVDCMCVLWKKSSSKKVVRRLQQRDDNDEKYVYKVLSEILRDDMLKKQRFDENKYLSLYDLIHDNNLFTKALNKFRTKASENAAY

SEQ ID NO: 39121 - protein, 502 aa, Mycobacterium bovis AF2122/97
MTTLWQPHRNDYSPIPGRGVHARRGARRPRPRGGRAERPGTGQLTRSGRRALLVGLTAASVGVLYGYDLSAIAGALLSLSEEFELTTREQELLTTTAVLGQIAGALGGGILANAIGRKKSVVLIVAGYAVFALLGATSVSVPMLVVARLLLGVTIGLSVVVVPVYVAESAPAAVRGSLVTAYQLATLSGIVVGYLVGYLLAGSHGWRAMFGLAAAPATLLLPLLWRMPDTARWYLLKGRIADARSALRRIQPEADIDAELADMAAAVDERGGGIGEMVRRPYLRATLFVIALGFLVQITGINAIIYYSPRLFAAMGFAGYFAMLALPAMVQVAGLAAVCASLFLVDRLGRRPILLSGIATMITADAVLITVFANDSDGGTGLVLGFAGVLLFIIGFNFGFGSLVWVYAAESFPSRLRSMGSSLMLTSTLTANAIVAAFSLTMLRVLGGAGVFAVFGTFAVVAFVVVYRFAPETKGRKLEEIRHFWENGGRWPAERSPAADEP

SEQ ID NO: 39122 - protein, 210 aa, Methanococcoides burtonii DSM 6242
MLFMAFQIVFAAIALAILTSGVAERIKLSSFIVFGLLWTTLVYDPLAYWAWGDGWVGSMGALDFAGGTVVHISSGFGALALSFVIGKRIGFGKYSMEPENITTTLLGGALLWFGWFAFNAGNALAANAFVVTLISASSGALTWMGASWIKGKSSSLGMNSGAIAGLVAITPACGFVGPLAAIIIGGSAGILCYGTLLFCIYKKFDESLDA

SEQ ID NO: 39123 - protein, 327 aa, Yersinia pseudotuberculosis
MSLNEPIKKVSIVIPVYNEQESLPALIDRTTAACKLLTQAYEIILVDDGSSDNSTELLTAAANDPDSHIIAILLNRNYGQHSAIMAGFNQVSGDLIITLDADLQNPPEEIPRLVHVAEEGYDVVGTVRANRQDSLFRKTASRMINMMIQRATGKSMGDYGCMLRAYRRHIVEAMLHCHERSTFIPILANTFARRTTEITVHHAEREFGNSKYSLMRLINLMYDLITCLTTTPLRLLSLVGSAIALLGFTFSVLLVALRLIFGPEWAGGGVFTLFAVLFMFIGAQFVGMGLLGEYIGRIYNDVRARPRYFVQKVVGAEQTENNQDVEK

SEQ ID NO: 39124 - protein, 95 aa, Brassica oleracea var. capitata
MGRGRVEMKRIENKINRQVTFSKRRAGLLKKAHEISILCDAEVSLIVFSHKGKLFEYSSESCMEKVLEHYERYSYAEKQLKVPDSHVNAQTNWSM

SEQ ID NO: 39125 - protein, 168 aa, Triticum aestivum
MAPTVMASSVTSVDPFQGLMSTAGLPVSRRSDGASLGSVSNGGRIRCMQVWPIEGIKKFETLSYLPPFSTEALLKQVDYLIRSKWVPCLEFSKVGFIFREHNASPGYYDGRYWTMWKLAMFGCTDATQVINEVEEVKKEYPDAYVRIIGFDNMRQVQCVSFIAFKPPG

SEQ ID NO: 39126 - protein, 160 aa, Triticum aestivum
  misc_feature (52)..(52): Xaa can be any naturally occurring amino acid
  unsure (1)..(160): unsure at all Xaa locations
MSLIPRGKAFDPFSLDLSDPFDGFPFGSGGISSFFPSFPRASSETAAFAGAXGDFDWKETPEAHVFKADVPGLKKEEVKVEVEDGNVLQISGERNKEQEEKTGTWHRVERSSGKFLRRFRLPDNAKADQIKAAMENGVLTVTVPKKEVKEPEVKSIQISG

SEQ ID NO: 39127 - protein, 179 aa, Bradyrhizobium sp. BTAi1
MRASRSRPTSRTGPMRPSRSCPRKPHGKGAGNPSRHYRDPPARCRRHQRQCDAAFSQRVCEDVANAYLEGLEHRADAGGDVSRIGSVASFFVSRIDSMINALIDENSPKPKSGRTKRLEPLKGRIAVANAKLAYQRYKRLFATPRWNGLAARGARAQRLLWASTGPKTRPIPTCSTSRS

SEQ ID NO: 39128 - protein, 95 aa, Brassica oleracea var. gongylodes
MGRGRVEMKRIESKINRQVTFSKRRAGLLKKAHEISILCDAEVSLIVFSHKGKLFEYSSESCMEKVLEHYERYSYAEKQLKVPDSHVNAQTNWSV

SEQ ID NO: 39129 - protein, 442 aa, Frankia sp. EAN1pec
MRLVGTVEGLELPSHPDYPRLRLTPEGLRAEFVARGWATGAGAAPWAVWADGLLYTADVGRIRALTRQGKHCVILAPVGGADPADAAHHLRVRCLLAALDAIDAPPRPAEATLAHEPVASDAVSRDGGRTHPASPPEPAHTAALAPESRRHRSMLVLVPVVPSERLAAPREPAMSATAPGGLADEAASEPALDEIAELTALRAHLAEVYGCAGSLTGPAIGAPGADDLTTLLDAGVPLPAELTPPAVAAELTRAVPPRRQRGLTILFTGLSGSGKSTLAGLLVCRLLERGRRVTLLDGDIVRTHLSQGLGFSRADRDTNVRRIGFVAAEVAGAGGIAVCAPIAPYDDVRAQVRAMTTARGGGFVLVYVSTPLEVCEARDRKGLYAKARAGVIPAFTGVSDPYEEPADADVVVDTAGLPTEQAVDRVLAHLVEAGWVEGARGQ

SEQ ID NO: 39130 - protein, 95 aa, Brassica oleracea var. italica
MGRGRVEMKRIENKINRQVTFSKRRAGLLKKAHEISILCDAEVSLIVFSHKGKLFEYSSESCMEKVLERYERYSYAEKQLKAPDSHVNAQTNWSV

SEQ ID NO: 39131 - protein, 541 aa, Streptococcus agalactiae NEM316
MTIDKRKVVYQIYPKSYKDTTGNGVGDLRGIIEKLPYLAELGIDMVWLNPFYPSPQRDNGYDISDYTAINPDFGKMDDFEEMIEVGRQYRIDFMLDMVLNHCSIEHEWFKKALAGDRYYQDFFILRDNPTDWVSKFGGNAWSPFGDTGKYYLHLFDITQADLNWRNADVRKELFKVVNFWRDKGVKGFRFDVINLIGKDEILENCPINDGKPAYTDRPITHDYLKMLNNASFGQADSFMTVGEMSSTTIANCILYTAPEREELSMAFNFHHLKVDYKDGQKWTIMAFDFPALRDLFHSWGEGMSEGNGWNALFYNNHDQPRALNRFVDVKRFRNEGATMLAASIHLSRGTPYIYMGEEIGMLDPDYSSMDDYVDIESLNAYQIMLDEGKSQEEAFSIIRAKSRDNSRVPMQWDDSTNAGFSEGAPWLKVGKSYKEINVAKEKTGLIFTFYQELIRLRKQLPIIADGNYKAAFKDNEKVYAFERHLDKQKLLVLNNFFAEKVKIKLPENYLQGQVLLSNYKDVTLDETVTLQPYQTLAILVS

SEQ ID NO: 39132 - protein, 635 aa, Xanthomonas campestris
MSFDSSDSRNGGPRHVSRRHFVQGLASGGAVATLGLWPQLSWALKGSGQSNVLSGTEFDLAIGETPVNFTGRARPAITVNGSIPAPLLRWREGTTVNLRVSNVLPAESIHGHETSIHWHGILLPANMDGVPGLSFAGIGRGDTYHYRFTVQQGGTYWYHSHSAFQEQAGLYGPLVIDPIEPEPFSFDRDYVVMLSDWTDLDPAALFARLKKMAGHDNYYRRTVGDFVRDAREDGLKATLADRKMWGQMRMTPTDLSDVNANTYTYLMNGTTSLGNWTGLFRSGEKVRLRFINGSAMTYFDVRIPGLKMTVVAADGQYVHPVSVDEFRIAVAETFDVIVEPSGQDAFTIFAQDSGRTGYISGTLAVREGLRAPVPSVDPRPILTMADMGMDHGGMSGMSMSASDSSDSSDSSNKPAMAMNMAGMAHEPGQRSPAGADADPHAGHDMSGMQSGSMPGMDHGAGMQAHPPSEDRNPLVDNQAMTPTSRMDDPGNGLRGNGRTVLTYAMLKSTFEDPDGRAPGREIELHLTGHMEKFAWGFNGQKFSDVTPLRLNYGERLRIVLVNDTMMSHPIHLHGMWSDLEDDGGNFQVRKHTVDMPPGSKRTYRVRADALGTWAYHCHLLYHMEAGMMRAVKVEE

SEQ ID NO: 39133 - protein, 113 aa, Glycine max
  misc_feature (45)..(45): Xaa can be any naturally occurring amino acid
  unsure (1)..(113): unsure at all Xaa locations
TRQDCITHILPVIVNFSQDKSWRVRYMVANQLYELCEAVGPEPTXTEFVPAYVRLLRDNEAEVRIAAAGKVTKFCRILNPDLSIQHILPCVKELSTDSLQHVRSALASVIMGM

SEQ ID NO: 39134 - protein, 200 aa, Arabidopsis thaliana
MESHNVSNSLNLDMEMDQEKAFDYSKRAQWLRAAVLGANDGLVSTASLMMGVGAVKQDVKVMILSGFAGLVAGACSMAIGEFVSVYSQYDIEVAQMKRENGGQVEKEKLPSPMQAAAASALAFSLGAIVPLMAAAFVKDYHVKIGAIVAAVTLALVMFGWLGPVLGKAPVFKSSARVLIGGWLAMAVTFGLTKLIGTQSL

SEQ ID NO: 39135 - protein, 285 aa, Streptococcus agalactiae NEM316
MTSPEERYSSLRRFATEIRLNTLETLNHLGFGHYGGSLSIVETLAILYGDIMDINPEKFKESDRNYMVLSKGHAGPALYSTLYLKGFFDKTFLHSLNTNGTKLPSHPDRNLTPGIDVTTGSLGQGISIATGIAYAQKIENSSYYTYTIVGDGELNEGQCWEAIQFAAHHQLHHLIVFVDDNKKQLDGLTADICNPGDFVAKFEAFGFDAVRVKGDDIEAIDKAIKTFQDSNSVKPKCIVLDSIKGQGVKELEELASNHHLRPDLQQKTMLERAVISLRESLEVVE

SEQ ID NO: 39136 - protein, 247 aa, Methanosarcina acetivorans C2A
MEEIEQTGQEETGAQPMPEEDVVAEAKPALEKEAAVKTGSIPSESEDETASHKEGSTSLVSIDEYLAAGVHIGTQQKTQDMMRFVYRVRTDGLYVLDIQSTDERIRVASKLLSHYDPARILVVSSRQYGQHPARMFSRALGTRAMLGRFIPGSLTNPQIHGFFEPDVIIVTDPAGDAQVLKEASSIGVPVVALCDTNNLTSNVDLVIPTNNKGRKALSLVYWLLAREVSRLNDTPFNYELTDFETPL

SEQ ID NO: 39137 - protein, 367 aa, Glycine max
MQKKKKNRNEVVLCSAEGTGGCSRLAAMDLASNLGGKIDKAEVLSAVQKYEKYHVCYGGQEEERKANYTDMVNKYYDLVTSFYEFGWGESFHFAPRWKGESLRESIKRHEHFLPLQLGLKPGQKVLDVGCGIGGPLREISRFSSTSITGLNNNEYQITRGKELNRIAGVDKTCNFVKADFMKMPFPDNSFDAVYAIEATCHAPDAYGCYKEIFRVLKPGQYFAAYEWCMTDSFDPQNPEHQKIKAEIEIGDGLPDIRLTAKCLEALKQAGFEVIWEKDLAVDSPLPWYLPLDKSHFSLSSFRLTAVGRLFTKNMVKVLEYVGLAPKGSLRVQDFLEKAAEGLVEGGKREIFTPMYFFLARKPDLDRN

SEQ ID NO: 39138 - protein, 494 aa, Arabidopsis thaliana; identical to SEQ ID NO: 1426

SEQ ID NO: 39139 - protein, 464 aa, Agrobacterium tumefaciens str. C58
MKELVDGKFAGLFGGVHVLPFFNPIDGADAGFDPTDHTIVDPRLGDWEDVRALSGSVEIMADLIVNHVSSQSGAFTDFIAKGSASEFADMFMTFDKVFPDGATEEDLLRIYRPRPGLPFSKVTLADGTQRMLWTTFTPEQIDIDVHSAKGTTYLETILDRFSEANVTAIRLDAAGYAIKKAGSSCFMIDDTYAFLEEVAGKARNRGMEVLVEIHSYHRDQIEIAKKVDRVYDFALPPLILHALFTGDATPLAKWLAISPRNAITVLDTHDGIGVIDVGAHSDGRAGLLEPQAIDNLVGEIHRRSDGQSRQATGAAASNLDLYQVNCTYYDALGRNDNDYLIARAIQFFAPGIPQVYYVGLLGGVNDMDLLAKTGVGRDINRHYYGNDEIGTALETPLFHRLSNLIRFRNTHPAFGGALKATIADAGALVLSWQHGDAFAELKISFADRKASIAASGQSEMQIVE

SEQ ID NO: 39140 - protein, 261 aa, Xylella fastidiosa 9a5c
MRTMTQSRWRLDGRTALITGASTGIGLAVARELLGLGADVLLVARNADLLGRVRDELAEEFPERELHGLAADVADDVDRRAILDWVEDCSNGLHVLINNAGGNVTRAALEYTEDEWREIFEINLFSAFELCRYTQPLLACHASTAIVNIGSVSGLTHVRSGVPYGMSKAALHQMTRNLAVEWAEDGIRVNAVAPWYIRTRRTSEPLSDVYYYEQVIERTPMRRIGEPEEVAAAVAFLCLPASSYVTGECIAVDGGFMRYGF

SEQ ID NO: 39141 - protein, 230 aa, Lycopersicon esculentum
MASNSAFSLFLILLIITQCLSVLNAAKDFDFFYFVQQWPGSYCDTKQSCCYPTTGKPAADFGIHGLWPNNNDGTYPSNCDPNSPYDQSQISDLISSMQQNWPTLACPSGSGSTFWSHEWEKHGTCAESVLTNQHAYFKKALDLKNQIDLLSILQGADIHPDGESYDLVNIRNAIKSAIGYTPWIQCNVDQSGNSQLYQVYICVDGSGSSLIECPIFPGGKCGTSIEFPTF

SEQ ID NO: 39142 - protein, 554 aa, Medicago truncatula
MTMEPNPTSDHILDWLEGSVSFFPSFLDDPYNNGYIHEYEIWNQNQDISNQYQIDANTNSSNATNSTTNIVAASTTTSTTSLEPNSFNNIPFSDLPKKRNAEDELSLKKQPQNQKNKRLKSRPMNESDNGDAALEGTVVRKSGGNKKGAAKANGSNSNNGNNKDGRWAEQLLNPCAVAITGGNLNRVQHLLYVLHELASTTGDANHRLAAHGLRALTHHLSSSSSSTPSGTITFASTEPRFFQKSLLKFYEFSPWFSFPNNIANASILQVLAEEPNNLRTLHILDIGVSHGVQWPTFLEALSRRPGGPPPLVRLTVVNASSSTENDQNMETPFSIGPCGDTFSSGLLGYAQSLNVNLQIKKLDNHPLQTLNAKSVDTSSDETLIVCAQFRLHHLNHNNPDERSEFLKVLRGMEPKGVILSENNMECCCSSCGDFATGFSRRVEYLWRFLDSTSSAFKNRDSDERKMMEGEAAKALTNQREMNERREKWCERMKEAGFAGEVFGEDAIDGGRALLRKYDNNWEMKVEENSTSVELWWKSQPVSFCSLWKLDKQPE

SEQ ID NO: 39143 - protein, 324 aa, Bacillus licheniformis ATCC 14580
MEEALTKEKAVWMYQKMLEIRYFEDQVHQLFAKGILPGFVHLYAGEEAVAAGVCAHLNDEDTITSTHRGHGHCIAKGCDLKGMMAEIYGKSAGLCKGKGGSMHIADFDKGMLGANGIVGGGFPLACGAALTAKYKKTKNVSVCFFGDGANNQGTFHEGINLAAIWKLPVIFVAENNGYGEATPFSYASSCESIADRAAAYGIPGVRVDGKDAAAVFQAAGRAIERAKNGEGPTLIECMTYRNYGHFEGDAQRYKTNEEKAVHQEEKDAIAVFKSELLAKGLMSEEEQSRIEKEVEEAVEEAVAFSEKSAYPEETELLTDVYVSY

SEQ ID NO: 39144 - protein, 321 aa, Synechococcus sp. CC9605
MPPAVVQTAEWGVQSTWQWKGWPCHWRVSGPEAGPALLLLHGFGAASGHWRHCAPRLADQGWRVYSLDLLGFGQSAQPARPMDNRLWALQVCAFLDQVVQRPAVVIGNSLGGLTALTAAVLAPNRVRAVVAAPLPDPALIQPLPKRRAPCRRRWQRRLLALVLHVLPLELVVPLIARTGLLKAGLQGAYWKSIQSDPELLQLIARPARRPTAARALRGMSLGMGNRPRGATAPALLEQLRVPMLLIWGRQDRFVPLAVGKSVAASHTALELKVLDRCGHCPHDEAPDRFLAVLLPWLDRNLGGPDRQGTTSGDETHPFGGG

SEQ ID NO: 39145 - protein, 458 aa, Bacillus licheniformis ATCC 14580
MTLAIIGGGPAGYVAAITAAKNSREVILIEDGSLGGTCLNEGCIPTKALLESADMFEKIKSAGAFGIGLSGESPTVQWEAVQSRKREIIQRLAGGIEYLMNKNKIKVLQGKASFLSEHDILVEKDGKQEVINAGHVIIAAGAAPAALPFASFDGSWIIHSGDAMSLPSIPETIFIIGGGIIGCEFASIYSRLGANVIIAEQAEQILPEEDPDIAAFLRTSLEESGVRVFTSVQVERLDPARQRVFLKNGDDSFNIQADRCLVAVGRKPRTDDLKLDHIGVQYDRKGIHVNQHMQTNIPHIYACGDITGGVQLAHAAFHEGTVAASHASGRDMKVNSDIIPRCIYTSPEIASVGLNEKKARERYRDVRIGEFPFSSNGKALILNETAGKVKIIIEPEYQEIVGVSIVGPGATELIGQAAVMLHAELTADAMEHFIAAHPTLSETIHEALLQAAGRAIHC

SEQ ID NO: 39146 - protein, 162 aa, Yarrowia lipolytica CLIB122
MPVDPAKLAALQKKSGAQSGGKGTPRRPGKKVAGRNISEDEKKLSATLKKFNAQEITGISEVNMFKEDGTVLHFPKVHVEGSVASNTFAISGPSQQKDIAELIPDILPQMGQDALLQLQQAAVQFSKLQEQAKKTAGGPDAAKEAGDDEIPNLVENFEDNVE

SEQ ID NO: 39147 - protein, 544 aa, Yarrowia lipolytica CLIB122
MVLSEHVNADKLLSNLTGKGDEHAIRALIASHTLRDPYSSKYNSQEPIPKFRIPEEGCEEKQAYQLIKDDLDLDGKPNLNLASFVNTYISDRAEKLAVENLTKNLADADEYPALMTVHARCVSILGHLWNNTDHEKAIGTATTGSSEAIHLGGLAMKKRWQEKRRAAGKSTEKPNILMAANAQVALEKFARYFDVEDRIIPVREASKHCLDLSKIKENLDENTIGIFVIMGSTYTGHYEDVQGVAKILDEYEKETGHSIDIHVDGASGAMVAPFLYPDLEWDFRVPRVKSINTSGHKFGLTTAGLGWILWRDAKYLPKELIFELHYLGGKEESYTLNFSRPGFPVLHQYYNFLHLGFDGYKQLHASSMANARLLSVFLEATGHYTCVSEIHLPANGSKPKDVKHVATADPLQYMAGLPVVAFRFSDSFRKAHPEVPQAAVSTLLRVKGYIIPNYELPPSEQKTEILRVVVRQSMSIDLLDRLMEDISAITNVLLEAVEDVKKLRAEGDHDPQLIHKYVLTLVTGKPVEEREEDWEGHSTFRAAC

SEQ ID NO: 39148 - protein, 380 aa, GIBBERELLA ZEAE PH-1
MDSAARQQPQVQPCRYKVGKTLGAGSYSVVKECVHIDTGRYYAAKVINKRLMAGREHMVRNEIAVLKKVSMGHQNILTLVDYFETMNNLYLVTDLALGGELFDRICRKGSYFESDAADLVRATLSAVAYLHDHGIVHRDLKPENLLFRTPEDNADLLIADFGLSRIMDEEQFHVLTTTCGTPGYMAPEIFKKTGHGKPVDLWALGVITYFLLCGYTPFDRDSDFEEMQAILNADYSFTPIEYWRGVSAHAKDFIQRCLTIDSTKRITAHEALQHPFVAGFINAEGESQNLLPNIKKNFNARRTLHAAIDTVRAINKLREAQSGLMDGARSKEPSRGAAQQTPTNRKHPTSHPRCNPATTEIELSKLPKVSGAQRRAVRIR

SEQ ID NO: 39149 - protein, 516 aa, Arabidopsis thaliana
MAFTNVCLWTLLAFMLTWTVFYVTNRGKKATQLADAVVEEREDGATDVIIVGAGVGGSALAYALAKDGRRVHVIERDLREPERIMGEFMQPGGRLMLSKLGLEDCLEGIDAQKATGMTVYKDGKEAVASFPVDNNNFPFDPSARSFHNGRFVQRLRQKASSLPNVRLEEGTVKSLIEEKGVIKGVTYKNSAGEETTALAPLTVVCDGCYSNLRRSLNDNNAEVLSYQVGFISKNCQLEEPEKLKLIMSKPSFTMLYQISSTDVRCVFEVLPNNIPSISNGEMATFVKNTIAPQVPLKLRKIFLKGIDEGEHIKAMPTKKMTATLSEKKGVILLGDAFNMRHPAIASGMMVLLSDILILRRLLQPLSNLGNAQKISQVIKSFYDIRKPMSATVNTLGNAFSQVLVASTDEAKEAMRQGCYDYLSSGGFRTSGMMALLGGMNPRPISLIYHLCAITLSSIGHLLSPFPSPLRIWHSLRLFGLAMKMLVPHLKAEGVSQMLFPVNAAAYSKSYMAATAL

SEQ ID NO: 39150 - protein, 448 aa, Sulfolobus solfataricus P2
MSIAGRIERLPWTSFHTRLLAILTLGEFFELYDLFTGGFVASQIASFYKVSSATGIYYTVAIFFLGAFVGAIIFNYIGDSVGRRTALIINMTITSIALLLIPFSPNILTLGILRFLAGVGVGPEAILVLDVLVTEFFPSNVRGKALAIGYTIAWTAPIVVAVLAYFLLPHKYFLYGWQWLFIIGGLGILTIIPFRFLIPESPRWLESKGRLDEAEKTVRKMEEIAIKEKGQLGEPIQVQVITSQRVKISELFSPLYRKRTVMLWIFEFLQAGVYYGFASLAPSVLFAKGFTLVHTLQYTMIIYTSYFISSLASIFIIDSQKFDRKWQVSIVMLLMGLVGLAFGFSSSPLEAVVTGFTFGFLSNIFSNAFHQYGAELYPTRVRAFADGVQYSLSRLGNYIWLTLLPIVLYSNGPVAMYTIVFIMALIVTLDVAILGPKASKIELEELSK

SEQ ID NO: 39151 - protein, 96 aa, Neisseria meningitidis Z2491
MTIRPLHDRVVVKRLEAEEKTASGIVLPGAAAEKPDMGEVIAVGAGKIGKDGARRPLDVKVGDKIIFGKYSGQTVKADGEELLVMREEDIFGIVEK

SEQ ID NO: 39152 - protein, 544 aa, Neisseria meningitidis Z2491
MAAKDVQFGNEVRQKMVNGVNILANAVRVTLGPKGRNVVVDRAFGGPHITKDGVTVAKEIELKDKFENMGAQMVKEVASKTNDVAGDGTTTATVLAQSIVAEGMKYVTAGMNPTDLKRGIDKAVAALVEELKNIAKPCDTSKEIAQVGSISANSDEQVGAIIAEAMEKVGKEGVITVEDGKSLENELDVVEGMQFDRGYLSPYFINDAEKQIAGLDNPFVLLFDKKISNIRDLLPVLEQVAKASRPLLIIAEDVEGEALATLVVNNIRGILKTVAVKAPGFGDRRKAMLQDIAILTGGTVISEEVGLSLEKATLDDLGQAKRIEIGKENTTIIDGFGDAAQIEARVAEIRQQIETATSDYDKEKLQERVAKLAGGVAVIKVGAATEVEMKEKKDRVEDALHATRAAVEEGVVAGGGVALLRARAALENLHTGNADQDAGVQIVLRAVESPLRQIVANAGGEPSVVVNKVLEGKGNYGYNAGSGEYGDMIEMGVLDPAKVTRSALQHAASIAGLMLTTDCMIAEIPEDKPAMPDMGGMGGMGGMM

SEQ ID NO: 39153 - protein, 470 aa, Zea mays
MAGAQEAGDAPGHQPCARRVLVFPLPFQGHIDPMLHLAGVLHARGLAVTVLHTRFNALDPARHPEFQFVAVPDGTPADVAATGRIIDIILAMNAAMEASPAVGEALRASAVAGQDGRPRASCLFVDANLLAVHRAARALGLPTLVLRTGSAACLGCFLAYPMLHEKGYLPPQESQLCTPVPELPPLRVKDLIYSKHSDHELMRKVLARGSETVRDCSGVVINTAEALEAAELGRLRDELVHLPVVLAAGPLHKLSSSRGAGSSLLAPDHSCIEWLDAQRPGSVLYVSFGSLAAMDSSELREVAWGLAECGHPFLWVVRPNMVRGCDVDSARQLPDGFEDAVKGRGVVVRWAPQQEVLAHRAVGGFWSHCGWNSTLEAVSEGVPMICRPDAVDQMMNTRYLQDVWGVGFELQGELERGKIKDAVRKLMGEREGAEMRRAAQELCAKLAGCLESTGSSQVAIDKLVSYILSL

SEQ ID NO: 39154 - protein, 437 aa, Corynebacterium glutamicum ATCC 13032
MTHMTSSNTARSAEWFEKAQKLTPGGVNSPVRAFGSVGGQARFIEKAHGSTLIDVDGNEYVDLVCSWGPMLMGHAHPAVVEAVQKAVVDGLSFGAPTIGEVELAQDIVKRTSVEEVRLVNSGTEATMSAVRLARGYTQRSKILKFEGCYHGHVDALLASAGSGVATFALPDSPGITGAQTSDTIVVPYNDIEAVRNAFAEYPGEIACIIAEAAGGNMGTVAPKDNFNDKLLAIAHADGALLILDEVMTGFRTSYRGWFGVDKVAADLVTFGKVVSGGLPAAAFGGKAEIMNMLAPQGPVYQAGTLSGNPVAVAAGRASLKLADESLYTTINANADRLHGLISDALTHEGVAHHIQRASNMLSIRFAEGEGHNFSDMKAADIFRFAPFFHTLLDNGVYAPPSVFETWFVSSALTDDDFSKIEQALKPAARAAAEAKAS

SEQ ID NO: 39155 - protein, 215 aa, Cucumis sativus
EIKRIENTTNRQVTFCKRRNGLLKKAYELSVLCDAEVALIVFSSRGRLYEYANNSVKATIDRYKKASSDSSNTGSTSEANTQFYQQEAAKLRVQIGNLQNPNRNMLGESLSSLTAKDLKGLETKLEKGISRIRSKKNELLFAEIEYMRKREIDLHNNNQMLRAKIAESERNVNMMGGEFELMQSHPYDPRDFFQVNGLQHNHQYPRQDNMALQLV

SEQ ID NO: 39156 - protein, 963 aa, Thermus thermophilus HB27
MASRAETAVLARFQRALLGDLEPTEILRNFLEVATEEGVERAALFLYRPEARELVGEVASGRGRRYTVSSVALPLHAKGPVQEAFFAEGPLRRGEEWLLPVVGEEEAFCWADPERRCREHPRATRETRALICPSCPRFRPLGVLTLERVPSRLQPLLPLLAQLTALALKNGALLKERDAALRRLSQHAERLAHVSAASRELARALEPDAVMAVLAGILRERLGFYRVTVALVREGALVGHLTRRGEDLYWTEGRSRIRLPVATSPDPMAQAVRERRTRIVPREALPPHLAEGVGASVAYVPVLVEEEALGCVAVDHGPGGPPVTEEEVEYVELLAGVAGVALRNAQLYRERTALSLALAAERKRLSEVLEELPDGVVVLLGERGFANTRAREVLGVEAEVGLGDLPATLAPALEGGRAEVRLGGRTYSVRGRRLGEMRVLVLHEITERVRMERALREQAAFTQALVDLAQEALSAPGLEALAAAIARRLQVLFGAEEALVGMAEAELRLLYATRPLEGPLPRPNLLERALEEGKPLVLETLAEGSCALAEAWGLRSALVIPFRAQGFKGGLLLGYRRPRRWASGWEGRLAQVGLLLALVLEKARLLAYLEAEEERLRALLEHSQDVVYVLDEEARIRFVSPSVGAVLGYDPEGYRRAALDALAFVHPEDQERARALFQELLARPEATLRGEFRLLHQDGTPIPVEAWGRNLLKDPRVGGVVVNVRDLRPRLEAERLKGEFLAAVSHELRTPLAAILGLAELLRQEPLPPEAQESVELILESAFRLKNMVDNLLDTSRLEAGRFEVSRRPVHLKPLLLELARSFQGVARLSGVEFRVEVEELPLMEVDPDRIVQVVGNLLANAFKFTPPGGSVRLWAGVRGEEVWVEVQDTGPGIPKEEIPRLFQRYARAKHPGVRGVAGTGLGLFISKHIVEAHGGRIEVESEEGKGSLFRVILPLYGPHPGD

SEQ ID NO: 39157 - protein, 256 aa, Austrodanthonia laevis
CELDNIMRLTGITGIVNGMDVSEWDPVKDKYITVKYDATTAVAAKALNKEALQAEVGLPVDQKVPLVAFIGRLEEQKGPDVMAAAIRELMEEDVQIILLGTGKKKFERMLTAAEEKYPGKVRAVVKFNAALAHHIMAGADLLAVTSRFEPCGLIQLQGMRYGTPCACASTGGLVDTVVEGKTGFHMGRLSVDCKVVEPADVQKVVKTLKRAIKVVGTPAYEEMIRNCMALDLSWKVPAKNWENVLLSMGVAGSEPG

SEQ ID NO: 39158 - protein, 264 aa, Zea mays
MLAIFQKQVAHAPQELNSPRGSTAKPKNPDEILRDFHAAHPSDAFSTSFGGGAALACIAAQPRNLAAGGYQRMFCGLDDIYCVFMGTLDNLSALMRQYGLTGRSTNEALLVIEAYRTLRDRGPYPADQVVKDLSGSFAFVVFDNRGRSGSGAAVFAAQSTDGGVPLHWGVAADGSVVICDDRAVAKAGCGRSYAPFPPGCMFHSEGGLKSFEHPMNRLKALPRVDSEGVMCGANFKVDAFTKINSMPRVGSATNWAATWDEAAI

SEQ ID NO: 39159 - protein, 271 aa, Cucumis sativus
MSIQLLPAIARRLEGKVAVITGGARGIGEQTAKLFFKHGAKVVIADIQDHLGQTLCKDLGQSSSVFVHCDVTKEKDVETAVDTAVSKYGKLDIMLNNAGVFEESPNFDILKDDPLTFQRVVNVNLVGASLGTRHAARVMKPAGRGSIVTTASICSVIGGIGTHAYTSSKHGVLGLMRNAAVDLGRYGIRVNCVSPNVVPTEMGRKLFKVKDGGEFPSFYWSLKNGDILREEDVGEAVVYLGSDESKCVSGLNLIVDGGFTVVNQALCSFRS

SEQ ID NO: 39160 - protein, 466 aa, Thermosynechococcus elongatus BP-1
MSLWRPTAILLASDLPLIPPTRLRAMTLPTFVDLNLDPFWMPFTANRQFKQSPRLLVSAAGMYYRSIDGREILDGTAGLWCVNAGHCRPEIISAIAQQAATLDFAPTFQMGHPGPFQVADRLRRITPDPLNHVFFANSGSEAVDTALKIALAYHRLRGEGTRQRLIGRERGYHGVGFGGISVGGIAPNRKFFGSLLAGVDHLPHTHNLEHNAFSKGQPTWGAHLADELERLVALHDASTIAAVIVEPLAGSTGVLIPPQGYLERLRAICDRYGILLIFDEVITGFGRLGAPFASQYFGVTPDLITVAKGLTNAAVPMGAVIVRDEIYETFMQGPAGQIEFFHGYTYSGHPLACAAALATLEIYEKEALFERAASLAPYWQEAIHSLRGLPHVIDIRNLGLVAGIELAPREGQGGPRGYDALCRAFEAGLLIRVTGDIIALSPPLIVERSHIDQMVDILSRVLQELP

SEQ ID NO: 39161 - protein, 256 aa, Centropodia glauca
CELDNIMRLTGITGIVNGVDVSEWNPSKDKYITVKYDATTAVAAKALDKEALQAEVGLPVDRKIPLVAFVGRLEEQKGPDVMAAAIPEIMEEDVQIILLGTGKKKFERLFKSAEEKYPNKVRAVVKFNAPLAHHIMAGADLLAVTSRFEPCGLIQLQGMRYGTPCACTSTGGLVDTVVEGKTGFHMGRLSVDCNVVEPADVAKVATTLKRAIKVVGTPAYEEMVKNCMALDLSWKGPAKNWETVLLSMGVAGSEPG

SEQ ID NO: 39162 - protein, 516 aa, Shewanella oneidensis MR-1
MTTPVDAPKWPRQIPYIIASEACERFSFYGMRNILTPFLMTALLLSIPEELRGAVAKDVFHSFVIGVYFFPLLGGWIADRFFGKYNTILWLSLIYCVGHAFLAIFEHSVQGFYTGLFLIALGSGGIKPLVSSFMGDQFDQSNKSLAQKAFDMFYFTINFGSFFASLSMPLLLKNFGAAVAFGIPGVLMFVATVFFWLGRKRYIHMPPEPKDPHGFLPVIRSALLTKVEGKGNIGLVLALIGGVSAAYALVNIPTLGIVAGLCCAMVLVMGFVGAGASLQLERARKSHPDAAVDGVRSVLRILVLFALVTPFWSLFDQKASTWILQANDMVKPQWFEPAMMQALNPLLVMLLIPFNNFVLYPAIERMGVKLTALRKMGAGIAITGLSWIVVGTIQLMMDGGSALSIFWQILPYALLTFGEVLVSATGLEFAYSQAPKAMKGTIMSFWTLSVTVGNLWVLLANVSVKSPTVTEQIVQTGMSVTAFQMFFFAGFAILAAIVFALYARSYQMQDHYRQAT

SEQ ID NO: 39163 - protein, 256 aa, Karroochloa purpurea
CELDNIMRLTGITGIVNGMDVSEWDPVKDKYITVKYDATTAVAAKALNKEALQAEVGLPVDRKVPLVAFIGRLEEQKGPDVMAAAIPELMEEDVQIILLGTGKKKFERMLTAAEEKYPGKVRAVVKFNAPLAHHIMAGADLLAVTSRFEPCGLIQLQGMRYGTPCACASTGGLVDTVVEGKTGFHMGRLSVDCKIVEPADVQKVTKTLKRAIKVVGTPAYEEMIRNCMALDLSWKVPAKNWENVLLSMGVAGSEPG

SEQ ID NO: 39164 - protein, 231 aa, Lycopodium annotinum
MGRGKIEIKRIENATSRQVTFSKRRGGLLKKAHELSVLCDAQVALIIFSSTGKLFEYASPSMKEILDRYGKYPEGVQTGTVTDPNNDVMLQYLNREVIRMKQQIERTHQTQRHMMGEDLAILPLKDLQQLEEQLDIGLRRIRARKDQLLVEQLEELHRKERHWLEENEALRRKLAGGQALSGPVPSPLSIVNPLETREPPSLGTVSLPFSVQFNQQNMQDTPNLQTSLQLG

SEQ ID NO: 39165 - protein, 256 aa, Merxmuellera macowanii
CELDNIMRLTGITGIVNGMDVSEWDPSKDKYITLKYDATTAVAAKALNKEALQAEVGLPVDRKIPLVAFIGRLEEQKGPDVMAAAIPQLMEEDVQIVLLGTGKKKFERMLMSAEEKYPGKVRAVVKFNAALAHHIMAGADLLAVTSRFEPCGLIQLQGMRYGTPCACASTGGLVDTVVEGKIGFHMGRLSVDCKVVEPADVQKVATTLKRAIKVVGTPAYEEMVRNCMAQDLSWKGPAKNWENVLLSMGVAGSEPG

SEQ ID NO: 39166 - protein, 492 aa, Oryza sativa (japonica cultivar-group)
MDPYKHRPSSSFNGPLWSTNSGAPVWNNNNSLTVGSRGPILLEDYHLVEKLANFDRERIPERVVHARGASAKGFFEVTHDITHLTCADFLRAPGVQTPVIVRFSTVIHERGSPETLRDPRVFAIKFYTREGNWDLVGNNFPVFFIRDGMKFPDMVHSLKPNPKSHVQENWRILDFFSHHPESLHMFTFLFDDIGIPADYRHMDGSGVNTYTLVNRAGKSHYVKFHWKPTCGVKSLLDDEAVTVGGTNHSHATQDLYDSIAAGNFPEWKLFIQTIDPDHEDRFDFDPLDVTKTWPEDIVPLQPVGRMVLNRNIDNFFSENEQLAFCPGIIVPGIYYSDDKLLQTRIFSYSDTQRHRLGPNYLLLPPNAPKCAHHNNHYDGFMNFMHRDEEVDYFPSRYDPAKHAPRYPIPSATLTGRREKVVIAKENNFKQPGERYRSWDPARQDRFIKRWIDALSDPRLTHEIRSIWLSYWSQADRSLGQKLASRLSAKPSM

SEQ ID NO: 39167 - protein, 215 aa, Zea mays
MSKLHSELLKDCISQIVQDAKKNRKFTETVELQISLKNYDPQKDKRFSGSVKLPHIPRPKMKVCMLGDAQHVEEAEKMGLDYMDVEALKKMNKNKKLVKRLAKKYHAFLASEAIIKQIPRLLGPGLNKAGKFPTLVTHQESLESKVNETKATVKFQLKKVLCMGVAVGNLAMEEKQIQQNIQMSVNFLVSLLKKNWQNVRCLYVKSPMGNPYRVF

SEQ ID NO: 39168 - protein, 256 aa, Merxmuellera rangei
CELDNIMRLTGITGIVNGMDVSEWDPTKDKYITVKYDAATAVAAKALNKEALQAAVGLPVDREIPLLAFVGRLEEQKGPDVMAAAIPEIMEEDVQIVLLGTGKKKFERMFKSAEEKYPDKVRAVVKFNAPLAHHIMAGADMLAVTSRFEPCGLIQLQGMRYGTPCACASTGGLVDTVVEGKTGFHMGRLSVDCNVVEPADVQKVATTLKRAIKVVGTPAYEEMVRNCMALDLSWKGPAKNWETVLLSMGVAGSEPG

SEQ ID NO: 39169 - protein, 237 aa, Lycopodium annotinum
MGRGKIEIKRIENATCRQVTFSKRRSGLLKKAHELSVLCDAQVAVIIFSSTGKLFQFASTRMKEILERYERNSDPLQIDAVIPRDLEYWSREAAKAKDELDRCHQKNRHMLGEDLSALNLNELEELEQQLDSGLRRVRCRKDQVLRDRIEELTKQESFLREENRMLRSKIAVPKESTEPILDEMNMETREPPSMAIVEEELSLKLNSKTWPDIHFSLQLGQYQPPRTETPTANHRPN

SEQ ID NO: 39170 - protein, 1408 aa, Filobasidiella neoformans
MSASPGLTAAAAGPDHLQARRDEKVIDSEKDALAHDAHAVNSGIPYPTATAPNVGAPTVPISVGRVSSAAEGKISRSSIAASSDTLRNSPLEKPISNAFSKSHPYKKSKFDFLKSRKKKEEEERKNKEKEKEASVLPPVSFFALFRFAAPLEIIAMVLGLVLAVAAGSCQPLMTLIFGRLTTSFTNYAVIANQISQGGLTPETSAALQAAKDDLKTQSGHNALYLMAIGIGMFLATWLYMFIWNVTGELNSKRIRERYLAAVLRQEIAYFDDLGAGEVATRIQTDCHLVQEGTSEKVALVFQYAGTFVCGFVLAFVRSPRLAGALVSILPVIMLCGGIMMTAMAKYGTAALDHIAKAGSLAEEVIGSIRTVQAFGKEKILGDKFADHIEQSKIVGRKGSIFEGFGLSIMFFVIYAAYALAFFYGGILVSNGQADSGIVINVFMSILIGSFSMAMLAPELAAVTKARGAAAKLFATIDRVPAIDSASEEGFKPDGLRGEISFENVKFHYPSRPSIPILKGFTTTFEAGKTFALVGASGSGKSTVVSLIERFYDPVSGVVKLDGRDIRSLNLNWLRQQIGLVSQEPTLFGTTVRGNVEHGLIGSRYENASLEEKFELVKKACVDANAHNFIMKLPQGYDTMVGERGMLLSGGQKQRVAIARAIVSDPRILLLDEATSALDTQSEGIVQDALDKASRGRTTITIAHRLSTIRDADRIYVMGGGEVLEQGSHNDLLANENGPYAQLVNNQKLAQEAAAEALQVDDDIEDPDDAVFIGGSSPMQEKDKQLHRAVTGRSLASIAMDDIQAKRAEEVAGEDKIPSSFGLYARLLRMNSADKFIYIIAFIAAICAGMVYPSLAILFGKALSDFEIQDPAELRHALSRSALWYFITALAAAFVIFFQSAGFSRAGWDLNGVLRKKLFTATLRHDIEWFDEERNSTGAVTSNLADQPQKVQGLFGPTLGTVVQSCATLIGGCIIGLCYGPLLALIGIACIPILVSGGYIRLKVVVLKDQRMKKLHAASAHLASEAAGAVKTVASLTREKDVRRIYSEALKAPMKLNFRTSIKSQCLFAASQGLTFCIIALVFYIGALWIIDAKYSTASFYTVLNSIVFASIQAGNVFTFVPDASKANSSAASIFRSIDNEPAINAESNEGKVLDHKHVVGHVRIEGVHFRYPTRPGVRVLRNLTIDVPAGTYVALVGPSGCGKSTTIQMLERFYDPLAGRVTLDGIDIKELNLASYRSQISLVSQEPTLYAGTIRFNILLGANKPIEEVTQDEIDAACKDANIYDFIVSLPDGFDTEVGGKGSQLSGGQKQRIAIARALIRNPKVLLLDEATSALDSQSEKVVQEALDKAAKGRTTIAIAHRLSSIQHSDRIYYFSEGRVAEHGTHQELLAKKGGYYELVQMQNLSRQ

SEQ ID NO: 39171 - protein, 110 aa, Triticum aestivum
MGLAYNTYLSSSKIYGCKTCKAHLANHEDIISRNFRGQHGKAYLFHSVVNIETGPPNERNMTTGRHVVRDITCRQCKETVGWKYDKAYESSEKYKEGKFILEAELLCTVT

SEQ ID NO: 39172 - protein, 440 aa, Alkaliphilus metalliredigenes QYMF
MDKRSIMKYERSQKLFEASQEVIPGGVNSPVRAFSSVGMNPPFIKRGKGAYIYDEDGNKYIDYVGSWGPLILGHCHPEVVENLKAVLETGTSFGAPTEIELKIAELITGAIPSVEMIRMVNSGTEATMTALRLARGYTGRNKIVKFNGNYHGHSDGLLIKAGSGALTHGVPNSPGVTPDVAKNTITAKYNDIEGIMEIFKQQGEEIAAVIIEPIAGNMGVVPMTNKFAHALRKITEDYGALLIFDEVMTGFRVSFGGAQSLYQIKPDLTCFGKIIGGGLPVGAFGGKREIMEHLSPVGPVYQAGTLSGNPLAMTAGYTTLSILHNNSGIYEELEKKAQKLEKGFKKIVKELQIDASFNRVGSMLCMFFTKEKVSDLETASTSNTEIYSQYFRAMLSRGVYLAPTQFETMFISDAHGDVEINRTIEAAYEGLKEIRNNPSI

SEQ ID NO: 39173 - protein, 268 aa, Escherichia coli
MERYESLFAQLKERKEGAFVPFVTLGDPGIEQSLKIIDTLIEAGADALELGIPFSDPLADGPTIQNATLRAFAAGVTPAQCFEMLALIRQKHPTIPIGLLMYANLVFNKGIDEFYAQCEKVGVDSVLVADVPVEESAPFRQAALRHNVAPIFICPPNADDDLLRQIASYGRGYTYLLSRAGVTGAENRAALPLNHLVAKLKEYNAAPPLQGFGISAPDQVKAAIDAGAAGAISGSAIVKIIEQHINEPEKMLVALKVFVQPMKAATRS

SEQ ID NO: 39174 - protein, 1478 aa, Saccharomyces cerevisiae
MPFLRKIAGTAHTHSRSDSNSSVKFGHQPTSSVASTKSSSKSPRATSRKSIYDDIRSQIPNLTPNSTSSQFYESTPVIEQSFNWTTDDHISAGTLENPTSFTNSSYKNDNGPSSLSDSRKSSGGNSVNSLSFDKLILSWDPTDPDEWTMHRVTSWFKFHDFPESWILFFKKHQLFGHRFIKLLAYDNFAVYEKYLPQTKTASYTRFQQLLKKTMTKNVTNSHIRQKSASKLKSSRSSSESIKSKLKNSKSQEDISNSRSTSESPLSPTKSGPSKTDEKIFLHSTSTHQKTKSASSLYRRSFISLRGSSSSNASSAKSPSNIKLSIPARPHSIIESNSTLTKSASPPASPSYPSIFRRHHKSSSSESSLLNSLFGSGIGEEAPTKPNPQGHSLSSENLAKGKSKHYETNVSSPLKQSSLPTSDDKGNLWNKFKRKSQIGVPSPNTVAYVTSQETPSLKSNSSTATLTVQTADVNIPSPSSSPPPIPKTANRSLEVISTEDTPKISSTTASFKETYPDCINPDKTVPVPVNNQKYSVKNFLLDQKFYPLKKTGLNDSENKYILVTKDNVSFVPLNLKSVAKLSSFKESALTKLGINHKNVTFHMTDFDCDIGAAIPDDTLEFLKKSLFLNTSGKIYIKDQMKLQQKPKPAPLTSENNVPLKSVKSKSSMRSGTSSLIASTDDVSIVTSSSDITSFDEHASGSGRSTPKPRVITMTEVSNTNPTEELNYWNIKEVLSHEENAPKMVFKTSPKLELNLPDKGSKLNIPTPITENESKSSFQVLRKDEGTEIDFNHRREAPYTKPEVAPKRESPKPPANTSPQRTLSTSKQNKPIRLVRASTKISRSKRSKPLPPQLLSSPIEASSSSPDSLTSSYTPASTHVLIPQPYKGANDVMRRLKTDQDSTSNSPSLKMKQKVNRSNSNVSTSNSIFYSPSPLLKRGNSKRVVSSTSAADIFEENDITFADAPPMFDSDDSDDDSSSSDDIIWSKKKTAPETNNENKKDEKSDNSSTHSDEIFYDSQTQDKMERKMTFRPSPEVVYQNLEKFFPRANLDKPITEGIASPTSPKSLDSLLSPKNVASSRTEPSTPSRPVPPDSSYEFIQDGLNGKNKPLNQAKTPKRTKTIRTIAHEASLARKNSVKLKRQNTKMWGTRMVEVTENHMVSINKAKNSKGEYKEFAWMKGEMIGKGSFGAVYLCLNVTTGEMMAVKQVEVPKYSSQNEAILSTVEALRSEVSTLKDLDHLNIVQYLGFENKNNIYSLFLEYVAGGSVGSLIRMYGRFDEPLIKHLTTQVLKGLAYLHSKGILHRDMKADNLLLDQDGICKISDFGISRKSKDIYSNSDMTMRGTVFWMAPEMVDTKQGYSAKVDIWSLGCIVLEMFAGKRPWSNLEVVAAMFKIGKSKSAPPIPEDTLPLISQIGRNFLDACFEINPEKRPTANELLSHPFSEVNETFNFKSTRLAKFIKSNDKLNSSKLRITSQENKTE

SEQ ID NO: 39175 - protein, 503 aa, Zea mays
MGKAQWLSVALGCAAAVTCAVATALVARRAVARSRWSRAVAVVRRFEEDCATPTERLQRIVNSLSVEMFAGLASEGASKVRMLLTCVDTLPDGSEEGVYYSVDLGGTSFRVMKLELGPGSTIINKKVEHQPIPEDLTKGTSEDLFNLIALALKNFIGREGGGDEGRALGFTFSFPVRHISISSGSLIRWTKEFSIEEAVEKDVAQCLNEALVRNGLNLQVTALVNNAVGTLAMGHYYDEDTVAAVVIGAGTNASYIERNAAIAKSEGLLDKSDDITVVNVEWGSFRSPLIPLTPYDICTSEAKRNQYDQAFEKMISGVYLGEIARLVFQGMAQESDLFGPSVNCLSTPFVLSTPSLATIREDDSPDLRVVGRVLEEHLKMQDVPMKTRRLVVRVCDIVTRRAARLAAAGIVAVLQKIGRDGSLCGTTLVRKIRGEPKRSVVAIEGGLYQGYSVFKEYVNEAVDEILGDEIASTVSLRVMEDGSVIGAALVAASYSSSARKNSV

SEQ ID NO: 39176 - protein, 480 aa, Neisseria meningitidis Z2491
MKQLAMYINGRFENDFNGEWRNVLNPSTEEAIAREPKGGKADVDRAVAAARAAQPAWERLPAVERGAYLRKIAQGIRERADELTDTIVAEGGKTKDLARVEVMFTADYLDYQAEWARRYEGEIIQSDRPRENILLFKRPLGVIAGILPWNFPFFLIARKMGPALVTGNTIVVKPSSVTPINCHIFAEIVDAVGLPAGVFNVVNGPGAEIGNALSAHPQVDMVSLTGSVEAGRQVMEAASANITKVSLELGGKAPAIVLKDADLDLAVKSILASRVGNTGQICNCAERVYVHSSLKDAFIEKMTAAMKGVRYGNPAEAEAGALEMGPLIEERAVKAVAEKVERAVKQGAKLVCGGKRAEGRGYFFEPTLLTDTDNSMDIMKEETFGPVLPVSAFDTLDQVIALANDCEFGLTSSVYTTNLNEAFYVTRRLQFGETYINRENFEAMQGFHAGWKKSGIGGADGKHGLEEYLQTQVVYLETDI

SEQ ID NO: 39177 - protein, 134 aa, Brassica napus
VDPRVRPEYNQLYKLMSTMGRLLNDIQGFKRESAQGKLNAVSLYMIRDQDNRSKEEIIESIKGLAERKRVELQKLVLEEKGSVVPRECKEAFLKMSKVLNLFYRKDDGFTSQDLMSVVKSVMYEPVTLEDESLT

SEQ ID NO: 39178 - protein, 338 aa, Synechocystis sp. PCC 6803
MATQQTILVTGGAGYIGSHGVLALQQAGFDVLIYDNLSYGHKELVQPLGVELVVGHTGDRQKLDQLFATRNIAAVMHFAAFIAVGESVQKPDIYYQNNVVGTLTLLEAMLAAGIKKFVFSSTCAVYGMPKEIPMTESHPIDPLSPYAASKRMVEQILADFDQAYGFKSVIFRYFNASGADPQGRLGEDHNPETHLIPLALLTALKQRPQLSVFGTDYDTLDGTALRDYIHVCDLAIAHVLGLQYLLEGGESNIFNLGNGNGFSVRQVIEVAKAVTGLDIPYQLCPRRPGDAPILVGSSAKAREILGWNPQYPDLHTIIDHAWQWHQRRHGDYKKSNKI

SEQ ID NO: 39179 - protein, 271 aa, Cucumis sativus
MSIQLLPAIARRLEGKVAVITGGARGIGEQTAKLFFKHGAKVVIADIQDHLGQTLCKDLGQSSSVFVHCDVTKEKDVETAVDTAVSKYGKLDIMLNNAGVFEESPNFDFLKDDPLTFQRVVNVNLVGAFLGTKHAARVMKPAGRGSIVTTASICSVIGGIGTHAYTSSKHGVLGLMRNAAVDLGRYGIRVNCVSPNVVPTEMGRKLFKVKDGGEFPSFYWSLKNGDILREEDVGEAVVYLGSDESKCVSGLNLIVDGGFTVVNQALCSFRS

SEQ ID NO: 39180 - protein, 485 aa, Xylella fastidiosa Ann-1
MHHNVHQSEILADPCDLQRAERWRQRDLRVLWHPCTQMREHPDTLPLVPIVRGEGAWLVGHDGRRYLDAVSSWWTNLFGHADPRISAAIAAQARTLEHVMLAGFSHEPAVRLAEALLRLAPRQDGREPLSKVFYADNGSAGVEVALKMAFHYFRNRGEEQRTRFIALHNGYHGETIGALAVGDIPLYRRVYAPLLTEVLFAPSPDAYLAEPGQSAAEYALQAAEALEALFKRYSGQICALILEPLLQCAGGMRMHHPVYLHRVRELCDAHGALLICDEIATGFGRTGTLFACEQACPAISTDTDDKELGIMPDLLCLSKGLTGGFLPLAAVLTTQQLYEEFLDDSRERAFLHSHSYTGNPLACIAALTTLDIFENDCIIERNQVTAARMTQLAASLSGHPHVADVRQTGMVVAFELTRDGNKRTPFPPQARLGLHVYRAALARGVILRPLGDVVYWMPPYCVDEEQLHLLAETTRVAIDEAIACV

SEQ ID NO: 39181 - protein, 980 aa, Thermosynechococcus elongatus BP-1
MTGLYEAETIAIARQLWAASQESRNFFSQLREQMRIEDKLLGWAMEHPGLRVQLFRLIDCLPSLRSQTEVARHLQEYLSDPSVELPPGLKKLLNFAQPDSLPAQAAATTFTTAVQALAHKYIAGETTEQVLKTIGRLRKQGMLVTMDILGEAVITEAEAQQYCDRYLDLMEHLSPLGQREGVNPVQVSVKLTAFYSQFDPLDVSGCRAKVGEPIRRLLHRAQELGVAVHFDMEQYAYKDITLAILKDILLEPEFRDRADIGLTLQAYLRDSYQDAQDLITWVQQRGTPITVRVVKGAYWDQELIKAVQHHWPLPVYQHKQNTDANFERIIELLLSHHTVLRTAIASHNVRSQARAIAIAQRQHIPPTAMECQVLYGMADKLAKALVEAGQTVRVYCPYGDLIPGMAYLIRRLLENTANSSFLRQQLGAVAIEELLAPPEPTADFEAVNVHLTTGKTSTFVNAANSDYARASQREAIQAALIHVHRQLGQTYTPIINGDRVNPREYSESLNPSQPEEIVGRVGLATIEDAEHAIRAAKAAQAQWQQTSVAERATLLRRAADLLEAQRHELVAWMCYEVGKVVAEGDAEVSEAVDFCRYYADEMERLSSGYDRNFPGETNHYHYQGRGLAVVISPWNFPLAIPTGMTAAALVTGNCTILKPADPAAVVAAKLAEILMAAGFPPGVFQFLPGRGSVIGPYLTQHPDVHLIAFTGSQEVGCRIIAEAAVLQRGQSHIKRVIAEMGGKNAIIIDESADLDQAVAGVVQSAFGYSGQKCSACSRVIVLESIYKPFVERLVAATQSLNIGPAHLPSTRVGPVVTAAARDRIQEYIAKGQQEAELLLSVPVPEMGYFVSPTIFTNVPPTATIAQEEIFGPVLAVLRAETFTQALAIANATAYALTGGLYSRTPSHIQQAKAQFAVGNLYINRGITGAIVDRQPFGGFKLSGIGSKAGGRDYLLQFLEPRVITENVQRQGFAPIAGVDD

SEQ ID NO: 39182 - protein, 230 aa, Bacillus anthracis str. 'Ames Ancestor'
MGYKAMLFDLDDTLLNRDKAVDNLFLLLFEKCYEDVSDTIKNNMLQKFKEFDKREYGMSDKTIVLESLFDEFAPRYRLPRNYIQDFWNENFPKCFSIDQNTIHFLNHIKKHFEVGIITNGSTQRQKAKIINTHLNNYFDTIIISEEVGFSKPDKRIFELALNKLNVQPENTLFVGDDIEKDIAGPQNANIKGVWFNPQKIKNTTKIQPYAEINTLDSLLSYVTPQYFFNK

SEQ ID NO: 39183 - protein, 457 aa, Thermus thermophilus HB27
MTYDLLIVGSGSAGVAAALEASALGAKAAVVEAGVLGGTCVNVGCVPSKYLLRAADAFHRARHPAFPGLRTEALGVDWKALLAGKEGLIAALRKEKYQEVLEAAGVPVLRGRARFLDGERMEVEGREVLAGRYLLATGARPFLPPIPGLRESAPWTYLEALSAPALPESLLVVGGGPIGLELAQAFARLGSRVTVLEALPEVLPQEDRELARLLRGYLEEEGLRVHTGVRVEAVAREGAFRVRTDRGVFEAERLLVATGRRPDLEGLGLERAGVERDERGFLRLDPSLRTTNPRVYAAGDAAGLPQFVYVAAQSGRVAARNALGVKAPLDLAALPRVTFTDPALAAVGLTEEEARRRYGAGVRAATLPLSQVPKALTVRDARGAFKIVVDEEGTVLGLHVLAHEAGDVIQEGILAVKYGLGYRDLIDTFHPYLTLAEGIRLVAQALDADPKKLSCCA

SEQ ID NO: 39184 - protein, 589 aa, Parachlamydia sp. UWE25
MFSFRQKIFISYVFVFCIFIIPLFPLVSHWVHRIIVKGMENRASEIIAHIQDAPNKETLIKRLKDQKSNIFFRMGIISEESKVLYDSHVKRILGPKFHQNYVLDHPEVREAFDCGLGFHEAYSKILQQKFTYFAKSFGYQNKTYVLRTAFPQQYVDEMTRDFEIGFLVFATAILLLFSMITWIAMNHLTKPIQKIIQSARSYQMGGQQSFSEIDTSNLNPKDDFTKLALTLNSLSAKIRNHIHILTQERDEKEAILESLVEGVIAVDRTMCIAYANHMAIKFIGLNQLDLIGQKFSSLNQEKYLTLLRQCQEEEKPLTDTLEINIEGKKLYLDIVAAPKRNNSGAILVLQDKTAHYKIFEMRRDFIANASHELKTPITIIRGFAEALYDNPGLPQDIQNEITTKIVRNCKRMTALIKDLLTLADIENIPSSRLSLCDLFDLTTRCQSMLHEIFPDAEVNIETSSDDIKLIVDEDLFELAIMNLIENAAKYSSRPAHIFVKLNDLSDHIVIEVSDQGIGIPLADQEHIFDRFYTVDKAHSQKMGGSGLGLSIVKTIIEKHFGTITLKSELGKGSTFTITLPKSIRPEVEF

SEQ ID NO: 39185 - protein, 974 aa, Arabidopsis thaliana
MEGGRGGGDGNFLPNSNFGVFSDSAMDMDFMDELLFDGCWLETTDGKSLKQTMGQQVSDSTTMNDNNNNSYLYGYQYAENLSQDHISNEETGRKFPPIPPGFLKIEDLSNQVPFDQSAVMSSAQAEKFLLEESEGGRRYWIAPRTSQGPSSSVKERLVQAIEGLNEEVQDKDFLIQIWLPIQQEGKNFLTTSEQPHFFNPKYSSLKRYRDVSVAYNFLADEDSKESVGLPGRVFLKKLPEWTPDVRFFRSEEYPRIKEAEQCDVRGSLALPVFERGSGTCLGVVEIVTTTQKMNYRPELDNICKALESVNLRSSRSLNPPSREVCKNGLLNQTLTSSIHRNNEFWLLNVICPFCFSFCRVYDLPLALTWAPCARQGKVGSRHSDENFSECVSTVDDACIVPDHQSRHFLEACSEHHLLQGEGIVGKAFNATKLFFVPEVTTFSKTNYPLAHHAKISGLHAALAVPLKNKFNSSVEFVLEFFFPKACLDTEAQQDMLKSLSATLQQDFRSLNLFIDKELELEVVFPVREEVVFAENPLINAGTGEDMKPLPLEEISQEDSSWISHMIKANEKGKGVSLSWEYQKEEPKEEFMLTSGWDNNQIGSGHNNFLSEAEQFQKVTNSGLRIDMDPSFESASFGVGQTLLGSRRPGEKRRTKTEKTIGLEVLRQYFAGSLKDAAKSIGVCPTTLKRICRQHGITRWPSRKIKKVGHSLKKLQLVIDSVQGVQGSIQLDSFYTSFPELSSPHMSGTGTSFKNPNAQTENGVSAQGTAAAPKSPPSSSCSHSSGSSTCCSTGANQSTNTGTTSNTVTTLMAENASAILKRARSEVRLHTMNQDETKSLSRTLSHKTFSEHPLFENPPRLPENSSRKLKAGGASKVKATFGEAKVRFTLLPTWGFRELQHEIARRFNIDNIAPFDLKYLDDDKEWVLLTCEADLEECIDIYRSSQSRTIKISVHEASQVKLGGSFGSIGLGPSL

SEQ ID NO: 39186 - protein, 460 aa, Filobasidiella neoformans
MGKDKLHVNVVVIGHVDSGKSTTTGHLIYKCGGIDKRTIEKFEKEAQELGKSSFKYAWVLDKLKAERERGITIDIALWKFETPKYQVTVIDAPGHRDFIKNMITGTSQADCAILIIATGIGEFEAGISKDGQTREHALLAFTLGVRQLIVACNKMDTCKWSEDRFNEIVKETNGFIKKVGYNPKAVPFVPISGWHGDNMLEETTNMPWYKGWTKETKSGVSKGKTLLEAIDASRPPTRPTDKPLRLPLQDVYKIGGIGTVPVGRVETGVIKAGMVVKFAPTNVTTEVKSVEMHHEQIPEGLPGDNVGFNVKNVSIKDIRRGNVCGDSKNDPPMEAASFNAQVIVLNHPGQIGAGYTPVLDCHTAHIACKFSELIEKIDRRTGKVMEAAPKFVKSGDAAIVKLVSQKPLCVETYADYPPLGRFAVRDMRQTVAVGVIKSVEKSDGKSGKVTKAAEKAAKKK

SEQ ID NO: 39187 - protein, 75 aa, Glycine max
MPTRCEICCEIMIAILIPPLGVCFRHGCCSVEFIICLLLTILGYIPGIIYALYAIIFVDRDQYFDEYRRPLYAQY

SEQ ID NO: 39188 - protein, 488 aa, Zea mays
  misc_feature (206)..(206): Xaa can be any naturally occurring amino acid
  misc_feature (226)..(226): Xaa can be any naturally occurring amino acid
  unsure (1)..(488): unsure at all Xaa locations
MATCATTLAPLLGPAANATEYLCNQFADTTSAVDSTYLLFSAYLVFAMQLGFAMLCAGSVRAKNTMNIMLTNVLDAAAGALFYYLFGFAFAYGTPSNGFIGKHFFGLKRLPQVGFDYDFFLFQWAFAIAAAGITSGSIAERTQFVAYLIYSAFLTGFVYPVVSHWVWSADGWASPTRTSGKLLFGSGIIDFAGSSVVHMVGRHRRXLGRPHRGPPHWPVRHAGPLXALRGHSASLVVLGTFLLWFGWFGFNPGSFLTILKSYGPAGSIHGQWSAVGRTAVTTTLAGSTAALTTLFGKRLQTGHWNVVDVCNGLLGGFAAITAGCSVVDPWAAVICGFVSAWVLIGLNALAARLRFDDPLEAAQLHGGCGAWGVLFTGLFARREYVEQIYGTPGRPYGLFMGGGGRLLAANVVMILVIATWVSVTMAPLFLALNKMGLLRVSAEDEMAGMDQTRHGGFAYAYHDDDLSLSSRPKGMQSTQIADAASGEF

SEQ ID NO: 39189 - protein, 904 aa, Candida albicans SC5314
MESSVVDSKKPNEGMGLPGFSRSQVNLANSTPNLARVAKPLAPPPLNRGRSSFSKALFTFHGNSSATSLLSEDGTADSSPVILPSSLEDDFDQNFHDMVHGKSRLAPFGGFSRPGVESQFLSEKNIFDVAPWTIVPPDNGNGSLTKAVNVSIDSGIMDKAKWVGIVAMPSDDVSLRVKSEISQKLSADYDCEAVFPDDVTFEGHYKSFCKQILWPTLHYQIPDDPKSKAFEDHSWGHYVLMNQLIADKIVETYNDVNDEETTVWIHDYHLLLVPKMVRDKLPNAKIGFFLHVSFPSSEVFRCFAQRNQLLEGMLGANSIGFQTNEYVRHFLQTCNRLLLADTSESGVNYQGNFTVTSTIPVGIDAYSVRENVHTEQVTEWRSLIKERWKDQHLIVSRDKLDKLRGIKQKLLAYEMFLTDNPEYIESTVLIQICIGSAQDPDYESEIMKIVSRINSMPENISVTQPVVLLQRDIGFDQYLALLCEADVFVVSSMREGLNLTCHEFITATEDKKSPLMLSEFTGSSNLLSCKGEGAILINPWDIKKFSETIKTSLTMPTSEKELRWHNCNQIVLTHDSKHWVTSCLNSIVNSWKIDHKKSGNLVPFTKNAFKDWCSVNGKRLIILALEISSAVSNSRGNSAGSTSGKVNVIDPSGLVRLLSDLVESQDTFVYLLSYLQRSDLDIMFKRYPQIGLIAENGNFVKLIGAKNWISLADKDELNSWMPEIVKLVESKVERLPGSFCEALDATVRFHAGKSFSEDRERSLDTMGETIQHINTLFEHNGVHATLVRNSVIVQKDQISLKAIRLVLSCHNSNLDQKYVVTHINEFQQPMKDDIPSNDHEVAAVLYSGGLTSIDEANYEYVNSLKKDIGNTLTVTLISSSNEETKTAATYGVRGINELLCILNS

SEQ ID NO: 39190 - protein, 341 aa, Bradyrhizobium japonicum USDA 110
MDLTELNRIATAMVAPGKGILAADESSGTIKKRFDAIGVESTESNRRDYREMLFRSREAMSQYISGVILYDETIWQDAKDGTPLVKLIESSGAIPGIKVDEGTQGLPMCPGELVTVGLDKLAERLKKYYERGARFAKWRAVIDIGSGIPSMTAISVNAHALARYAALCQAAQIVPIVEPEVLMDGDHDIDRCYEVTQRVLNKTFQELRVQRVALEGMVLKPNMAISGKKCAKQAPVEEVAEKTIRLLKACVPAAVPGIAFLSGGQSDEEATAHLNAMHKLGPLPWGLTFSYGRALQAAPQKAWSGKAENVAAGQRAFSHRARMNGLASKGEWQSSLEKKAA

SEQ ID NO: 39191 - protein, 637 aa, Synechococcus sp. CC9605
MTASWSPTTRETDALQRHAHVQRLPRVDAVWPWLADRHGLIAAVDAPHAANPERFNFGELAERIATAAAAFRRHGVKEGDVVALFAENSPRWLVADQGLMRAGAADAVRGASAPVEELCYILSDCQATALVVQNAEVWRRLALPPDQRAQLRFVLQLEGEPAEGAMGWEAFLASGAGLDPVGPAGGRDAVATVLYTSGTTGQPKGVPLTHANLLHQMSSLACVAYPEPGAPVLSVLPIWHAYERSASYFFLSCACTQTYTTIKQLKKDLPRVRPIAMATVPRLWEAVQAGFEDVLKTFPPSRQRLLRAALANSAAQRKAVRTARNLLLEPVSASGRLRACGSAALRWPLHALASTLIWPKLRRQLSGGQLAYPISGGGAIAPHIDAFFEAVGIELLVGYGLTETSPVVSCRRPWRNIRGSSGLPMPQTEFRIVDPDNGQPLGFRQRGRVMVRGPQVMVGYLGKPEASAKVLDTAGWFDTGDLGMLLPDGSVALTGRAKDTIVLSSGENIEPGPLEEALVASPLIEQVMLVGQDERQLGALIVPRAEAIVAWAAEACVNVAQDLGGQPGDPALLRLLMRECNRLLKQRWGSRGDERLAGVVLVDPFSIENGLLTQTLKQRRDRITSRDQHLIDGLYGR

SEQ ID NO: 39192 - protein, 551 aa, Oryza sativa
  misc_feature (407)..(407): Xaa can be any naturally occurring amino acid
  misc_feature (410)..(410): Xaa can be any naturally occurring amino acid
  unsure (1)..(551): unsure at all Xaa locations
MLTVAASALGNNKKSTPAACFSLARPFLLSSPTPPPPPHSSSLPRSPSPRPRLPLPPPRRAALVTAAQDPRWRRAMASLAVSASASASGEEVTHLAQREAAEIDEQLMGPLGFSVDQLMELAGLSVAAAVAEVYKLGEHTRVLVICGPGNNGGDGLVAARHLHHFGYKPSVCYPKRTPKPLYSGLCTQLESLTIPFVPVEDLPANLSEEFDIIIDAMFGFSFHGTPRPPFDDLINRLVSLSAIDNSAKRPAIVSVDIPSGWHVEEGDINGGGFKPDMLVSLTAPKLCAKKFTGPHHFLGGRFVPPPIVSKYKLHLPPYPGTSMCVRIGKAPSVDISSLRENYISPELLENQVMPDPFDQFVRWFDEAVTAGLREPNAMALTTADKEGKPSSRMVLLKGVDKQGFVWXYKXTNYGSQKAHDLSENPNAALLFYWNEMNRQVRVEGSVQKVPEEESEKYFHSRPRGSQLGAIVSKQSTIIPGREVLQQAYKELEQKYSDGSVIPKPDYWGGYRLTPKLFEFWQGQQSRLHDRLQYSLREVDRSTVWHIERLSP

SEQ ID NO: 39193 - protein, 671 aa, Bradyrhizobium japonicum USDA 110
MMQLDASRMAHTQVDHSRMANAIRGLSMDAVEKAKSGHPGLPMGAADIATVLFTQFLKFDAAAPAWPDRDRFVLSAGHGSMLLYSLLYLTGNADMTLDQLKQFRQLGGLTPGHPENFHTKGIETTTGPLGQGISTAVGMALAEKMLAAEFGKKIVDHHTFVLASDGDLMEGVSQEAIAMAGHWKLNKLIVLYDDNGISIDGPTSIADSVDQVKRFKSAGWAAEKIDGHDQAAITAAITRAKKSNKPTLIACRTTIGFGAPHKAGTSKVHGEALGAEELKAAKENLGISLEPFSVPDDVLKAWRAAGSRGAAARQEWEGRLGELGSRKRAEFERRLRHERPASLAKAVRAYKKELLEKPLVAATRKSSEAVIEVIAGAMPMEFLAGSADLTGSNNNKAKSATAFSAKTPKGRFIHYGIREHGMAAAMNGIFLHGGFAPNGATFLVFTDYARPAMRLAALMGTGVVYVMTHDSIGLGEDGPTHQPVEHLAALRAIPNMRVFRPCDSIEVAECWELALNRIDGPTVLALTRQNLPQLRTTAPNDNPCAAGAYELVPAQGEAKATLFASGSEVEIAVAAQKQLAERGIPSRVVSVPSLELLLAQPEAKRAEIIGNAPVKVAIEAAVRWGWDAVIGQDGEFVGMHSFGASAPAKDLYKHFGITAEAAVNAVLKRVS

SEQ ID NO: 39194 - protein, 268 aa, Escherichia coli
MERYESLFAQLKERKEGAFVPFVTLGDPGIEQSLKIIDTLIEAGADALELGIPFSDPLADGPTIQNATLRAFAAGVTPAQCFEMLALIRQKHPTIPIGLLMYANLVFNKGIDEFYAQCEKVGVDSVLVADVPVEESAPFRQAALRHNVAPIFICPPNADDDLLRQIASYGRGYTYLLSRAGVTGAENRAALPLTHLVAKLKEYNAAPPLQGFGISSPDQVKAAIDAGAAGAISGSAIVKIIEQHINEPEKMLAALKAFVQPMKAATRS

SEQ ID NO: 39195 - protein, 440 aa, Glycine max
  misc_feature (323)..(323): Xaa can be any naturally occurring amino acid
  unsure (1)..(440): unsure at all Xaa locations
MMLKIKRVPTVVSNFQKDDAADSPRPVGGCGRNCLKACCIPDAKLPLYGFKKANIGKDLALHACAGEPPLAFLDSLLLGEWEDRMQRGLFRYDVTACETKVIPGEYGFVAQLNEGRHLKKRPTEFRVDKVLQPFDENKFNFTKVGQEEVLFQFEASEDGQVQFFPNAPVDVDNSPSFVAINVSPIEYGHVLLIPRIFECLPQRIDRESFLLALQMAVEADNPYFRLGYNSLGAFATINHLHFQAYYLALPFPIEKAPTKRIASVNGGVKISELLKYPVRGFVFEGGEMLEDLSNVVSDACICLQNNNIPFNVLISDCGKQVYXLLPQCYAEKQALGEVNAELLDTQVNPAVWEISGHMVLKRRKDYDEASEGNAWRLLAEVSLSQERFQEVNDLVFEAIGCGELEDVNVQSVKKEVDAVSTSEHPTVVVVAGSQECVVLQ

SEQ ID NO: 39196 - protein, 548 aa, Porphyromonas gingivalis W83
MNDFRPNPSLLLETSWEVCNKQGGIYTVLTSRAHEMMKRHDGRIIFIGPLLTEQEDLPTDFENTVPAILEDWHRDAAPSLDLRYVCGSWRTPGSPPVVLVDFEPLHAQKATLYYEMWEHFGIQSDKGYGDYDEASLFGIAAAQTMHSLCEYLCPEDQPAIGIFNEWMLGMGLLYSKRKTPRLKTLFLTHATTTGRSIAGNNKALYAYMPGYNGDQMAAELGVEAKHGIEKAAAHQSDTFATVSELTAKECRQLLERDPMVLPNGFEPNFVPQGEEYERRRAEARKRLLHVAEHLTGKQLPADTLLIATSGRYEYRNKGIDLFIDAASEAGRSGKLRTPTLAFILVPAWVAGARADLQYLLNHPDPTEYKEKPLPYPFLTHWLHDIQEQTISKRLDESAGSAGEVSFIFVPCYLNRKDGIFGLGYYDLLIGMDLTVFPSYYEPWGYTPLESIAFGIPTVTTDLSGFGLWAMQERGSRNDFSTGVAVIKRTDDNYAEAVQAIADLLYRWPAESTDRTACRLAAMQTASHAEWRLFYNRYEEAYSELLSRD

SEQ ID NO: 39197 - protein, 87 aa, Arabidopsis thaliana
  misc_feature (41)..(41): Xaa can be any naturally occurring amino acid
  misc_feature (62)..(62): Xaa can be any naturally occurring amino acid
  unsure (1)..(87): unsure at all Xaa locations
MANKALIHLLVIFVLALSHIFFFPSHASRLGSLMEKPKIVXRPQQDTLMDVKKEVEEKEVMXELNDYPGSGANIRHLPRVRRCVIDC

SEQ ID NO: 39198 - protein, 422 aa, Campylobacter lari RM2100
MNLKELDLKHIWHPCTQMSDHEFLPLIPIKKAKGVYLYDFDEKSYIDCISSWWVNIFGHCNEYINEKIKDQLQSLEHVLLAGFSHEPIIKLSQRLCKLLPFDKCFFADNGSSAIEVALKMSFQYHLNNGSKKDKFLSLSNSYHGETLGALSVGDVALYKKTYEPLLLKSITTPVPTSKDYIKELEILESILKNHHHEICAFILEPLLQCAGNMHMYELGYLNEAVKLAKDYDVQVIFDEIATGFGRTGEMFALDYCSQSIDYICLSKAITGGYLPLSVVLTKDEIYEKFYDSYESQKAFLHSHSYTGNALACTAANATLDIFENENIIAKNKIKSAFIKTQWESLKEFEFLGNFRNLGMVSAFDIQKSKYKRAGLEVFQRALEKGLLLRPLGNTIYFMPPYVINEDEITYVVQSLREIFKEF

SEQ ID NO: 39199 - protein, 374 aa, Campylobacter lari RM2100
MQIAQILDELKQQDNFRILRSLKHEGKYVIYNEQKLLNLASNDYLNLSNEKALKQDFLTHLKEFEFSSSSSRSLSGNYEIFEEFESFLENKFHKKILHFNSGYALNTSCLQALGLLKNTLFLADKQVHASIIDGLRLSGAKFFRFKHNDIKHLQSLVQKYHKEFENIIIISEALFSMDGDFAPIKEFINLKKEYKNIKIYIDEAHSIGCFGDDGLGYVKFLGLEKEIDFLVFTFGKAISSMGACMISDEKEFFINKARAFIYSTAIAPINVAWTLHVFKHLHKFNTQRNELLKLSAWFKNALASKGEILGEAYIISLILGQNDWASKTFDKLLKNGFFAPAIKEPTIPKNTARIRFSLHSGLKKDDLEKILELF

SEQ ID NO: 39200 - protein, 332 aa, Nostoc sp. PCC 7120
MTKNLLEQLREMTVVVADTGDIQAIEKFTPRDATTNPSLITAAAKMPEYQEIVDQTLLQAKKDAGAGASKGQIVSLAFDRLAVSFGLKILQIIPGRVSTEVDARLSYDTEATITKARELIAQYKAAGIGPERVLIKIASTWEGIKAAEILEKEGIHCNLTLLFGLHQAIACAEAGITLISPFVGRILDWYKKETGRDSYPSAEDPGVLSVTTIYNYYKKFGYKTEVMGASFRNIGEITELAGSDLLTISPGLLGELQATIGELPRKLDPAKAATLDIDKISIDKATFDKMHAADRMAYDKLDEGIKGFTKALEELETLLAERLARLEVVASH

SEQ ID NO: 39201 - protein, 219 aa, Pyrococcus horikoshii OT3
MSRMAFDRQKIVEAVKEAKARAKPRNFTQSVEVAVNLKDIDLKRPENRFKLEVVLPHGRGKDVKIAVIADGAVAEAARRLGLDVISSAELEEIAKSPRQARKLAKKYDFFIAEAPLMPKIGRYLGRYLGPRNKMPVVVPPTMTNIEPIVEKLKKTVRIQLKDNPVVHAPVGTEKMSDEQLAENIEAVLNAIIGKLERGENQIRSVYVKTTMGPAVRVEG

SEQ ID NO: 39202 - protein, 343 aa, Nostoc sp. PCC 7120
MAKLKVGINGFGRIGRLVLRAGINNPNIEFVGINDLVPPDNLAYLLKYDSTHGRLRSQVETKDDGIVIDGHFIPCVSVRNPAELPWGKLGADYVVESTGLFTDSEGASKHLQAGARRVIISAPTKDPDRVRTLLVGVNHDLFDPSKDLIVSNASCTTNCLAPIAKVINDNFGLTEGLMTTVHAMTATQPTVDGPSKKDWRGGRGAAQNIIPSSTGAAKAVALVLPELKGKLTGMAFRVPTPDVSVVDLTFKTAKATSYKEICAAMKQASEGSLAGILGYTDEEVVSTDFQGDTHSSIFDAGAGIELNSNFFKVVAWYDNEWGYSNRVVDLMLSMVQKEQLAAV

SEQ ID NO: 39203 - protein, 170 aa, Triticum aestivum
  misc_feature (114)..(114): Xaa can be any naturally occurring amino acid
  misc_feature (139)..(139): Xaa can be any naturally occurring amino acid
  misc_feature (144)..(144): Xaa can be any naturally occurring amino acid
  misc_feature (155)..(155): Xaa can be any naturally occurring amino acid
  misc_feature (161)..(161): Xaa can be any naturally occurring amino acid
  misc_feature (164)..(165): Xaa can be any naturally occurring amino acid
  misc_feature (167)..(167): Xaa can be any naturally occurring amino acid
  unsure (1)..(170): unsure at all Xaa locations
MSHRMMMNPVKVEGDGRAGGGGAPRPMDGLGDAGPTPFLAKTYDMVDDPATDAVVSWSATNNSFVVWDPHLFATVLLPRYFKHGNFSSFVRQLNTYGFRKVDPDRWEFANEGFXRGQRHLLRNIKRRKPNMGSKNNNLXVLLEXGNFGHDVEIDXLKRDRXLLXXEXVKL

SEQ ID NO: 39204 - protein, 480 aa, Thermosynechococcus elongatus BP-1
MSLRLFWHRRDLRLNDNLGLAAAYTRTPKVVGLFCFDPAILSASDIAAVRVAYLVGCLQALQEAYRRLGGSFLIFRGDPRQILPQVAKGLGAVAVHWHEDVEPYGRERDRAVAAALKEKGIAVETAWDQLLHPPEAIQTKQGQPYTVYSPFWRNWSSLAKPEPVSAPRHLEPLTEIEQATAGTLGAICLPTAKDLGFHWSGDLILAPGEAAAQAQLETFIDQHIQDYGEQRNYPAQPGTSLLSPALKFGVIGIRRVWTATQAAMAAARSEEAQRSIRTWQQELAWREFYQHALYWFPHLAERPHREGFATFPWLNNEAHFAAWCEGRTGYPIVDAAMRQLNETGWMHNRCRMIVASFLTKDLIINPQWGERYFMQKLIDGDLAANNGGWQWSASSGMDPKPLRIFNPASQAQKFDPEAEYIRRWLPEVRSLDTIDLVTGNISPLERHRCGYPLPIVDHRQQQQRFKQLYQEHFRSPIPQE

SEQ ID NO: 39205 - protein, 387 aa, Shewanella oneidensis MR-1
MKQAVIVDCIRTPMGRSKAGVFRNVRAETLSAELMKGLLLRNPQLDPNTIEDVIWGCVQQTLEQGFNIARNASLLAGIPKTAGAVTVNRLCGSSMEAIHQAARAIMTGMGDTFIIGGVEHMGHVPMNHGVDFHPGLANNVAKASGMMGLTAEMLGKLHGITREQQDAFAVRSHQRAYAATIEGRFAKEIYGIEGHDATGALIKVLQDEVIRPETTMESLAVLRPVFDPVNGTVTAGTSSALSDGASAMLIMEESKARALGLPIRARIRSMAVAGCDAAIMGYGPVPATQKALARAGITVNDLDVIELNEAFAAQSLPCVKDLGLLDVVDEKINLNGGAIALGHPLGCSGARISTTLINLMEHKDATLGLATMCIGLGQGIATVFERV

SEQ ID NO: 39206 - protein, 144 aa, Burkholderia vietnamiensis G4
MAYSDKVLDHYENPRNVGSFDAGADDVGTGMVGAPACGDVMRLQIRVNADGVIEDARFKTYGCGSAIASSSLVTEWVRGRTLDEALAIKNTDIAEELALPPVKIHCSILAEDAIKAAVADFRSRHPGAGGETLAEQPVCTSTPN

SEQ ID NO: 39207 - protein, 257 aa, Methanococcoides burtonii DSM 6242
MFLLIRGGILALISTVAIFLMVVFVESTRIEIPLAHSAVRGARGRFPVKLIYASVLPMILVRALQANLQMIGLLLSGRGINVLGEYYGSTPINGIMYYISPINSPYDWIPSLVRETFTGYGAPVPSMWQVGLHVFVDAFFLIAGGIIFALFWIETTGMGAKPTAQKVFNSGMQIPGFRRNVGSIEKVMLRYIPKVTIIGGAFIGVLTLLASLLGTIGGAGGTGLLLTVSIVYRLYEDIASEQMMEMHPMVRSFFGQE

SEQ ID NO: 39208 - protein, 428 aa, Staphylococcus aureus
MRYTKSEEAMKVAETLMPGGVNSPVRAFKSVDTPAIFMDHGKGSKIYDIDGNEYIDYVLSWGPLILGHRDPQVISHLHEAIDKGTSFGASTLLENKLAQLVIDRVPSIEKVRMVSSGTEATLDTLRLARGYTGRNKIVKFEGCYHGHSDSLLIKAGSGVATLGLPDSPGVPEGIAKNTITVPYNDLDALKIAFEKFGNDIAGVIVEPVAGNMGVVPPIEGFLQGLRDITTEYGALLIFDEVMTGFRVGYHCAQGYFGVTPDLTCLGKVIGGGLPVGAFGGKKEIMDHIAPLGNIYQAGTLSGNPLAMTSGYETLSQLTPETYEYFNMLGDILEDGLKRVFAKHNVPITVNRAGSMIGYFLNEGPVTNFETANKSDLKLFAEMYREMAKEGVFLPPSQFEGTFLSTAHTKEDIEKTIQAFDTALSRIVK

SEQ ID NO: 39209 - protein, 391 aa, Mycobacterium bovis AF2122/97
MRKLGPVTIDPRRHDAVLFDTTLDATQELVRQLQEVGVGTGVFGSGLDVPIVAAGRLAVRPGRCVVVSAHSAGVTAARESGFALIIGVDRTGCRDALRRDGADTVVTDLSEVSVRTGDRRMSQLPDALQALGLADGLVARQPAVFFDFDGTLSDIVEDPDAAWLAPGALEALQKLAARCPIAVLSGRDLADVTQRVGLPGIWYAGSHGFELTAPDGTHHQNDAAAAAIPVLKQAAAELRQQLGPFPGVVVEHKRFGVAVHYRNAARDRVGEVAAAVRTAEQRHALRVTTGREVIELRPDVDWDKGKTLLWVLDHLPHSGSAPLVPIYLGDDITDEDAFDVVGPHGVPIVVRHTDDGDRATAALFALDSPARVAEFTDRLARQLREAPLRAT

SEQ ID NO: 39210 - protein, 246 aa, Linum usitatissimum
MAEQQQSGENVSRHQEVGHKSLLQSDDLYQYILETSVYPREPESMKELREVTAKHPWNIMTTSADEGQFLNMLLKLINAKNTMEIGVYTGYSLLATALALPDDGKILAMDINRENYEIGLPIIEKAGLAHKIEFKEGPALPALDKMVEDKANHGAYDFIFVDADKDNYINYHKRLIDLVKIGGVIGYDNTLWNGSVVAPPDAPLRKYVRYYRDFVLELNKALAADPRIEICMLPVGDGITLCRRIS

SEQ ID NO: 39211 - protein, 381 aa, Yarrowia lipolytica CLIB122
MSSNIKLAQKDYKGDKEFAAALHGKEGHKKHGLGAVMSKNKDAQAAAVEGFFRNWGDKDRSKIEDADEQGRIEDYAGLTKHYYNLVTDFYEYGWGSSFHFSRYYKGEAFRQATARHEHYLAYKMGIQPGMKVLDVGCGVGGPAREIARFTGANIVGLNNNDYQVERGTHYSEVQGFGDQVTYVKGDFMQMDFPDNSFDAVYAIEATVHAPVLEGVYSEIFRVLKPGGVFGVYEWVMTDEYDESNPEHRDICYGIEKGDGIPKMYKREVAVKALENVGFDIEYQEDLAADDAEVPWYYPLAGEWKYVQSLNDIVTIGRTSRLGRMVTMNVIGALEKIGLAPQGSRQVTEALEDAAVNLVAGGKKKLFTPMMLFVSRKPEDKN

SEQ ID NO: 39212 - protein, 224 aa, Gazania splendens
GYPGPQGPYYCGAGADKSFGRDISDAHYKACLYAGINISGTNGEVMPGQWEFQVGPSVGIEAGDHIWCARYLLERITEQAGVVLTLDPKPIDGDWNGAGCHTNYSTLAMREDGGFEVIKKAILNLSLRHMEHISAYGEGNERRLTGKHETASINTFSWGVANRGCSIRVGRDTEKAGKGYLEDRRPASNMDPYTVTGLLAETTLLWEPTLEAEALAAQKLALNV

SEQ ID NO: 39213 - protein, 268 aa, Escherichia coli
MERYESLFAQLKERKEGAFVPFVTLGDPGIEQSLKIIDTLIEAGADALELGIPFSDPLADGPTIQNATLRAFAAGVPPAQCFEMLALIRQKHPTIPIGLLMYANLVFNKGIDEFYAQCEKVGVDSVLVADVPVEESAPFRQAALRHNVAPIFICPPNADDDLLRQIASYGRGYTYLLSRAGVTGAENRAALPLNHLVAKLKEYNAAPPLQGFGISAPDQVKAAIDAGAAGAISGSAIVKIIEQHINEPKKMLAALKAFVQPMKAATRS

SEQ ID NO: 39214 - protein, 460 aa, Yarrowia lipolytica CLIB122
MGKEKTHVNLVVIGHVDAGKSTTTGHLIYKCGGIDKRTIEKFEKEADELGKGSFKYAWVLDKLKAERERGITIDIALWKFQTPKYYVTVIDAPGHRDFIKNMITGTSQADCAILIIAGGVGEFEAGISKDGQTREHALLAFTLGVKQLIVAINKMDSVKWSQDRYNEICKETANFVKKVGYNPKSVPFVPISGWNGDNMIEASTNCDWYKGWTKETKAGEVKGKTLLEAIDAIEPPVRPSDKPLRLPLQDVYKIGGIGTVPVGRVETGVIKAGMVVTFAPANVTTEVKSVEMHHEILPDGGFPGDNVGFNVKNVSVKDIRRGNVAGDSKNDPPKGCDSFNAQVIVLNHPGQIGAGYAPVLDCHTAHIACKFDTLIEKIDRRTGKKMEDSPKFIKSGDAAIVKMVPSKPMCVEAFTEYPPLGRFAVRDMRQTVAVGVIKSVEKSDKAGGKVTKAAQKAAKK

SEQ ID NO: 39215 - protein, 457 aa, Saccharomyces cerevisiae
MREIIHISAGQYGNQIGAAFWETICGEHGLDFNGTYHGHDDIQKERLNVYFNEASSGKWVPRSINVDLEPWTIDAVRNSAIGNLFRPDNYIFGQSSAGNVWAKGHYTEGAELVDSVMDVIRREAEGCDSLQGFQITHSLGGGTGSGMGTLLFSKIKEELPDRMMATFSVLPSPKTSDTVVEPYNATLSVHQLVEHSDETFCIDNEALYDICQRTLKLNQPSYGDLNNLVSSVMSGVTTSLRYPGQLNSDLRKLAVNLVPFPRLHFFMVGYAPLTAIGSQSFRSLTVPELTQQMFDAKNMMAAADPRNGRYLTVAAFFRGKVSVKEVEDEMHKVQSKNSDYFVEWIPNNVQTAVCSVAPQGLDMAATFIANSTSIQELFKRVGDQFSAMFKRKAFLHWYTSEGMDELEFSEAESNMNDLVSEYQQYQEATVEDDEEVDENGDFGAPQNQDEPITENFE

SEQ ID NO: 39216 - protein, 373 aa, Dehalococcoides ethenogenes 195
MKKKQKLLSLFLGIVLVVSVLSGGCDYLSQPINSDNTDSTSTPIDADWTFPTPQQNLPELANYAMVVAMVKPAVVAVDVEYITQDIFGRQTVAVASGSGFIIDPSGYIITNNHVVEGGSTVTVTLSDGRTFTASQVVTDSRTDLAVIKVDTLGEDLPFVYIGDSSALEVGEPVAAIGNALGLGITMKGGWISRLDAQITVDQSVTLYGLIGTDVAINEGNSGGPLVNMAGEVIGITSAKIAEVGVEGVGYAININSARTFIEELVKKGYITRPFMGVAGILTVDSSIQSYFRLGIDRGVLIRGVSEGGPAEKAGLMANDVILAINGQPVLTDEELILAIHGKKIGDKIEVSYFRDGVTATVTLTLAETPPPES

SEQ ID NO: 39217 - protein, 470 aa, GIBBERELLA ZEAE PH-1
MASVARLSNAALRASLRSSPVNGSAFNAIRCYSAKTQTLKERFAELLPEKIEQVKALRKEHGSKVVDKVTLDQVYGGARGIKALVWEGSVLDSEEGIRFRGKTIPECQELLPKAPGGKEPLPEGLFWLLLTGEVPTEQQVRDLSAEWAARSDLPKFVEELIDHCPTDLHPMAQFSLAVTALEHTSSFAKAYAKGINKKEYWGYTFEDSMDLIAKLPNIASRIYQNVFKGGKVAAIQKDKDYSFNFANQLGFADNADFVELMRLYLTIHTDHEGGNVSAHTTHLVGSALSSPFLSLAAGLNGLAGPLHGLANQEVLNWLTEFKKSVGDDLSDKAITDYLWSTLNAGRVVPGYGHAVLRKTDPRYMAQRTFAQEKMPNDPMFKLVSQVYKIAPGVLTEHGKTKNPYPNVDAHSGVLLQYYGLTEANYYTVLFGVSRAIGVLPQLIIDRALGAPIERPKSFSTDKWAELVKKL

SEQ ID NO: 39218 - protein, 271 aa, Dehalococcoides ethenogenes 195
MKKFSKNFFGLFISISLVVSMLLAQGCDLLQEFSNSPEDDTQNQSNNQNLSDGSDELGSVPSPVNFVNAVKAVKPSVVAINVELVTRDIFGRTVVEQAAGSGWIIDSNGIIVTNNHVVEDATSITVTLDDGRTFNAVAVRTYPANDLAVIKIDATNLPAVKLGDASKLAVGEPVAAIGNALGMGISMTGGWISRLNTTVQFSDTESLTGLIETDAAINPGNSGGPLVNYQGEVIGITSAKIQEVGVEGIGYAISLYIALPIINNLISQLPA

SEQ ID NO: 39219 - protein, 341 aa, Zea mays
  misc_feature (258)..(258): Xaa can be any naturally occurring amino acid
  misc_feature (312)..(312): Xaa can be any naturally occurring amino acid
  unsure (1)..(341): unsure at all Xaa locations
MMAEAWTPVPFPPTAPCFWLHDTHSVFWRGGDAWTAAENKLFEKALAQIDRNAPDRWEKVAEVVRTKTVDDVRNHYHDLENDVGFIEAGLVPFPHYSGSVPSFGFTHEDWDGGFRRGYCLKRARGSDPERKKGVPWTEEEHKLFLMGLKKYGRGDWRNISRKYVTTRTPTQVASHAQKYFIRLNSGGKDKRRSSIHDITTVNLPDEDRGNAPPSAVTTTTNPSVALVDMKPFVAPSLGVPHPYGDVKLEPKSSLVAGXGLQRLRPPDALRTVVTGCSCGENRSRRNVRHQPPPHLSPGGHQGRRHKSHVVVXAWMQSCFRKLRCARLWLASPAFVCCLPSL

SEQ ID NO: 39220 - protein, 346 aa, Citrobacter sp. MY-5
MSDNIRVGLIGYGYASKTFHAPLIVGTPGLELAAVSSSDEAKVKADWPTVAVVAEPKHLFNDPNIDLIVIPTPNDTHFPLAKAALEAGKHVVVDKPFTVTLSQARELDTLARSLGRVLSVFHNRRWDSDFLTLKALLADGVLGEVAYFESHFDRFRPQVRDRWREQGGPGSGIWYDLAPHLLDQAINLFGLPVSLTVDLAQLRPGAQATDYFHAILTYPQRRVILHGTMLAAAESARYIVHGSRGSYVKYGLDPQEERLKNGERLPQEDWGYDMRDGVLTRVEGEEQVEETWLTVPGNYPAYYAGIRDALNGNGENPVPARQAIQIMELIELGIESAKHRSTLCLA

SEQ ID NO: 39221 - protein, 429 aa, Xylella fastidiosa Ann-1
MSDLDKVTLNAGETSLVLPVLKPTLGNGCVDIAKLTKETGLFTYDSGFTATASCKSAITYIDGEKGVLLYRGYPIEQLAEHSSFLEVAYLLMNGELPRKDEFAKFDDEITHHTMMHESLKNFLGGFHYDAHPMAMLAASVASLSAFYHDTLDLNDLEQRRLAAIRLIAKVPTLAAAAHRYSIGWPIRYPRNNLGYVERFLHMMFEVPSEPLQLNPVVTKALDLLFILHADHEQNASTSTVRLVGSTGANPYASVAAGITALWGPAHGGANEAVLKMLEEIGDAKNVDLVIAKAKTKDKNSPFRLMGFGHRVYKHFDPRAKIIREMAHTVLGELGVNDPLLEVALKLEEAALKDDYFVQRKLYPNVDFYSGIIYKAINIPLEMFTVMFAIARTAGWVSHWLEQQVDPEMKISRPRQIYTGHRERDYKDAR

SEQ ID NO: 39222 - protein, 399 aa, Deinococcus radiodurans R1
MRDAVIVSAVRTPVGRGVKGTLANTRPDDLAALVMNEAIKRAGVDAGVVEDVYLGCAIPEAEQGLNVARLAALRAGLPDSVGGVTVNRFCSSGLQTIAMAAAAIQTGQADVMLAGGVESMSMLPMSGHNPSPNPDLVDDRPGAYIGMGMTAENVAAKYGVSREDQDKFAYASHQKAAAAQDAGKFDAEIVPVPVRKDSVKGTKLKSDTVMFDKDELIRRDANLEDMAKVRPAFKLGGSVSAANSSPFSDGAAAVLLMSGEKAQELGVKPLAKFIGFAVAGVAPEVMGIGPVAAVPKVLKQTGLTLDDIDLIELNEAFAAQSLAVVRELGIDESKLNVNGGAIALGHPLGCSGAKLTTTAIYELGRRGGGKALITMCIGGGMGAAGIIEVYPAETAQAAD

SEQ ID NO: 39223 - protein, 512 aa, Arabidopsis thaliana
MGAVSMESLPLGFRFRPTDEELVNHYLRLKINGRHSDVRVIPDIDVCKWEPWDLPALSVIKTDDPEWFFFCPRDRKYPNGHRSNRATDSGYWKATGKDRSIKSKKTLIGMKKTLVFYRGRAPKGERTNWIMHEYRPTLKDLDGTSPGQSPYVLCRLFHKPDDRVNGVKSDEAAFTASNKYSPDDTSSDLVQETPSSDAAVEKPSDYSGGCGYAHSNSTADGTMIEAPEENLWLSCDLEDQKAPLPCMDSIYAGDFSYDEIGFQFQDGTSEPDVSLTELLEEVFNNPDDFSCEESISRENPAVSPNGIFSSAKMLQSAAPEDAFFNDFMAFTDTDAEMAQLQYGSEGGASGWPSDTNSYYSDLVQQEQMINHNTENNLTEGRGIKIRARQPQNRQSTGLINQGIAPRRIRLQLQSNSEVKEREEVNEGHTVIPEAKEAAAKYSEKSGSLVKPQIKLRARGTIGQVKGERFADDEVQVQSRKRRGGKRWKVVATVMVAVMVGVGMGIWRTLVSS

SEQ ID NO: 39224 - protein, 445 aa, Pisum sativum
MSLETVNSNTQRTSLSSATESICSTSFSRLSFELLPSSSPESLSIKPHRSSDFAYSAIRKSGLTFRDFHLLRRIGSGDIGTVYLCRLRDSSVNYINDEDSSFYYAMKVVDKDAVALKKKSHRAEMERKILKMLDHPFLPSLYAEFEASNFSCIVMEFCSGGDLHSLRHRHPRNRFSLSSARFYAAEVLVALEYLHMLGIIYRDLKPENVLVRSDGHIMLSDFDLSLCSHAIPAVELSPDDPPLDVSCTRPHSISSPFKCLSKRLFRSRKVQTFQSNRLFVAEPVEARSCSFVGTHEYVSPEVASGNSHGNAVDWWSFGIFIYEMVYGRTPFAGPSNEATLRNIIKKPLSFPTATPSSTLEMHARDLISGLLNKDPNRRLGLKRGAADVKMHPFFVGLNLALIRMVTPPEVPGLRRNKTTPFVSGKDSNGNRSSSKQHPASSFDYF

SEQ ID NO: 39225 - protein, 371 aa, Bacillus subtilis
MAAKTKKAIVDSKKQFDAIKKQFETFQILNEKGEVVNEAAMPDLTDDQLKELMRRMVFTRVLDQRSISLNRQGRLGFYAPTAGQEASQIATHFALEKEDFVLPGYRDVPQLIWHGLPLYQAFLFSRGHFRGNQMPDDVNALSPQIIIGAQYIQTAGVALGLKKRGKKAVAITYTGDGGRSQGDFYEGINFAGAYKAPAIFVVQNNRYAISTPVEKQSAAETIAQKAVAAGIVGVQVDGMDPLAVYAATAEARERAINGEGPTLIETLTFRYGPHTMAGDDPTKYRTKEIENEWEQKDPLVRFRAFLENKGLWSEEEEAKVIEDAKEEIKQAIKKADAEPKQKVTDLMKIMYEKMPHNLEEQFEIYTQKESK

SEQ ID NO: 39226 - protein, 843 aa, Thermosynechococcus elongatus BP-1
MRVVVMAGGSGTRLRPLTCDLPKPMVPVVNRPIAEHILNLLRRHNLDDVVMTLHYLPDVVRDYFGDGNEFGVHLSYVVEEEQPLGTAGSVKNIVNLLTDPFLVVSGDSITDVDLTDALRFHQQHGAPVTLILARVPQPKEFGIVFTDSDGRVRRFLEKPSAAEVFTDTVNTGIYILNPTVMDYLNSGIERDFSRDLFPLLLQADVPMYGYITDAYWCDVGSLQTYQQVQQDALYGRVHLEIQGHEVQPQIWVGHNTPLPPTVQLQAPLVLGNNCRLGAGVTLGPGTVLGDNVMIGNGSRLRSVVAWNGCFIGDDSELEHCILARHVHVDRHVTLQEGVIIGSRCVVREEASLSQGVRIWPGKRIEAGAIVNQSLIWGTTGQRYLFGQRGVAGVANVDITPEFAVRLAAAYASILEPGTSVLVSRDQRNVSRMVSHALMSGLMSVGIHVLNLEAIALPIARFAAQTLSVSGGIHVRAHPDRADQLLIEFFDHKGINLSRAKERQIETAYFREEIRRALLTDVGVMTHPNNCVAAYAQGFEKWLNTQLFYGSPAKIVIDYAYAVSGVVLPQILSKFGCDAVVLNATLHPTPLNILERQRLLRELGQVVTALSASLGVQVSANGERLTLVDNAGQVFSDQELTALMTYLTLLTHPGGTVVVPVTTSSAVEAIARQQGGHIIRSRTNPTDLMEACQHQSGVVLGGSAETGFIFPQLHPGFDAMFTIATLIELLALIGKPLTVIRQELPRVHYYHRPIRCPWLAKGSLMRHLVETHPRNHLSLIDGVKIGEPNTDHWVLILPDASEPLVHLYVNSPDALWSQQMLQRYSRRIEAFARLEPLSDATIKM

SEQ ID NO: 39227 - protein, 652 aa, Thermosynechococcus elongatus BP-1
MVVLKTETTQGSWSDKLRGIARWWSEFKIQTRLMATATLVVSIIMSGLTFWAVNTIQTNAHLNDTRYGRDLGLLLAADVAPLVAKGDTAAVAEFSRKFYERSASIRYILYADPDGEIYYGLPYSAPQVESALTLRRRIQLPETYHASQEPLVRQHQTPNGLVADVFVPLTFNGENLGVVALGINPNPTLIASANLTRDLTIAVFVSLWIMVILGGVFNALTITQPIKELVQGVKNIAAGNFKQRINLPFGGELGELITSFNDMAERLASYEAQNIEELQAEKAKLDTLVSTIADGAILLDTDMRIILVNPTAQRLFNWEGMNVIGQNALDCFPAPVCEKLTCPLYKASRGESEGGEFRVTLQEPSSRSVRILLTTVMDVQREKPKGIAITIQDITREVELNEAKAQLISNVSHELRTPLFNIKSIIETIQEYGSSLSEKEQQEFLETANHETDRLTRLVNDFLDISRLESGRPYQFGSVQMAQVIDQIMRTYQLNAANKSITLTAEVENPLPPVWGNYDLLIGALTNLVGNALKFTPENGRVTIRAYVWHPSSDPEQERVRIEVADTGMGIAPEDQPRVFERFFRVENRVHTLEGTGLGLAIVQDIIHKHNTQIHLISELGVGSTFWFDLAIDESALVDNPDGRAETALPPA

SEQ ID NO: 39228 - protein, 326 aa, Streptococcus pyogenes MGAS10394
MEAEMVTVSKEQHLDMFLKMERIREFDSRINKLVRRGFVQGMTHFSVGEEAANVGAVAHLSYDDIIFSNHRGHGQSIAKDMDLNKMMAELAGKATGVSKGRGGSMHLADFEKGNYGTNGIVGGGYALAVGAALTQQYKGTNNIAVAFSGDGATNEGSFHESVNMAATWKLPVIFFIINNRYGISMSINNATNTPHLYTRAEAYGIPGFYCEDGNDVMAVYETMGKAVEHVRGGNGPAIVEVESYRWFGHSTADAGKYRTKEEVDEWKEKDPMIKYRTYLTSEGIATDDELDAIQAQVKKEVDDAYEFAQNSPDPELSVAFEDVWVD

SEQ ID NO: 39229 - protein, 1358 aa, Solibacter usitatus Ellin6076
MAWTGWARLCTALIVSCVAPRPAPAAESSTGSLRLGIRTLPLIDKQDIRFVRVAAEGESLESRVTSIAQDRYGFLWFGSDDGLYRYDGYKLKSFRREPGNPNSLSDDTVTAIYRDRTGILWVGTGFGGLNRFDPASGTFTHYRHDPSNRGSLSSNAARCIFQDAAGALWVGTANGLDRLDQTTGSFAHYQHNKQDAGSLSSNEAVDIFEDRSGNLWVGTIGGGLNILDRSTGRFTRFRESYTAASPGDDSSALLSSIRQDHAGLLWVGNGLGTLDPRTGTLTRYAFRSKDPGGEIIKGLRALQEGREGELWLGMQNGLLLLDRERKQFARYLKKPANPQSLHNDDILSLFQDAEGNIWVGTQSGVSRFNPRPLFTIRQHEPGNSQSLVENNIRAVQVDRQGNLWVGTRRGLQRFEPKTGRATLYQHDPHDPSSISNNYVTVIREDRSGVLWVGTGGGGLNRFDGTRGRFFAYRYQPGNPAGLSSDGVLSLLEDREGMLWVATAAGLSRLNRRTGRFTTYHHDDSDPHSLSDDLIKTVFEDRDGTLWVGTKGGLNRFDRASQHFTSWQHNAHDASSLSHDQVNAISEDRKGRLWLATQEGLDQMDRSRGTFTTFTREDGLPDNAVQSILEDDHGSLWLATHNGLARFRPASGTFRNYSAADGLPGNLLNPLGTESSCRGPDGQLWFGSRNGLVSFYPDRLADNPYVPPVTLTDFRLFNKTVHPGPNSPLQQPIWATRSLTLTQAQGIFSLEFAALSNTAPESNRYRFMLEGLETEWNEVSSRQRLATYTNLPAGNYVFRVQGSNNNQVWNQEGVSLAIVVLAPWWATWWFRSTVGLVIAGMAFGAYQSRVRILRLGAARLERQVSERTSELLERTGELQIAKDAAEAANRAKTIFLANMSHELRTPLNAILGFSNLLREGDVSEWQRNDLDIINRSGEHLLSLVDEVLDVAKIEAGRGVLEIAPYDLAGMVRDVMDMMGARAQMKGLALLHADSSGLPRYVRADGPRLRQVLINLVGNAIKFTPSGSVTLRLDAGCVDDDGRFSLTFYVEDTGCGVAPEDHERIFEPFVQVGPAATKKGSGLGLAITRQLVEMMGGTVSVESTPGKGSRFRVEVPVYAHEDAGPLGERTERGRITGLEPGQPEFRVLVCEDEPTSAAVLLRFLQSAGFQVKVADNGAKGVDLFQTWRPDFIWMDLRMPVMNGAEAAKRIRAVEGGRAVKIAGVSASAFAEERSEVLAAGMDDFVRKPFRAAEIFDCMARHLGVRYCRSESQPCTRQESPPPLRAEALAGLPQELRAELQDALAALDVERISAVVVRVTERDFGLGSTLSHYADRLEYTAIFQAIENCQAPEVFAKGSTE

SEQ ID NO: 39230 - protein, 478 aa, Xylella fastidiosa Ann-1
MSEHYDVVVIGAGPAGYHAAIRAAQLGLKVACVDAALGKDGKPALGGTCLRVGCIPSKALLDSSRQYWNMGHLFNEHGISFKDAKMDVATMIARKDKIVKQFTGGIAMLFKANKITPYYGFAQLQPGNVVKVKQHEGKNIELKGANVILASGSDSVELPFATFDGETIVDNIGALDFTKVPKRLAVIGAGVIGLELGSVWKRLGAEVTILEAMPNFLAAVDADVAKTAAKEFKQQGLDIKLGAKVSRTEISSKNNKKEVIVTYTDASGKQTLTVDKLLVAVGRKAATKGLLADGTGVQLNERGQIVVDEHCHTGVDGVWAIGDCVRGPMLAHKGFEEGIAVAELIAGMPGHVNFETIPWVIYTEPEIAWVGKTEQELKADSIPYKAGSFPFAAVGRAVAMAEPSGFVKVLAHAETDRVLGLHLIGVNVSELVHEGVLAMEFSGSADDLARICHAHPTLSEAIHDAAMAVSKRAIHKAN

SEQ ID NO: 39231 - protein, 399 aa, Arabidopsis thaliana
MESRVLLRATANVVGIPKLRRPIGAIHRQFSTASSSSFSVKPIGGIGEGANLISGRQLRPILLLDSSAINGGEKREILKPVKAAAAEGGDTAGDAKVGFLAKYPWLVTGFFFFMWYFLNVIFNILNKKIYNYFPYPYFVSVIHLFVGVVYCLISWSVGLPKRAPIDSNLLKVLIPVAVCHALGHVTSNVSFAAVAVSFTHTIKALEPFFNAAASQFIMGQSIPITLWLSLAPVVLGVAMASLTELSFNWLGFISAMISNISFTYRSIFSKKAMTDMDSTNVYAYISIIVEGPKLLNHGFADAIAKVGMTKFISDLFWVGMFYHLYNQLATNTLERVAPLTHAVGNVLKRVFVIGFSIVIFGNKISTQTGIGTGIAIAGVAMYSIIKAKIEEEKRQGKKA

SEQ ID NO: 39232 - protein, 437 aa, Petunia x hybrida
EKNPYDEIQNPKGIIQMGLAENQLSFDLLESWLSQNPDAAGFKRNGESIFRELALFQDYHGLPAFKNALVKFMAEIRGNKVTFDSNNLVLTAGATSANETLMFCLADRGDAFLLPTPYYPGFDRDLKWRTGAEIVPIQCTSSNEFRITESALEEAYQEAKSRNLRVKGVLVTNPSNPLGTTLTRNELELLLSFVDTKGIHLISDEIYSGTVFNSPNFVSVMEVLIENDCMYTEVWDRVHIVYSLSKDLGLPGFRVGAIYSNDELVVSAATKMSSFGLISSQTQYLLSAMLSDKKFRKKYVSENQKRLKKRHAMLITGLQNAGISCLESNAGLFCWVDMRHLLKSNTFEAEIELWKEIVYQVGLNISPGSSCHCTEPGWFRVCFANMSEDTLTLAMRRIKSFVDSSATSADTHNNQTNQNTNTNSTKKKLFSKWGFRL

SEQ ID NO: 39233 - protein, 236 aa, Oryza sativa (indica cultivar-group)
MAGADVDVGTELRLGLPGGGGGAAEAAAKAAKRGFEETIDLKLKLPTAGMEEAAAGKAEAPAAEKAKRPAEAAAADAEKPPAPKAQAVGWPPVRSFRRNIMTVQSVKSKKEEEADKQQQQPAANASGSNSSAFVKVSMDGAPYLRKVDLKMYNSYKDLSLALQKMFGTFTATGNNMNEVNGSDAGTTYEDKDGDWMLVGDVPWQMFVESCKRLRIMKGSEAIGLAPRAKDKYKNKS

SEQ ID NO: 39234 - protein, 624 aa, Streptococcus pyogenes MGAS10394
MFRKVLVVLTWVRQRNQRFLTYRKNSIAFSLLLVSYIMAVEIIMPKLGVDMQEGEIIEWKKQEGDTVNEGDILLEIMSDKTNMELEAEDSGVLLKITRQAGETVPVTEVIGYIGAEGESVEVSSPAASDVNVARTTEDLEAAGLEVPKAPAQAASAAPKAALADDEYDIIVVGGGPAGYYAAIRGAQLGGKIAIVEKSEFGGTCLNVGCIPTKTYLKNAEILDGIKIAAGRGINLASTNYTIDMDKTVDFKNTVVKTLTGGVQGLLKANKVTIFNGLGQVNPDKTVNIGSQTIKGRNVILATGSKVSRINIPGIDSKLVLTSDDILDLREMPKSLAVMGGGVVGIELGLVWASYGVDVTVIEMADRIIPAMDKEVSLELQKILSKKGMKIKTSVGVSEIVEANNQLTLKLNNGEEVVAEKALLSIGRVPQMNGLENLNLEMDRNRIKVNDYQETSIPGIYAPGDVNGTKMLAHAAYRMGEVAAENAIHGNTTRKANLKYTPAAVYTHPEVAMVGLTEEQAREQYGDVLIGKNSFTGNGRAIASNEAHGFVKVIADAKYHEILGVHIIGPAAAEMINEAATIMESELTVDELLLSIHGHPTFSEVMYEAFADVLGEAIHNPPKRK

SEQ ID NO: 39235 - protein, 381 aa, Solibacter usitatus Ellin6076
MRVLRTFFWAAVLAAGFIWVTSVANWDVGRALRPVRNAGRMWSEPTAAAGAGFSTDEQNNIDVYKSARDATVFITSTVFTRSFFGVYPEKGTGTGFVISPEGEILTNNHVAGGGSELSVTLSDKKVYKARVLGIDTRNDLALIKIDAGRKLPVVPLGDSEHLMVGQKVLAIGNPFQFEGTLTTGIVSSLGRTIQTEGERELEGMIQTDAAINPGNSGGPLLDSHGNVIGINTAIYGAQGSIGIGFAMPISRAKAMLEEYKTRGKISRPTLGINTVYIAGDLAEMLQLPSSGGLLIQEVERGSAAAVAGLRGYSRIVIVGNYRLGIGGDLITAADGHTIDDKETLKRLMDKKHGGDTLELTVNRGGRSEKIKVKLGEAPQQF

SEQ ID NO: 39236 - protein, 272 aa, Zea mays
SLPCAVTSMELLHAVIHGAATTTTTTTTTTTSSSATVTSGDEGAHLPQGWAKKKRSRRQRSEEENLALCLLMLSRGDRHRVQAPPPPVPSAEFRCSVCGKSFGSYQALGGHKTSHRVKLPTPPAAHVQLPAPPAVALLVEAPAPPPVTATPPPLPLVAVAVAVREPATSSTSDGAAAGRVHRCTICHKEFPTGQALGGHKRKHYDGGAAAAETSEVGSSGNGSSAARAFDLNLPAVPEFAFRCGAKPGKMWDEDQEVQSPLAFKKPRLLMTA

SEQ ID NO: 39237 - protein, 484 aa, Pseudomonas fluorescens Pf-5
MSESYDVIVIGAGPGGYVAAIRAAQLGLKTVCIERYKGKDGKTALGGTCLNVGCIPSKALLDSSHHYYEARNGFEVHGIAISNPQMDVPAMLARKDNVVRNFNGGIASLFKANGVALLEGHGKLLANKEVEVTAADGSTQRISAGNIILAPGSRPIDIPAAPLAGEVIVDSTGALEFTQVPKRLGVIGAGVIGLELGSVWARLGAQVTVLEALDSFLPAVDAQIAKEAQKILGKQGLDIRLGARVTACEVQGDSVKVSLSEAGEDKQQVFDRLIVAVGRRPLTTDLLAADSGVHLDERGFIHVDGQCCTSVPGVFAIGDVVRGPMLAHKASEEGVMVAEGIAGHRHPLNYDLIPSVIYTHPEIAWVGQTEQALKAEGVELNIGTFPFAASSRAMAANDTAGLVKVIADAGTDRVLGVHVIGPGAAELVQEGAIGMEFGTSAEDLGMMVFSHPTLSEALHEAALAVNGQAIHIGNRKKKAPAGVK

SEQ ID NO: 39238 - protein, 215 aa, Bdellovibrio bacteriovorus HD100
MKFFIDTAEIEEIRQANLRGWVDGVTTNPSLIAKSGKDFHTVIKEICKEITGPVSAEVISLQHEEMVREGKELAKLASNVVVKIPMCEDGMIAVKKLKSEGIKTNVTLVFSPMQALLAAKAGATMVSPFVGRLDDIGVEGMQMVDQVIQMYRNYDFETEVLVASVRSPMHIQLAAEMGADIATIPFKVMQSMTHHPLTDKGIKMFMDDWNKAQKK

SEQ ID NO: 39239 - protein, 126 aa, Methanococcoides burtonii DSM 6242
MANGIWGVAHIKCSFNNTIITVTDLTGAETIAKSSGGMVVKAARDESSPYTAMQMATQLADILRDKGLEGVHIKVRAPGGNKQRSPGPGAQAAIRAFARAGVRIGRIEDVTPVPHDGTRPKGGRRV

SEQ ID NO: 39240 - protein, 454 aa, Mesorhizobium sp. BNC1
MLEAARIDAAAVINDNNISRFQYRIFILATLIMMCDGFDTQAVAYVAPSIVAEWNMAPGSFGPVFAALLLGSMVGAFAFGYLADKIGRKYTLAGCVALFGILNFASAYATSIETFTVLRFLCGIGLGGTVPNVTSLVSEYAPARKRATLVAITWAGFGLGAVVGGLISVPLISHFGWPAVFIAGGILPLLLLPFIFFSVPESIKFLILAGGKGAAVASILKLICPSGSFKDNDVFVLEESRPGRGQISALFKDGLAIGSIFLCLAFFMSLLLVYLFINWIPLLLRQAGLPLQHAVMGTIIFNLAGIIGSVFCTQLIDRKVARPVSILIAAYFIGAAAVFSIGYAGTAFWPIMITIFLSGFFIIGVQLSLNAFITNYYPTSIRGTGVGWSQVIGRLGSLLGPLIGGALVSQGMAPSQLFQVSAVAPLLACVSLLIFARLSRADPKGQPAISDAAA

SEQ ID NO: 39241 - protein, 764 aa, Yarrowia lipolytica CLIB122
MALMQPLANEFEMKEPVLKKRRIGATQMEPQLTIVEENNHSGAPSSQTQNGGAVASYPDHVTNQVISSLTCPPNLQVAHDYANHKTPSFEVQAYAKLAGQNWTYFVQKLHVIIGRSSEQQEVDIDLGPAKVVSRKHASIEYNSEAQQWQLWVRGRNGVKVDRVVYKEGHVALRSGSVVDIGGVQMMFVLPGQKVELSGVWVEEAEQQQQQQQGHVADTSSNHMTSLPHPQMTPTHHQIGHMNSLTDISDISMASHMSMDDFNHSFTSLADRVSPSRGKSVFSVYSGVDHGGHHSPHVAHAQPQQPQQAPHLQTQLPQQQQQQPLPLPSGNMTSSSYPRGVALISRPQIRNHTNHYTDYDLSLDDAKDIKPPYSYATMITKAILSGEEHMMTLAEIYEWISKHYSFYRHSRTGWQNSIRHNLSLNKAFVKVPRRSDEPGKGMKWQVTPEHKEEFLRKSKGGELVKKRPAGTLTLQRTGGASGGHVGGVTGGSMSTFVVAPPPPGGEQICLGTGPVIPQQSAQPSLGGLAGGSGREGRGSIDGATPNLAHPNSSQSQNSSANSQGASNSNSSSNHGGSSNNSEQPSEQSSGSNNPLSTPRKDQFGGVGFEDFAFTPSPRYKETFTPDRLSNISASRSTVNMGVAATKTESGTGTTPSVAGATTLPTTSATPAPAAPNLSLAPPSAQQQLPSSFMPASSPAPFWRFMQLSSTPVRGGEGFSPVKYSPSREGGSGARGGDADGLGDLQNIDLTRGFKNWQDSPAKVAK

SEQ ID NO: 39242 - protein, 1307 aa, Magnaporthe grisea
MADAATLAAVAAIVENIATNSGAPGKNASFRSSTYVQLPGPESDEKKQLERELAALVIRVQQLETRANAAPATIFPDTPNETAHSLFGDDSSSPTSSSSGREPKRLKSASSTTRNGFTTDGRPSKLNAITDEELEGLREHVDGQSRLLDSQRAELDGVNAQLLEQKQLQERALAIIEQERVATLERELWKHQKANEAFQKALREIGSIVTAAARGDLSKRVKINPIEMDPEITTFKRTMNAMMDQLGVFSSEVSRVAREVGTEGILGGQAQIEGVDGTWKELTDNVNVMAQNLTDQVREIASVTTAVAHGDLTQKIESAAKGEILQLQQTINTMVDQLRTFASEVTRVARDVGTEGMLGGQADVEGVKGMWNELTVNVNAMANNLTTQVRDIINVTTAVAKGDLTQKVQAECRGEIFELKNTINSMVDQLQQFAREVTKIAREVGTEGRLGGQATVHDVQGTWRDLTENVNGMAMNLTTQVREIANVTSAVAAGDLSKKIRVEVKGEILDLKNTINTMVDRLGTFAFEVSKVARAVGTDGTLGGQAQVENVEGKWKDLTENVNTMASNLTSQVRGISTVTQAIANGDMSRKIDVEAKGEILILKETINNMVDRLSIFCNEVQRVAKDVGVDGIMGGQADVAGLKGRWKEITTDVNTMANNLTAQVRAFGDITNAATDGDFTKLVEVEASGEMDELKRKINQMVYNLRDSIQRNTQAREAAELANKTKSEFLANMSHEIRTPMNGIIGMTQLTLDTDLTQYQREMLNIVNNLAMSLLTIIDDILDLSKIEAKRMVIEEIPYTLRGTVFNALKTLAVKANDKFLDLTYRVDSSVPDHVIGDSFRLRQIILNLVGNAIKFTEHGEVSLTIQKGNDVTCLPNEYMIEFVVSDTGIGIPTDKLGLIFDTFQQADGSMTRKFGGTGLGLSISKRLVNLMGGDVWVKSQYGKGSSFYFTCRVRLADVDISLIRKQLKPYKGHQVLFIDKGKTGHGPEVGQMLGQLGLVPIVLESEQNHTLTRVRGKECPYDVIVVDSIDTARRLRGIDDFKYLPIVLLAPTVHVSLKSCLDLGITSYMTMPCKLIDLGNGMVPALENRATPSLSDNTKSFEILLAEDNTVNQRLAVKILEKYNHVVTVVSNGAEALEAVKDNKYDVILMDVQMPVMGGFEATAKIREYERSLGTQRTPIIALTAHAMMGDREKCIEAQMDEYLSKPLQQNHLIQTILKCATLGGALLEQNRERELELARHAEHKGGLSTDPARASSVMRPPLHHRPVTTAESLSGGAESPSLMANDGEDPIQRARSSLSEPGCL

SEQ ID NO: 39243 - protein, 268 aa, Escherichia coli
MERYESLFAQLKERKEGAFVPFVTLGDPGIEQSLKIIDTLIEAGADALELGIPFSDPLADGPTIQNATLRAFAAGVTPAQCFEMLALIRQKHPTIPIGLLMYANLVFNKGIDEFYAQCEKVGVDSVLVADVPVEESAPFRQAALRHNVAPIFICPPNADDDLLRQIASYGRGYTYLLSRAGVTGAENRAALPLNHLVTKLKEYNAAPPLQGFGISAPDQVKAAIDAGAAGAISGSAIVKIIEQHINEPEKMLAALKAFVQPMKAATRS

SEQ ID NO: 39244 - protein, 343 aa, Vibrio cholerae O1 biovar eltor str. N16961
MKIKALSKLKPEQGIWMNEVDMPELGHNDLLIKIKKTAICGTDVHIYNWDEWSQKTIPVPMVVGHEYVGEVVGIGQEVRGFQIGDRVSGEGHITCGHCRNCRGGRTHLCRNTIGVGVNRTGCFSEYLVIPAFNAFKIPDGISDDLASIFDPFGNAVHTALSFDLVGEDVLITGAGPIGIMAAAVAKHVGARHVVITDVNEYRLDLARKMGVTRAVNVAEQNLEDVMKELGMTEGFDVGLEMSGVPSAFSAMLKTMNHGGRIALLGIPPSSMAIDWNQVIFKGLVIKGIYGREMFETWYKMASLIQSGLDISPIITHHFKVDDFQKGFDIMRSGASGKVILDWQ

SEQ ID NO: 39245 - protein, 397 aa, Vibrio cholerae O1 biovar eltor str. N16961
MSSAFYQQIRTQLEEVKAEGLYKSERVITSQQQAAVEISTGEQVLNFCANNYLGLANHPALIEAAKQGMDSHGFGMASVRFICGTQDIHKQLEQKLSQFLGKEDTILYTSCFDANAGLFETLLDKEDAIISDALNHASIIDGVRLCKAMRFRYSNNNMAELEEQLIAADAAGARHKLIVTDGVFSMDGVVANLPAICDLADKYNALVMVDDSHAVGFMGANGRGTHEYHDVIDRIDIITGTLGKAMGGASGGYTSGKKEVIDWLRQRSRPYLFSNSVAPSIVAASLRVLDLLQESGDLRERLWENAAHFRTRMEAAGFTMGGADHAIIPIMLGDAKVAAEFAERALAKGIYVIGFSFPVVPKGQARIRTQMSAAHSREQLDKAIDAFIEVGRDMGLI

SEQ ID NO: 39246 - protein, 215 aa, Bacillus halodurans C-125
MEINTVLFDLDGTLINTNELIISSFLHTFETYYPGKYGRKDAIECIGPPLTDSFKRLDPERVEEMVATYRKHNHAHHDKLVEPYEGVYETVKTLHEQGFKLAIVTTKIRETAMKGLKLFGLDEFFDVIVALDDVENVKPNPEPLEKAMNALGAKKEETIMVGDNSHDILGGKNAGVKTAVVGYAIRGEDYVRQFDPDYVLRSMPDLLDIVGVKAR

SEQ ID NO: 39247 - protein, 385 aa, Pantoea agglomerans
MSWQQRIDTALATRRAADALRTRRVVEQGAGRWLTVGDSRYCNFSSNDYLGLSQHPAIVRAWQQGAEQYGVGSGGSGHVSGYTRAHYALESELAEWLGYPRALLFISGFAANQAVIAALTGKEDRIVADKLSHASLLEAASFSPAQLRRFAHNDVSQLAALLDKPCDGQQLAVTEGVFSMDGDSAPLAAIAEQVRRAGAWLLVDDAHGIAVTGHKGRGSCQQQEVKPELLVVTFGKGFGVSGAAVLCSEAVATYFEQFARHLIYSTSMPPAQAVALSAALSVIRGEEGDQRRTALAGLIQRFRHGAAALPGRITHSQSAIQPLIVGDNSRALSLAERLRQKGCWVTAIRPPTVPAGTARLRLTLTAAHQPEDIDRLLEVLHESGE

SEQ ID NO: 39248 - protein, 338 aa, Azospirillum brasilense
MNTPHTVLVTGGAGYVGSHCVAELLDRGFRVVVLDNLRQGHRVAVPSDAAFVEADLADMDALTRVFAEWRFDAVFHFAALSLVGESMRDPHLYLHGNTVNSLNLIRAATTAGVRKMVFSSTANLFGTPERLPIDEETTIDPGSPYGESKFFIERALHWADRCHGLRSACLRYFNAAGAHPNGTLGEDHAPETHLIPLVLDAPAAGRSHIEIFGDDYPTADGTCVRDYIHVCDLADAHLRVLPALETRSRFNLGNGTGYSVREVIAATERVTGLTVPVRVGPRRAGDPAVLIASSERIRGELGWSPRFPDLDSIIGSAWEWRRRHPGGYRGPAVAQAAE

SEQ ID NO: 39249 - protein, 266 aa, Thermosynechococcus elongatus BP-1
MIVPKISERFEHCRARQRCALIPFLTAGDPDLETTVAALKILDDHGADLIELGMPYSDPLADGPVIQAAATRALQRGTRLEAVLEMTTDLHQQLTAPLILFSYYNPIYHRGVSSFLKAVAQAGIKGLVIPDLPLEEAEPVLAETANLGLELTLLIAPTTSPERMRAIATASQGFIYLVSTTGVTGMRQEMASRVQELLHTLRQITPKPIGVGFGIASPEHARQVRDWGADAAIVGSAFVKRLAEPDQGLAAVAEFCQSLRTALDTP

SEQ ID NO: 39250 - protein, 1484 aa, ASPERGILLUS NIDULANS FGSC A4
MSAHGPPAVPSRNALRVLRNLALAGSTVGSFCTVAAITYDVHRRVSVAERIIENKRALQTSAPRYDATSAARRISRMMEAAEAGEFMGLEAWKESEKRYRNAPYPSTGYDGNGSPGESPGTCTTDGANSPASVGSMTGTATKSEEVTELVTELGWKLNRLRHGPKTDIPPSKPLPPSLKPKYVVRQPDPDADIATIDARLDLPSGNQLTLDERIESLTERGQYIDAAQIFLDEHPASNGGISIHRRQLVEQLFYLNCRQENVFIARSLFERLEEVDRVSHTMWKVLIVALAKKGCIESATTVFLRYKDSYSIPGILLDVVLRCLIESRRLQTAKQVLFQHLHLDRDCGLCGVYLTGLWKKARSIELLNGQFTKLLIMLRRMDKKPTHKLISPMLQAYVDFGRFADAETLLHEMTVTYQVPLNVRMKGILVYAKALQCDWTAVDEGFNEMHNLGLTSPKADFLKIFHRIFLEYWPSHTAVEIRDFLYRYIDKFDIVPDQVLWGHILEAIVERGDMAMLSEFTNLARERGWKINLDQTAVLDVLRKRQSALGDSPVGFWQMLHAARADNMRATASQQLLGHDQRTNWRQSNHTVEQAYFADGWYERTVHELTGPSRSVDDYQNLQTQMIYYIHAGKMTEALQCFQDARVSGFELKPQEVELALIATLLSQGLGAAQALVEVEVEWIEWLPIFFRQIKDMDPSAESEFIQLAVFRFYRIRWMRRSMMVTHNITAATSGRLIASNKPEMAIDLLVSVYKSKYGRLKAFDAVCMKMFLRAFAATENLRGIRWCILTALSRDSALSRDFAVEVDRVLGVLHRESVGISMDLQKAKLRASQLKTLTYLGEVLHKKFEGYFKPGVWNVNYGLKKARRRELKTPSANIWNFDYNKKKQAQSKIQGIVNSWDEEYELERLLDCIDNDQNSILARWNEVTCRRQELELEQIDGVPVYLFRLSRPSLRKKAIFTANSQPQFTSFPLSLLSFTNPQILRPEYAQRPPYTALRPTVPADSLKNFSSATSMATTRANGHANGQASKPSDAAELRRRLHHEADVVIVGAGVLGCALAVALGRQGRSVLLLEQSLKEPDRIVGELLQPGGVSALEQLGLRDCLEDIDAIPTNGYYVTYLGKPVKIPYPSQSPGAPPPEGRSFHHGRFVMKLREAAGACPNVTIVETKVTDLITSSHSKQVLGVECVTKESKDCYFGQITVVADGYASKFRKQYHPYTPKVRSKFWGLELIDAELPQPHYGHVLLEPERPPILIYQIGTHETRILCDIPENLPSASVKNGGVKGHLRNVVLPSLPKCVQPSFAAALDKGQLRSMPNSFLPSAPNKTPGLIVLGDALNMRHPLTGGGMTVALNDVVILRDLLSPEKVPRLSDTRLVLKKLSTFHWRRKMGASVINILAQALYSLFAADDDNLKALQRGCFQYFSMGMYETPVSLLGGMLKKPEVLFAHFFTVAFLSLWMIIRDSPLYKLPLALIRCALVFWTA

SEQ ID NO: 39251 - protein, 428 aa, Sulfolobus acidocaldarius
MEKIRWVIEESEKYLANTTRDPESQPLVIDRGEGVWVYDIEGNKYLDFTSGIGVNNLGWPSHPDVIKVAQIQMTRLAHAPANDFYNIPQMELAKRLVQLSPGNFSKKVFFSNSGTESVEASIKLVKGTGRKYLIAFLGSFHGRTLGSLALTASKPVQRYSAGPFSIGVFHVPYPNPFRNPWKINGYEKPDELINAVIEYIDFWLFQHVVDPEEVAGIIFEPIQGEGGYVVPPHNFFAELRKLAQKYNIPLIDDEVQMGLGRTGKMFAIEHFNIEPDIITLAKALGGGLVPVGATIFRSDLDFKKKGIHSNTFGGNALSMSIGLKVVELIKELMPHVNEIGKIFGEELCQMKVDDCRGLGLAWGIEFVKSDKTPDPKVRDRVVTEAFKEGLIVISAGKSSIRIIPPLVISEEAKIGLSKLKTAINRVRG

SEQ ID NO: 39252 - protein, 323 aa, Campylobacter lari RM2100
MKKFSLWCDFIENEFLDHEFLDLLYAKTINGATSNPAIFKNAILNSSIYKEKIKKINIKDKKSLYEYLAIEDIQKAADKLSLNFYENNDGFISIEIDPRLKDNTSLSLAEAKRLYTQISKENVMMKIPATNASYEVMYELMKSGISVNATLIFDFEQTKKCFEALNLGLKEFRKNNIANKKEPQAVISIFVSRFDRLLNEKVVDKNFIGILTATKSYKYIISQNEDNIRALFASTGIKGDDLEKDYYIKELLYDKAINTAPLDAINAFKGKNLVFKEPLKDECIEKKLQANISNDELKNACKFLLDDGLEQFCIAYEDILKSL

SEQ ID NO: 39253 - protein, 150 aa, Zea mays
  misc_feature (32)..(32): Xaa can be any naturally occurring amino acid
  unsure (1)..(150): unsure at all Xaa locations
CTKYYQQESSKLRQMIHSLQNANTLTCLDGLXRNIVGDSIHTMGLRDLKQMEGKLEKAIIKIRARKNELLYAEVDYMQKREMDLQTDNMYLRSKIAESNETGQPAMHMMGVPPPTSEYDHMAPFDSRNFLQVSMPQHYSHQLQPTTLQLG

SEQ ID NO: 39254 - protein, 454 aa, Oryza sativa
  misc_feature (88)..(88): Xaa can be any naturally occurring amino acid
  misc_feature (96)..(96): Xaa can be any naturally occurring amino acid
  misc_feature (164)..(164): Xaa can be any naturally occurring amino acid
  misc_feature (241)..(241): Xaa can be any naturally occurring amino acid
  misc_feature (330)..(330): Xaa can be any naturally occurring amino acid
  unsure (1)..(454): unsure at all Xaa locations
MSAYCGKYKDELIKNAAYIGTPGKGILAADESTGTIGKRFASINVENVEENRRSLRELLFTTPGALQHLSGVILFEETLYQKTKDGKXFVDVLKEXGVLPGIKVDKGTVEVAGTNKETTTQGHDDLGKRCAKYYEAGARFAKWRAVLKIGPNEPSQLSIDLNAXGLARYAIICQENGLVPIVEPEILVDGSHDIERCAYVTEKVLAACYKALNEHHVLLEGSLLKPNMVTPGSESKKVSPXLIAEYTVRALQRTVPAAVPAIVFLSGGQSEEEATVNLNAMNKLSTKKPWALSFSFGRALQQSTLKAWGGKTENVVKAQKAFITRCKANXEATLGTYQGDAVLGEGASESLHVKDVQVLSLLLVVAEDPRGPRQYEHVGWYCIPRGPSARSAAALCFRASPVLVHLVFSSPWPARPPGISSCTTASRRRCSGRGPGGPRSNSAARPRAQAASSE

SEQ ID NO: 39255 - protein, 341 aa, Arabidopsis thaliana
MEKKKVATPLVCHGHSRPVVDLFYSPITPDGFFLISASKDSQPMLRNGETGDWIGTFEGHKGAVWSSCLDNNALRAASASADFSAKLWDALTGDVLHSFEHKHIVRACAFSQDTKYLITGGFEKILRVFDLNRLDAPPTEIDKSPGSIRTLTWLHGDQTILSSCTDIGGVRLWDVRSGKIVQTLETKSPVTSAEVSQDGRYITTADGSTVKFWDANHFGLVKSYDMPCNIESASLEPKSGNKFVAGGEDMWVRLFDFHTGKEIGCNKGHHGPVHCVRFAPTGESYASGSEDGTIRIWQTGPVNPEEISESKPKQSVDEVARKIEGFHINKEGKTAEKPSDA

SEQ ID NO: 39256 - protein, 216 aa, Brassica napus
  misc_feature (133)..(133): Xaa can be any naturally occurring amino acid
  misc_feature (144)..(144): Xaa can be any naturally occurring amino acid
  unsure (1)..(216): unsure at all Xaa locations
MSKLQSEAVREAISSMITHCKETKPRKFTETIELQIGLKNYDPQKDKRFSGSVKLPHIPRPKMKICMLGDAQHVEEAEKIGLDSMDVEALKKLNKNKKLVKKLAKKFHAFLASESVIKQIPRLLGPGLNKAGXFQLVSHLESLXSKVNETKATVKFQLKKVLCMGVTVGNLGMEEKQIFQNVQMSVNFLVSLLKKNWQNVRCLYLKSTMGPPTRVF

SEQ ID NO: 39257 - protein, 267 aa, Rhodobacter sphaeroides 2.4.1
MRVSLIQMNSAENKERNLDVAEEMIRKAVGVEKPDLVVLPEYFAFLGEGREAVHGNGEAFPEGPTYRRFSALASELGVTLHLGSMVEKAGNGHYNTTLVFGPDGAEIARYRKMHLFDIDVPGGMSYRESDTISRGEEVVTYRVGETTVGCAICYDIRFPELFRALRDKGAEVIVLPAAFTLMTGKDHWEVLARARAIETQTYFLAVGQTGSHAEGRKWCWGHTMAIDPWGHVVAQCSDGEGLTTAVVDPARIEAVRRDVPVAQHHVL

SEQ ID NO: 39258 - protein, 107 aa, Solibacter usitatus Ellin6076
MEPAQRNCIIINMDLRPLHDRVMVKRLDEGEQVRGGIIIPDTAKEKPQQAEVKAVGNGKLLENGERVALDVKAGDRILFGKYGGAEIKIDGEEYLILREDEILAILE

SEQ ID NO: 39259 - protein, 418 aa, Arabidopsis thaliana
MQALQSSSLRASPPNPLRLPSNRQSHQLITNARPLRRQQRSFISASASTVSAPKRETDPKKRVVITGMGLVSVFGNDVDAYYEKLLSGESGISLIDRFDASKFPTRFGGQIRGFSSEGYIDGKNERRLDDCLKYCIVAGKKALESANLGGDKLNTIDKRKAGVLVGTGMGGLTVFSEGVQNLIEKGHRRISPFFIPYAAIIPIGLGGFVACRALSQRNDDPQTASRPWDKARDGFVMGEGAGVLVMESLEHAMKRGAPIVAEYLGGAVNCDAHHMTDPRADGLGVSSCIERCLEDAGVSPEEVNYINAHATSTLAGDLAEINAIKKVFKSTSGIKINATKSMIGHCLGAAGGLEAIATVKAINTGWLHPSINQFNPEQAVDFDTVPNEKKQHEVDVAISNSFGFGGHNSVVAFSAFKP

SEQ ID NO: 39260 - protein, 373 aa, Solibacter usitatus Ellin6076
MGTTTAGLEGIIAGESEICYIDGYLGILSYRGFNIHTLADNAKFEEVIFLLWNGWLPRQAELDALKAALVAERELPGAIVDFLKSAPKVNTMDLLRTAVSMLSLHDAEAQDMSAEANHRKAIRLMSKTATLVTTYDRLRNGKEVIPGDPKLSFAANFLYTLTGNRPDEIMERAFDVAMTLHADHELNASTFAARVVAATLSDIYSAITAGIGALKGPLHGGANQDVIKWLLSLGDEEEAVKAVENTLARKVKIPGFGHRVYRTDDPRATHLRVLSEELGKRTGHEKLYRLSQRMEATVKGIKGLNPNVDFYSASAYYSLGIPIDLYTPIFAVSRMSGWTAHVLEQYRNNRLIRPRAEYKGNPDGQTWIPIDKR

SEQ ID NO: 39261 - protein, 366 aa, Glycine max
MKTVLFLLLVSALIPIAVAQPNDFSDANLNEFNSSIAIIIIILVIAFFLMAFFSIYVRHCADSPSNTVRPLTTARSRRAARGLDPALIQTFPILEYSVVKIHKIGKEALECAVCLCEFEDTETLRLLPKCDHVFHPECIDEWLSSHTTCPVCRANLLPTESEDAIANANANGVVPVPETLTRDIESQNDAVQAAPEQQNAEADPVLPEPEVVSLDKTLNRNRTRGSRSNRPRRFPRSHSTGHSLVQPGENTDRFTLKLPLEVRKQLINRQLQRASSLIVLPREGSSRQGYRTGGEGSSRAKISRRLDRSLKSDRWIFSMAAPFFARALSIRSPRVRNNDVEGAASSSSPTAPIMPPTAVDSARPPV

SEQ ID NO: 39262 - protein, 527 aa, Zea mays
MAMAMMAMRRAVALGARHIPAAAASSFRVVSLRHMSADAGAAMEKIRAAGLLRTQGLIAGQWVDAYDGKTIEVQNPATGEVLANVSCMGSRETSDAIASAHSTFYSWSKFTASERSKALRKWYDLIISHKEELALLMTLEQGKPMKEALGEVNYGASFIEYFAEEAKRIYGDIIPPTLSDRRLLVLKQPVGVVGAITPWNFPLAMITRKVGPALACGCTVVVKPSEFTPLTALAAADLALQAGIPAGALNVVMGNAAEIGDALLQSTQVRKITFTGSTAVGKKLMAGSANTVKKVSLELGGNAPCIVFDDADIDVAVKGSLAAKFRNSGQTCVCANRILVQEGIYEKFAKAFIQAVQSLKVGNGLEESTSQGPLINEAAVQKVEKFINDATSKGANVMLGGKRHSLGMSFYEPTVVGNVSNDMLLFREEVFGPVAPLIPFKTEEEAVHMANDTNTGLAAYIFTKSIPRSWRVSESLEYGLVGVNEGIISTEVAPFGGVKQSGLGREGSKYGIDEYLELKYICMGNLG

SEQ ID NO: 39263 - protein, 167 aa, Brassica napus
PTRPPTRPPTRPDKSKPDKEKRKRNINVQGAYLHVLGDSIQSVGVMIGGAIIWYNPEWKIVDLICTLVFSVIVLGTTINMIRSILEVLMESTPREIDATKLEKGLLEMEEVVAVHELHIWAITVGKVLLACHVNITPEADADMVLNKVIDYIRREYNISHVTIQIER

SEQ ID NO: 39264 - protein, 90 aa, Medicago sativa
YYEAGARFAKWRAVLKIGPNEPSPLSIHENAYGLARYAVICQENGLVPIVEPEILVDGSHDIAKCADVTERVLAACYKALSDHHVLLEGT

SEQ ID NO: 39265 - protein, 256 aa, Zea mays
KKRGEGEQLPLPASHVVIKRSGAGVTEGVQFIHLVPPGEPEGHPPSKAGAMDDPVERLKDGFHKFKTEVYDKKPELFEPLKAGQAPKYMVFACSDSRVCPSVTLGLQPGEAFTVRNIAAMVPAYDKTKYTGIGSAIEYAVCALKVEVLVVIGHSCCGGIRALLSLQDGAPDTFHFVENWVKIGFPAKIKVKKDHASVPFDDQCSILEKEAVNLSLENLKTYPFVKDGLANGTLKLVGGHYNFVSGEFLTWDNKQPS

SEQ ID NO: 39266 - protein, 268 aa, Escherichia coli
MERYESLFTQLKERKEGAFVPFVTLGDPGIEQSLKIIDTLIEAGADALELGIPFSDPLADGPTIQNATLRAFAAGVTPAQCFEVLALIRQKHPTIPIGLLMYANLVFNKGIDEFYAECEKVGVDSVLVADVPVEESAPFRQAALRHNVAPIFICPPNADDDLLRQIASYGRGYTYLLSRAGVTGAENRAALPLNHLVAKLKEYNAAPPLQGFGISAPDQVKAAIDAGAAGAISGSAIVKIIEQHINEPEKMLAALKAFVQPMKAATRS

SEQ ID NO: 39267 - protein, 453 aa, GIBBERELLA ZEAE PH-1
MKGEILHLHLGQAGTQLGNSAWELYLLEHGLGPDGRPDPNAPDIGDPGSFETFFTETNSGKYVPRSLFVDLDPSPIDEIRTGEYRNLFHPELLVSGKEDAANNYARGHYTIGKEMVDNVMDRIRRVADNCQSLQGFLIFHSFGGGTGSGFGALLLERLSTEYGKKSKLEFAVYPAPRTSTAVVEPYNAVLSTHSTIENSDCTFLVDNEAVYDICRRNLDIPRPSYEHLNRLIAQVVSSITSSLRFDGALNVDLNEFQTNLVPYPRIHYPLISYAPVISANKSEHESFKVQELTFQCFEPNNQMVVCDPRNGKYMAVALLYRGDCVPRDCNAAIASLKAKASFNLVEWCPTGFKLGINYQKPMAVPAPAEAGGLAPVKRSVSMLSNTTAIAEAWSRLDYKFDLMHSKRAFVHWYVGEGMEEGEFTEAREDLAALEKDYEEVAADSFEPEEELEY

SEQ ID NO: 39268 - protein, 238 aa, Vibrio cholerae O1 biovar eltor str. N16961
MINHKIFPTADAVVKSLADDMLAYSQQGQPVHISLSGGSTPKMLFKLLASQPYANDIQWKNLHFWWGDERCVAPDDAESNYGEANALLFSKINMPAQNIHRILGENEPQAEAERFAQAMAHVIPTENGTPVFDWILLGVGADGHTASLFPGQTDYADANLSVVASHPESGQLRVSKTAKVLQAAKRISYLVLGAGKAEIVEQIHTTPAEQLPYPAAKIHSTSGVTEWYLDSDAAAKIA

SEQ ID NO: 39269 - protein, 479 aa, Cryptococcus neoformans var. neoformans JEC21
MPPINKAQAEQVGEYDYFVIGGGSGGLASARRAGSYGAKVGLVEVSPRLGGTCVNVGCVPKKIMWYTADVAENLRKSAQYGFGKEGEGYKLAADFNWTELKHKRDAYIHRLNGIYESNLEKDHVDHHQGWASFVDANTVAIEPPNGDKYTVKAKNIVIAVGGRPTVPSEKDIPGASYGITSDEFFELETQPKRVAVIGAGYIAVELAGVFNTLGSETHLVIRHNQLLRTFDPMMSEVLVPCMEKAGMKIHKKTHVKKVEKTSSGSLLVHLDSSSEPIEVDCLLWAIGRHADTAKLGLDKAGVKYDKKGDVIVDDYQNTNVPGIYAVGDVGGRMLLTPVAIAAGRRLSNRLFGPEKYKNDKLSYDNIPSVVFSHPTIGSIGLSEPEAREKFGDDNIKIYKTSFRAMSFAMLDEDHKQPTAYKLICTGPDEKVVGLHIIGEGSDEMLQGFGVAIKMGATKEDFDACVAIHPTSSEELVTLR

SEQ ID NO: 39270 - protein, 185 aa, Cryptococcus neoformans var. neoformans JEC21
MTFFDSIASKFGYESLPGDVANKSFYDLKAKLPGSKGDLDFSTLKGKVVLIVNTASKCGFTPQYTGLEELHKTYGDKGLVVLGFPSNEFGGQEPGSDDDIAQFCTLNHGVTFPLMKKSEVNGKNMNEVFAWLKSQKGENVGGLAGTTAIKWNFTKFLINKEGKCVGRYGSSTKPEKLKEEIEKLL

SEQ ID NO: 39271 - protein, 600 aa, GIBBERELLA ZEAE PH-1
MMQLPAVKHIVLYLTSAKARADLLIFTGPAIDIPCPLVVDSDLKVIGEAKVDFDKDFGHKYGIKKGVHVYEETGEVYAPVAMWMESVDLVLDRLAEAMPVPLSHIRGISGSCQQHGSVFWNGHAYEILHHLDPRLPLVVQLPQALSHQWSPNWQDQSTQTECDAFDAALGDRQKLAEVTGSGAHHRFTGTQIMRLKKDLPEMYAKTAHISLVSSWLASVFLGAIAPMDVSDVCGMNLWDMSRQTFSEPLLELAAGSKRDALNLKKKLGEPCMDGAAVLGSISPYFVDRHGFHPDCQITPFTGDNPGTILALPLRPLDAIVSLGTSTTFLMNTPKYKPDGAYHFFNHPTTEGHYMFMLCYKNGGLARERVRDQLPKPENGPTGWENFNKAIENTPALGAAKDDERRKLGLYFYLTEVVPNIRAGTWRYSCEPDGSDLQEVNGGWDKETDARVIVESQALSMRLRSQNLVESTRPGLPAQPRRIYLVGGGSLNPAIARVIGESLGGSDGVYKLDVGGNACALGGAYKALWALERQPNETFDELIGKRWTEEGNIQRIDEGYREGVYQKYGNVLGAFEGLERKILAEQAVDSDNANKEVQASG

SEQ ID NO: 39272 - protein, 422 aa, Dehalococcoides ethenogenes 195
MTDNQPQNRVVITGIGIVSPLGLDTQTTWEGLINGRSGIDHISLFDASNLAVRFGGEVKDFDPANYISRKDIRRMDRFAQLAVAAGKQALENSGLGADESVRQDIGVIVGSGIGGLSVLFEQIKVFLEQGPDRVSPFLVPMMIADMAGAQVSIQLGLKGPNFCTTSACSSGSDAIGTAFEKIRFGSAKIILAGGAESIMNPVGFAGFSALKALSTRNEDPQTASRPFDANRDGFVIAEGAAILVLEEMESAKARGANIIAEIIGYGGSSDAFHITQPVESGVEAARAINIALNTAGIKPEAVDYINAHGTSTPLNDKMETNAIKVAFGEHARKLAISSTKSMLGHLIGGAGAIEASICALTIKNGIIPPTINYTTPDPDCDLDYTPNTARRAKVRVALNNSFGFGGHNSVLILREMGDENIG

SEQ ID NO: 39273 - protein, 280 aa, Hibiscus coccineus
GLPPAMAAKGHRVMTVSPRYDQYKDAWDTSVVVELKVGDKVETVRFFHCYKRGVDRVFVDHPMFLEKVWGKTASKIYGPRAGVDYKDNQLRFSLLCQAALLAPRVLNLNGSKYFSGPYGENVVFIANDWHTALLPCYLKSMYQSRGIYMSAKVVFCIHNISYQGRFAFADFSLLNLPDRFKSSFDFIDGYNKPVKGRKINWMKAGILESDRVMTVSPYYAQELVSGEDKGVELDNFISKTGITGIVNGMDVQEWNPATDKYTCVKYDATTVMDAKPLLKE

SEQ ID NO: 39274 - protein, 720 aa, Pseudomonas syringae pv. syringae B728a
MNDSEMGTQMPDNAPRLDTGLASLVMLARFHQVAASPEQLAHEFGSPDQYLSQDSLLLAARKLGLKAKAARTTTERLDRTPLPAIAADNNGGFFIIARLDQGKALIHDPFSQRPEVVTFEALQERWTGQLLLIRSEAGTPGESSSFDFTWFIPAIVKYRKLLGEVMLVSFVLQIFSLITPLFFQVVMDKVLVHHGLTTLDVIAIGLAGVMLFESALSGLRTYVFAHTASRIDVELGSKLFRHLITLPLSYFQARRVGDSVARVRELENIRNFLTGNAITLLLDVLFSVVFIAVMFYYSGWLTLIVLLSLPLYILVSVLITPVLRKRLNDSFARGAENQAFLVETVNGIDTLKSMAVEPQAIRKWDNQLAGYVAAGFKTQNLSTIANESVSLIGKLVTVATLWFGARLVIDGQLSVGQLIAFNMLAGRVAQPIMRLAQLWTNFQQTGVSVQRLGDILNTRNELSQVNRSALPPIKGRIEFDQVHFRYRPDGSEILRGINLVITPGQVIGVVGRSGSGKSTLTRLLQRLYVPERGRVLVDGMDLALADVSSLRRQIGVVLQDNMLFNRSIRENIALSDAGAPLEAVMQMAKLAGAHDFILELPEGYDTMVGEHGASLSGGQRQRIAIARALMGNPRILIFDEATSALDYESERIVQQNMQAICKGRTVIIIAHRLSAVRDANRIVVVDRGQIVEQGTHAELLTHQAGHYSRLHRLQQGGSHV

SEQ ID NO: 39275 - protein, 1261 aa, Synechocystis sp. PCC 6803
MFWQPVSPLNADQLNYQGSYDPKLVLLSVAIAIFTAYMAFLMASSALSLPGRWSRKIALALSGTVMGLGIWAMHFIGMLGFELPCPISYDPLITFISVIPAIAASIYALNFLSFQAPTAKNLMVGAIWFGLGIGTMHYSGMAALELHGNIYYELPLFVLSLVIAVMLAFVALLFRFHSAKIFHTTHGPALGSSALVMGLSTSGMHYTAMTATHFICRPWGEFFIQGIDIQEVAIAVTISITLLTGGVMLFVLREISIQNQQQKILVATESWYRQIIEYAPEGIMVLDAQGNIILANTSIEKLFGYSQTELIGQSIALLGLAELLQQSLHLLQEGEDVGPTCPLDQEEFEILGTRYDGSEFPIEVSLTSLPSLSQREMNIFASVRDISARQEAQQQILRQREHLQSVLDSAPVGVAITVNGITQFANPHIGELVDLKVGDSPQKIYVDLGDRQQMLEELTQFGRSQSRVYKMYNPRGEIRDILATFLATDYEGQKGILGWLADITPIKAAEAEMKRAKELAEEASRIKADFLANMSHEIRTPMNAVIGMTHLALKTDLTPRQREYLHKIRFSGQHLLGVINDILDFSKIEAGKLPMESIDFDLDKVLDNVATLISEKATNKGLELLFDIDRNLPRHFIGDPLRLGQILINYANNAVKFTEQGDITIVVRLQEYRDQDVVLYLAVKDTGIGIKPEHIANLFNSFQQADSSTTRNFGGTGLGLAICKRIAELMGGEVGVESEYGQGSTFWAKVCLQKSNVIPHRLVLSKDLEGKRVLVVDDNDHARLVMKDLLEQMKFVVETVESGPEALNFLAEADRENHPHSIVFIDWQMPNMDGLEVARRLKAMGLNHQPSIFIVTAYGREELFVKAKSLGIDDVLVKPISPSVLFDSLARVLGDPTALAQEMRQSSGIGAEDLALEKLRRIRGARILLVEDNEINQEVAAELLRDVGFNVDVAANGLIALERLNNNAYALVLMDMQMPEMDGIEATIAIRQNPRYAQLPIVAMTANVMQGDRERCLQAGMNDHLGKPIEPEELWNKLLHWIPVDSPLAPETIEESAINTSDPEISIPHIPGLNSDDGLRRVLGKKSLYLKMLHKFVASQSSFLPEITQALGEKDYGFAERLAHTLKGVAGNIGAQELQQEAAELEKAIKEQWPQPEVENLLTNLGDRLDNLIAQLTSNLPPEPATVAITLDQGQLEEICDHLAQLLGEDDAEAADLLQNHGDLLRQAFPDHYSAIAAGINNFDFEAALAALTTARQFSQP

SEQ ID NO: 39276 - protein, 542 aa, Kluyveromyces lactis NRRL Y-1140
MVSVKASAAEKKEFLQSQIDEIEKWWSEPRWKDTKRIYSAYEIAKRRGSVKPNTFPSTVMSQKLFKILGEHAKNGTVSKTFGALDPVQVTQMSKYLDTIYVSGWQCSSTASTSNEPGPDLADYPMDTVPNKVEHLFKAQQFHDRKQWERICDGTIEESEIIDYLTPIVADGDAGHGGLTAVFKLTKMFIERGAAGIHIEDQTSTNKKCGHMAGRCVIPVQEHINRLITCRMAADVLGSDLILVARTDSEAATLLSSTADSRDHYFILGASNPAVKGKPLNDLLNKAILDGATIDDLQTIEKEWLAKADVKLFHEVFADAAKAAGKDQSVIDQFNSKVNPLSETSIYEMQALAKELLGTELFFDWDLPRGREGLYRYQGGTQCSVMRARAFAPYADLCWMESNYPDYEQAKEFAEGVTAKFPGKWMAYNLSPSFNWTKAMSVDEQETFIQRLGDLGYIWQFITLAGLHTSGLAIEQFSKNFAKLGMKAYAQDIQKKELDNGIDMVKHQKWSGAEYIDGLLRLAQGGLAATAAMGQGVTEDQFK

SEQ ID NO: 39277 - protein, 280 aa, Hibiscus trionum
GLPPSMAANGHRVMTVSPRYDQYKDAWDTSVVFKLKVGDKVETVRFSHCYKRGVDRVFVDHPMFLEKVWGKTASKIYGPRAGVDYKDNQLRFSLLCQAALLAPQVLNLNSSKYFSGPYGEDVVFIANDWHTALLPCYLKSMYQSRGIYMSAKVVFCIHNISYQGRFAFADFSLLNLPDRFKSSFDFIDGYNKPVKGRKINWMKAGTLESDRVMTVSPYYAQELVFGEDTGVELDSIICKTGITGIVNGMDVQEWNPATDKYTCVKYDATTVMDAKPLLKE

SEQ ID NO: 39278 - protein, 218 aa, Streptomyces coelicolor A3(2)
MQRAAVFDVDGTLVDTNHLHVTTWWEAFRQAGHRVPMHAVHRAVGLASGDLVARLLGEDRDKEQDAELSAAHKALYGQYFDRLPALPGAGDLLRRLAADGWTVVLATSAGGSELGALRRAIDADDAIEATASADDVDAGKPAPEPVEHALELAGVPAERAVFVGDTVWDMRAGSRAGVRCVGVLCGGLPRADLEEAGAEAVYADPADLLASLRGSPLA

SEQ ID NO: 39279 - protein, 683 aa, Debaryomyces hansenii
MSDAKDTEDNLSPRFENLNIRTPKAANPENMQSPQRLSHSQINGDIQARILAFQQKRTKPVNGGHGGLNSIPASSNHLSEAPDKPLPPLPPLPSLPKLPNVQAQQRSYSLGDANDLGVIPSPMETENIHTTNQTMNQTMNRGINQSIGQGMSRASSIKKQDSQQLPFELLKKPSLSQRRGMKLNLSEMSSPNSASSPDDTSPIGDDKKNPVFLNAPKGNDIESGAMNTTGDLSRMLSDRKKKPNFKLNLGNTGVPGVNGMQNSQSNSNTNSTASSLDSSGSSSTAGTNNETNQSKKPQLQGLFANYSKYVDIKSGSLNFAGKASLHSKGIDFLSGLLFRISLEELEFLEELGHGNYGVVLKVLHKPTGVLMAMKEVRLELDETKFTQILMELEILHKCDSPYIVDFYGAFFVEGAVYMCMEYMDGGSLDKIYGKDDGVKDEACLAYITECVISGLKELKDEHNIIHRDVKPTNILVNSLGKVKLCDFGVSGNLVASLAKTNIGCQSYMAPERIKSLSPTDNTYSVQSDIWSLGLSILEIAAGHYPYPAETYGNIFSQLSAIVDGDPPKLDPKIFSKDAQLFIKSCLNKNPDLRPSYATLLKHPWLVKYRNIDPHMGEFVTKKIQELEEEKNKKNLSRSNSTSSSAATAKPPKENVRSLLKGKVQAPALHRGGLMNSSRNNANR

SEQ ID NO: 39280 - protein, 145 aa, Brassica napus
SRTRGATLSMESLPLGFRFRPTDEELINHYLRLKINGRDLEVRVIPEIDVCKWEPWDLPGLSVIKTDDQEWFFFCPRDRKYPSGHRSNRATDIGYWKATGKDRTIKSKKMIIGMKKTLVFYRGRAPRGERTNWIMHEYRATDKDL

SEQ ID NO: 39281 - protein, 390 aa, Pseudomonas putida KT2440
MAFDLAARLAERRAADLYRQRPLLESPQGPEVVVDGQRLLAFCSNDYLGLANHPEVIAAWQAGAERWGVGGGASHLVVGHSTPHHQVEEALAELTGRPRALLFSTGYMANLGAITALVGQGDTVLQDRLNHASLLDGGLLSGARFNRYLHNDPASLASRLDKAVGNTLVVTDGVFSMDGDLADLPALANVARARGAWLMVDDAHGLGTLGAKGGGIVEHFGLGVDDVPVLIGTLGKACGTAGAFVAGSEALIEALVQFARPYIYTTSQPPALACATLKSLELLRRETWRREHLAALIRQFREGAQQLGLQLMDSPTPIQPIVIGDSAQALRLSRLLRERGLLVTAIRPPTVPAGSARLRVTLSAAHSEAQVQLLLNALAECYPQLENADA

SEQ ID NO: 39282 - protein, 765 aa, Arabidopsis thaliana
MASHIVGYPRMGPKRELKFALESFWDGKSSADDLQKVSADLRSDIWKQMSAAGIKYIPSNTFSHYDQVLDTTAMLGAVPSRYGFTSGEIGLDVYFSMARGNASVPAMEMTKWFDTNYHYIVPELGPEVKFSYASHKAVNEYKEAKALGVETVPVLVGPVSYLLLSKLAKGVDKSFDLLSLLPKILPVYKEVIAELKAAGASWIQLDEPLFVMDLEGHKLQAFSGAYAELESTLSGLNVLVETYFADIPAEAYKTLTSLKGVTAFGFDLVRGTKTIDLIKSGFPQGKYLFAGVVDGRNIWANDLAASLITLQSLEGVVGKDKLVVSTSCSLLHTAVDLINETKLDAEIKSWLAFAAQKVVEVDALAKALAGQTNESFFTANADALSSRRSSPRVTNESVQKAAAALKGSDHRRTTEVSARLDAQQKKLNLPILPTTTIGSFPQTVELRRVRREYKAKKISEEDYVKAIKEEIKKVVDIQEDLDIDVLVHGEPERNDMVEYFGEQLSGFAFTANGWVQSYGSRCVKPPVIYGDVSRPKPMTVFWSSTAQSMTKRPMKGMLTGPVTILNWSFVRNDQPRHETCYQIALAIKDEVEDLEKGGIGVIQIDEAALREGLPLRKAEHSFYLDWAVHSFRITNCGVQDSTQIHTHMCYSNFNDIIHSIIDMDADVITIENSRSDEKLLSVFREGVKYGAGIGPGVYDIHSPRIPSTDEIADRINKMLAVLEQNILWVNPDCGLKTRKYTEVKPALKAMVDAAKLIRSQLGSAK

SEQ ID NO: 39283 - protein, 119 aa, Brassica napus
MSKEIELPGFRFHPTEEELLNYYLKNMVYGNISKVEVIGFLNIYRHDPWDLPHLSTIGEREWYFFVPRERKHGNGGRPSRTTEKGYWKATGCGSKIISLSEPKRMIGLKKTLVFYSGRT

SEQ ID NO: 39284 - protein, 115 aa, Glycine max
MAGLQRSAVSFRRQGSSGFVWDDRFLSEELNKVKEDQNNNNDGGPEIKELHQVQTTPPPERTRSNGGARGYRTGKVSPAIEPPSPRLSACGFCAAFGKAGDNKPQRTTPAKHRPR

SEQ ID NO: 39285 - protein, 314 aa, Larrea tridentata
MAYPSWVDTSLDLNLNPLRASNEASPMKQEMEINFMQLGIETPVKQEMQAAELVKELNRVSAENKKLTHMLTGMCESYNTLKCQLEEYMSKSPEKESSPSKKRKSESGDNSGNVIGNGGNSESSTSDEESCKKPKEEAIKVKTSKIYVRTDKDDKSLLVKDGYQWRKYGQKVTRDNPCPRAYFKCSFAPSCPVKKKVQRSAEDQSLLIATYEGEHNHPQPSQIDVTSSSSRPVALSPLPGSACTGSSAVTATVELTKSKSCQNTIFRPKVETPDFKDYLVEQMAFSLTKDPNFTGAFAAAISGRINNQRPGGNW

SEQ ID NO: 39286 - protein, 330 aa, Shigella flexneri
MSQNTLKVHDLNEDAEFDENGVEVFDEKALVEEEPSDNDLAEEELLSQGATQRVLDATQLYLGEIGYSPLLTAEEEVYFARRALRGDVASRRRMIESNLRLVVKIARRYGNRGLALLDLIEEGNLGLIRAVEKFDPERGFRFSTYATWWIRQTIERAIMNQTRTIRLPIHIVKELNVYLRTARELSHKLDHEPSAEEIAEQLDKPVDDVSRMLRLNERITSVDTPLGGDSEKALLDILADEKENGPEDTTQDDDMKQSIVKWLFELNAKQREVLARRFGLLGYEAATLEDVGREIGLTRERVRQIQVEGLRRLREILQTQGLNIEALFRK

SEQ ID NO: 39287 - protein, 391 aa, Pseudomonas oleovorans
MSLNPRDVVIVDFGRTPMGRSKGGMHRNTRAEDMSAHLISKLLERNDKVDPKEVEDVIWGCVNQTLEQGWNIARMASLMTQIPHTSAAQTVSRLCGSSMSALHTAAQAIMTGNGDVFVVGGVEHMGHVSMMHGVDPNPHLSLHAAKASGMMGLTAEMLGKMHGITREQQDLFGLRSHQLAHKATVEGKFKDEIIPMQGYDENGFLKVFDFDETIRPETTLEGLASLKPAFNPKGGTVTAGTSSQITDGASCMVVMSGQRAMDLGIQPLAVIRSMAVAGVDPAIMGYGPVPSTQKALKRAGLTMADIDFIELNEAFAAQALPVLKDLKVLDKMDEKVNLHGGAIALGHPFGCSGARISGTLLNVMKQNGGTLGVATMCVGLGQGITTVFERI

SEQ ID NO: 39288 - protein, 145 aa, Streptococcus pyogenes MGAS10394
METSEELKQRIGDLSYEVTQHAATESPFTGEYDDFFEKGIYVDIVSGEVLFSSLDKFNSGCGWPAFSKPIENRMVINHDDSSYGMRRVEVKSREAGSHLGHVFSDGPKEAGGLRYCINSAALKFIPYEQMEKEGYAQWLTLFDET

SEQ ID NO: 39289 - protein, 381 aa, Zea mays
MQIFVKTLTGKTITLEVESSDTIDNVKAKIQDKEGIPPDQQRLIFAGKQLEDGRTLADYNIQKESTLHLVLRLRGGMQIFVKTLTGKTITLEVESSDTIDNVKAKIQDKEGIPPDQQRLIFAGKQLEDGRTLADYNIQKESTLHLVLRLRGGMQIFVKTLTGKTITLEVESSDTIDNVKAKIQDKEGIPPDQQRLIFAGKQLEDGRTLADYNIQKESTLHLVLRLRGGMQIFVKTLTGKTITLEVESSDTIDNVKAKIQDKEGIPPDQQRLIFAGKQLEDGRTLADYNIQKESTLHLVLRLRGGMQIFVKTLTGKTITLEVESSDTIDNVKAKIQDKEGIPPDQQRLIFAGKQLEDGRTLADYNIQKESTLHLVLRLRGGQ

SEQ ID NO: 39290 - protein, 646 aa, Mesorhizobium sp. BNC1
MCGFGGYFGAGVSEAEPLLRRMASAIAHRGPDERGTAVLDGAGLCHTRLSIVGLADGQQPMSLDGGRLTIAFNGEIFNYVELREALIARGRTFRTASDTEVILHLYDEKGPDCLADLNGDFAFAIWDAPRRRMFLARDRMGVRPLFYTSVGDRLFFASEVKTLLQVPGVEAEMDPFALDQMFTLWAPIAPRTAFKNIHELEPGHMMLVEEGRQAIRPYWSLSFPEHGAPSRHTDERAVAEELRALLTDATRLRMRADVPVGSYLSGGLDSSVISALAAGMTPEILRTFSVAFESAEHDESAFQNEVAAALGTMHASVNCGDGDIAAVFPDVIRFTERPILRTAPAPLFKLSALVRERGLKVVLTGEGADEVFAGYDIFKEARVRRFCARQPGSRMRPHLFRKLYPYLPGLKQQSAEYLAAFFGAGADSLDDPLFSHKPRMRATGAAKLFFSAQLRETLAGYDAAEELASRLPQEFPRWHPLHQAQYLESRFLLPGYILSSQGDRMAMAHGIEGRFPFLDHRLVEFATTLPPEMKLKGLVEKHILREATKGLLPESILRRTKQPYRAPDSASFRGAGEKDYVREAMSAEKLADCGLFNPASVSKLFAKSRQQPLSGFRDNAAFVGILSSQLWLETFTGSRIRAVEAA

SEQ ID NO: 39291 - protein, 189 aa, Medicago sativa
TLADYNIQKESTLHLVLRLRGGMQIFVKTLTGKTITLEVESSDTIDNVKAKIQDKEGIPPDQQRLIFAGKQLEDGRTLADYNIQKESTLHLVLRLRGGMQIFVKTLTGKTITLEVESSDTIDNVKAKIQDKEGIPPDQQRLIFAGKQLEDGRTLADYNIQKESTLHLVLRLRGGMQIFVKTLTGKTITL

SEQ ID NO: 39292 - protein, 379 aa, Synechococcus sp. CC9605
MLDHASPIPPARRRRLRSLNSGQEPWQLQDPAGAGQLVDVASNDYLGLSRHPDVIAAATQAMASDGVGAGGSRLITGTRPRHLELEAALATWLNRDRVLLFPSGFQANIAALMALSDRHTTVLVDRLIHHSLLAGIRTSGARLQRFAHNDLDDLGQRLQRLNYARTPPLVVTESLFSMEGTSPDLQGMADLCARHGAQLLVDEAHGLGVLGPGGRGLCHGLQEPVALVCGTFGKAFGSGGAFLAGDHTTMERLLQTSGAFRYTTALAPPLVAGAQAALRLIQAHPNWGSELRQRSEHWRTALAKEGWAKPAGHGPVLPLLVGDDQDALDLQQKLEQAGLLSVAIRPPTVPEGTARLRLVLRRDLPEGTLEQLLAALGSR

SEQ ID NO: 39293 - protein, 295 aa, Triticum aestivum
SLLLQYNREMGSKAQRQCEQVQDSDTLSMLTSMSARNTNTGSMFPFSKEHHNHNPFEVTSSRPDYGLVSSDSLMSSPHSSLENVNLLTSQRALSSEQQSSLSLQHFADWPRTPSQQGQGGGLSWPDAEDMQAHQRTQLSVSAAPMASPDLSSASTSPIHEKLMLSPLKLSREYSPIGLSIAATAAAAKDEGEANWMPMFRDSSMGGPLGEALNKNNGGNMEAKNYLSASLNLMTDAWDSSPLESSPVGVLQRTAFGSVSSSTGSSPRQEYHGVYDGNPRDDLGSIVVNHPSIRLM

SEQ ID NO: 39294 - protein, 496 aa, Zea mays
  misc_feature (451)..(451): Xaa can be any naturally occurring amino acid
  misc_feature (466)..(466): Xaa can be any naturally occurring amino acid
  unsure (1)..(496): unsure at all Xaa locations
MTMDPTKFRPSSSHDTTVTTTNAGAPVWNDNEALTVGPRGPILLEDYHLIEKVAHFDRERIPERVVHARGASAKGFFESTHDVTSLTCADFLRAPGVRTPVIVRFSQVIPEPGSGRTIRDARGFAVKFYTREGNWDLLGNNFPVFFIRDGIKFPDVIHAFKPNPRSHVQEYWRVFDFLSHLPESLHTFFFLFDHVGVPSDYRHMEGFGVNTYTFVSAAGKAQYVKFHWKPTCGERSILTDEEARVGGRNHSHTQDLYDSIAAEGSFPEWTLYVQVMDPAQQEQYDFDPLDDTKTWPEDLLPLRPVGRLVLDRNVDNFLNENEQLAFGPGLVVPGIYYSDDKMLQCRVFAYADTQRYRLGPNYLMLPVNAPRCGTHNNHYDGAMNLMHRDEEVDYYPSRHARRCGRAAPTPLPPRPVAGRREKATIRKPNDFKQPGERYRSWDADRQDRFVXRRFADSLGHPNVSQXLRSIWIDLLAKVDASLGMKIATRLNMKANM

SEQ ID NO: 39295 - protein, 423 aa, Saccharomyces cerevisiae
MSEATLSKQTIEWENKYSAHNYHPLPVVFHKAKGAHLWDPEGKLYLDFLSAYSAVNQGHCHPHIIKALTEQAQTLTLSSRAFHNDVYAQFAKFVTEFSGFETVLPMNTGAEAVETALKLARRWGYMKKNIPQDKAIILGAEGNFHGRTFGAISLSTDYEDSKLHFGPFVPNVASGHSVHKIRYGHAEDFVPILESPEGKNVAAIILEPIQREAGIVVPPADYFPKVSALCRKHNVLLIVDEIQTGIGRTGELLCYDHYKAEAKPDIVLLGKALSGGVLPVSCVLSSHDIMSCFTPGSHGSTFGGNPLASRVAIAALEVIRDEKLCQRAAQLGSSFIAQLKALQAKSNGIISEVRGMGLLTAIVIDPSKANGKTAWDLCLLMKDQGLLAKPTHDHIIRLAPPLVISEEDLQTGVETIAKCIDLL

SEQ ID NO: 39296 - protein, 157 aa, Triticum aestivum
MSLIRRSNVFDPFSLDFFDPFEGFPFGSGNSSSGSLVPRTSSDTAAFAGARIDWKETSEAHVFKADVPGLKKEEVKVEVEDGNILQISGERKKEQEEKTDTWHRVERSSGKFLRRFCLPDNAKAEQVKASMENGVLTVTVPKEEAKKPEVKSIQISG

SEQ ID NO: 39297 - protein, 666 aa, Mycoplasma gallisepticum R
MCFNMNIQQQTINTIRVLGIEMINNAKSGHPGMVMSAAPMMYALFHDHLNYDVSDPNYLNRDRFILSAGHGSALLYATMYVAGYKTLSTKDLKNFRKFSSKTPGHPESTMLAGVDFGTGPLGQGAATSVGFAIAEANLSARFDKIINHYTYCLIGDGDLQEGVCQEALAVAGRYKLNKLIWLYDSNDVQLDGRVENSTNFDVEMLLKSYRWNYILIKDGNDYQAISNAIAQAKKSDKPTFIEVKTKLGFASSVENTNKAHGSPFSDEEIKNIKAKFDYKNKPFTLSTEVKNHFESAISRGLKAAEEFNQRLAKAKPELKEKFISQIKEEKINFPKSLINEFNVDQYDSTRNLFGKVFKELTKINDNILVVNCDLSSSTKVVTHNNARFDHGHYQNQFVDVGVREFLAGCIVNGVVAHKGLKAVSSTFMAFSDYNKPALRLGAINKLSSLYVYSHDSFNVGEDGPTHQPIEQLSALRLIPDVLVYRPANFYELYIALKTAFDKKNHKPVVISTSRSEFDLTKVNPKTFDEGYYYLNKTKSPKLRLIATGSDAGTALKLAKIFKQEGIDIDVISVASFKKLKEKLADLEVLKEFKKYKNIVIESGVSNIWFQFVSLVIGVNDFGLSGNPNEVATYFSMDLESLVKSLASILHKNYTQQKIEELIKNAN

SEQ ID NO: 39298 - protein, 323 aa, Yarrowia lipolytica CLIB122
MSVLLTGSTGFIATHVLDQLLSKGLSVVATYRSESKVDFLKKRFEGKSVEFVLLSDIESESEVKDIFNKNPQITKVIHTASPFHFNFTDPLTEVLQPAVNGTKAVLNAIPEHVTHVVVTSSVAAVVDIKYIDDYNEIITEDSWNGISWEDAEKKGGSFTYRGSKTFAEKAAWELHKKAKYNLVTILPPLVFGPVYGQTDTLNTSNEQLVDALKKGSNFRYAGTYVDVRDTAAAHVAAIDATESARWLTIGGYYTRQEILDITNKEFPEFHADKGTPGDYSGLKRAFRYDNSKTNKVFPRKYITLKQTVEDTFRGIDPKYINKL

SEQ ID NO: 39299 - protein, 481 aa, Lycopersicon esculentum
MAAVNGVGLSWPSKLTKNQTPKWGFSPSHRRCNPSSSSSATIRMTASVDEKKKTFTLEKSEEAFSKAKELMPGGVNSPVRAFKSVGGQPIIIDSVKGSRMRDIDGNEYIDYVGSWGPAIIGHADDEVLAALAETMKKGTSFGAPCLLENTLAEMVISAVPSIEMVRFVNSGTEACMGVLRLARAFTCRPKIIKFEGCYHGHADPFLVKAGSGVATLGLPDSPGVPKAATIDTLTAPYNDISAVESLFEEHKGEIAAVILEPVVGNAGFIPPKLEFLAAIRKITKENDALLIFDEVMTGFRLAYGGAQEYFGITPDLTTLGKIIGGGLPVGAYGGRRDIMEMVAPAGPMYQAGTLSGNPLAMTAGIHTLKRLQGQGTYEHLDKITAELTQGILDAGKKTGHAMCGGSIRGMFGFFFADGPIYNFSDAKKSDTEKFGRFYRGMLEEGVYFAPSQFEAGFTSLAHTPEDIQRTVAAAEKVLKQI

SEQ ID NO: 39300 - protein, 950 aa, Synechocystis sp. PCC 6803
MKSFFLNTFSPLRSTARFWVLVALLTSMELSASQLRDTEQAVAIEESKCTDCVEGRGTGIVRGESFAQVETVPTEAKVEQIKPMIERISPHLGLVGFGLAFIGVLWLTYLLKKDRQTKAQLAFQARRSDVLLELPQYADRLSEVEFLQRGQEFAEELTKSKIAFIHFVNDDEQTIELVAWSRATLANYCRVVAASHYPVEEAGIWADALRLRRPVLINDYATHQGKKGLPEGHAYLARLISVPVIDDGKVVMLTGVGNKDVFYTDQDVETVQLISNEIWRIARSRRLVKKLTESENRYRLAQAIAKIGNWELDYATNVLFWSPEVFNLFEIAPQDFAGTYEAFLNLIHPGDRELVDEAYQCHLQKYQPYDIVHRLLMPDGRIKYVQEQCNTVFDKNNLPLLSRGTIQDVTELQEAQISLEHLNEKLEQRIQERTQELENSQESLLEAKLVAEGATKAKSEFLANMSHEIRTPMNAIIGMSELVLQTDLTSQQRNYLQKVQYAGELLLGIINNILDFSKMEAGKLELEQKPFSVEEVMGNLHSILGIQAEAKGLTLNFHLDPRIPPILVGDRLRLSQILINLGNNAVKFTNQGEITIRGQLLKTENEQTKLQFSVTDTGIGLTPDQQSKLFQWFNQGETSTSRQYGGTGLGLAISKSLTELMGGDIWLESVVGQGSTFHFTVCLGTASPAVAQDYLVSRVSILEAKPSVTQAITQLEGASILLVEDNEINREFAHDLLTSKGLRVQVANNGQEALTLLTSNTYDAILMDIQMPMLNGYDATRAIRQQEYHRNLPIIAMTANAMAGDQEKALDAGMNDHLTKPIKPDLLFQTLAHWIPPNSAREKKNPSSNLKADLSFSSMTGINQQIGMQYIENVELYHRLLVKFGDRYSNFADQFRTEQASDDPTAATRYAHSIKGAAALLGIENVHHTAQQLEDSCREHESPEMIDRHL

SEQ ID NO: 39301 - protein, 490 aa, Zea mays
  misc_feature (204)..(204): Xaa can be any naturally occurring amino acid
  unsure (1)..(490): unsure at all Xaa locations
MVLSHAASAGSSDESVHSTFASRYVRASLPRFRMPENSIPKEAAYQIINDELMLDGNPRLNLASFVTTWMEPECNKLMMDSINKNYVDMDEYPVTTELQNRCVNMIAHLFNAPLGETETAVGVGTVGSSEAIMLAGLAFKRRWQNKMKAAGKPCDKPNIVTGANVQVCWEKFARYFEVELKEVKLSEGYYVMDPEKAVEMVDEXNTICVAAILGSTLTGEFEDVRRLNDLLAANNRRTGWDTPIHVDAASGGFIAPFLYPDLEWDFRLPLVKSINVSGHKYGLVYAGVGWVVWRSKEDLPDELIFHINYLGADQPTFTLNFSKGSSQIIAQYYQLIRLGFEGYKDVMQNCRDNAAVLREGINKMGYFDVVSKDSGVPLVAFSLKDSSKYTVFEVAESLRRFGWIVPAYTMPADAEHVAVMRVVIREDFSRGLAERLIADLGKTMADMDAHAGRKQAPEQPKKSVHDIEKEVTTFWRRLVANSKKKSSMVC

SEQ ID NO: 39302 - protein, 277 aa, GIBBERELLA ZEAE PH-1
MDPQNSQAAQQSRQRPVYDPSQGGHYGASAQLASQGFAPSELYTGPWANAHQGLTGQYKDILTTYWQHTISHLENDTHDYKIHQLPLARIKKVMKADPEVKMISAEAPILFAKGCDIFITELTMRAWIHAEENKRRTLQRSDIASALAKSDMFDFLIDIVPREEASSHAKRATQTAAAQPLPAGQAQMPGQHPMAQAPNPGHPMGAEYMPSHGIAPEQDYRNPANMYPDQSVPNPQAAYGQAQQPNMNPYGAMGDMYPYPGMAPQQTTMSNEEFGEQ

SEQ ID NO: 39303 - protein, 342 aa, Yarrowia lipolytica CLIB122
MSILVTGATGFIAAHCIDQLLKNGHSVIGTIRSPQKGAALEAAFPDAVANKKLILETVSDIRSAKEFDQLFDKHPEIGKVLHTASPFHFNIKDPIKDMLEPAVEGTNTVLQSVLKHGPQVTKVVVTSSFVSMLTADDMFDPSVTVDEKSWNRITWEQGAGNVEFLTYFASKKFAEKAAWDFVENEKPFFQLTTVNPSLVFGPSITKPDLKSLNTSNGDIVTHALEVKDSDEGVGQYNSFCVDVRDVAKGHVVALDDKTNGKRLMLCSDKFCSQRLLNYINEDFPELKGKIAVGHPDQVEAIEAKTFNFDNTETKKLLGFEFTPLRETIHDFVAQWLEVKKEE

SEQ ID NO: 39304 - protein, 481 aa, Streptomyces coelicolor A3(2)
MSAAEGPLVVGVDTSTQSTKALVVDAATGRVVASGQAPHTVSSGTGRESDPRQWWDALGEALSQCGEAAREAAAVSVGGQQHGLVTLDARGEPVRPALLWNDVRSAPQARRLIDELGGAKAWAERTGSVPSASFTVTKWAWLTEHEPEAARAVKAVRLPHDYLTERLTGEGTTDRGDVSGTGWWASGTEAYDEEILARVALDPALLPRVVRPGEVAGTVRDGHGLPFSKGTLVAAGTGDNAAAALGLGLRPGVPVMSLGTSGTAYAVSQRRPADPTGTVAGFADARGDWLPLACTLNCTLAVDRVASLLGLDREAVEPGTDVTLLPFLDGERTPNLPHSSGLLHGLRHDTTAGQLLQAAYDGAVHSLLGALDLVLDADADPSAPLLLIGGGARGTAWQQTVRRLSGRPVQIPEARELVALGAAAQAAGLLTGEDAAAVARRWNTAAGPVLDAVERDEATLNRITGVLSDAAPLLERDAASR

SEQ ID NO: 39305 - protein, 256 aa, Kluyveromyces lactis NRRL Y-1140
MSAATASNTAQQPISLRVNAALFDVDGTLIISQPAIAEFWRDFGKDKPYFDSQHVIDISHGWRTYDVIKQFAPDYANEEYVTKLEGEIPEKFGQHAIEVPGASKLCGELNKLPKEKWAVATSGTYEMAHKWFDILGIKRPSNFITANDVKNGKPHPEPYLKGRNGLSYPINKENPAASKVIVFEDAPAGILAGKAAGCKIVGIATTFDKEFLIEKGCDIVIKDHTKLRVAAYHPETDEVEFIFDEYLYAKDDLLEW

SEQ ID NO: 39306 - protein, 166 aa, Wolbachia endosymbiont of Drosophila simulans
MRNNFSIKLSYIRNLFAKEYKTIEEYCILEKKQHIQISPEEGKLLSLFIKIHKIKSIVEIGTLYGYSSICMAKALLEDGHIYTIENNPQYSRIAKKNFSAFNLSDKITLIEGNALEKLNELSAKAPFDMIFIDADKGGYPKYLDWAESYIKQDGLIVADNTLLLTQ

SEQ ID NO: 39307 - protein, 411 aa, Brassica napus
  misc_feature (99)..(99): Xaa can be any naturally occurring amino acid
  unsure (1)..(411): unsure at all Xaa locations
FWKTIPPTEPYRVILGDVRDKLYHTRERSRQLLSNGISDIPEEATFTNVEQVKKLYDQLVLSLTCPALCLLLFCSLLRSSWSLLSYVTAHYVHVVTAQXLMELLDFLRQVSTFGLSLVRLDIRQESERHTDVLDAITKHLDGSSYRDWSEERRQEWLLSELSGKRPLFGPDLPKTEEIADVLDTFKVISELPSDCFGAYIISMATSPSDVLAVELLQRECHVKTPLRVVPLFEKLADLEAAPAAVSRLFSLDWYKNRINGKQEVMIGYSDSGKDAGRLSAAWELYKAQEELVKVAKKYGVKLTMFHGRGGTVGRGGGPTHLAILSQPPDTVNGSLRVTVQGEVIEQSFGEEHLCFRTLQRFTAATLEHGMNPPVSPKPEWRALLDAMAVVATEEYRSVVFQEPRFVEYFRL

SEQ ID NO: 39308 - protein, 429 aa, Kluyveromyces lactis NRRL Y-1140
MSLKRVVVTGLGAYTPLGSTVSKSWAGLLAAKQSLIPLDAFYNREDFAKVKKLVPLDTAVSRLHADPLDTFPEYDQRRMTPAHQIVLEKTKEALLQANLIADENLNTLTEDIDKTKVGCVIGTGMPSMPDLESTISTLFTKPKVSPFLIPRVLPNMAMGNVMIKYGIQGPSSCPSTACATGNSSIIEGFNSIQLGLADVMICGSYEFSIDPISIAGFYRSKTISKKHQTRPFDVERDGFIMGEGCGILTLESLESALKRGSPILAEISGVGLSNDGYHITSPLPDGSGGKLAMQNALKRANIAPQQVGYINAHATSTQLGDVAESTAITELFGTKSTGTAPYVSSNKGHIGHLLGASGSVESIFTVLSLKYGRFPHTLNLKTVDETSIINELNLIKNESMIDNSIEYALTNSFGFGGVNTSILFRKYHQ

SEQ ID NO: 39309 - protein, 254 aa, Sinapis alba
MGRGRVQLKRIENKINRQVTFSKRRAGLMKKAHEISVLCDAEVALVVFSHKGKLFEYSTDSCMEKILERYERYSYAERQLIAPESDSNTNWSMEYNRLKAKIELLERNQRHYLGEDLQAMSPKELQNLEQQLDTALKHIRSRKNQLMYDSINELQRKEKAIQEQNSMLSKQIKEREKVLRAQQEQWDEQNHGHNMPPPPPLQQQIQHPYMLSHQPSPFLNMGGLYQEDQIAMRRNDLDLSLEPVYNCNLGCFAA

SEQ ID NO: 39310 - protein, 677 aa, Candida glabrata CBS138
MERVRLDRKSSNDSNHSLGGESTSRSGGSGIGVAPTSGNNGTVKRASSMSSNYSNINASLHARVKAFQEQRGLHRSSSLGKGDSEENIGNVGTSINPSPSLGSMKDEPVPAIQKIVNKPLPPLPGQNSSSLTPSQETINMISNASQQAPDGPLNNISPVPGFKEAMGGNVRRNDGQNLYGSTSPAVTASAPNMPAFNPNRKAPRPPQIPHNTVIPAKPMQSLSSRRGLKLPPGGMKLKLPSKGDAPASMPSTVPAASSVKPVVHQEFAATPSNKNHIKNNNGSTEGKRSNPGSLVNAVQTTSISSANDQQDTEGTEPKSNSNGTGLFANFSRYVDIKSGSLNFAGKLSLSSRGIDFSNGSSSRITLDELQFIEELGHGNYGTVSKVLHKPNNVLMAMKEVRLELDESKFRQILMELEVLHKCNSPFIVDFYGAFFIEGAVYMCMEYMDGGSLDKIYDENPEMGGIDEPQLAFITNAVIQGLRELKEVHNVIHRDVKPTNILCSAKQGTVKLCDFGVSGNLVASLAKTNIGCQSYMAPERIKSLNPDRGTYTVQSDIWSLGLSILEMALGRYPYPPETFDNIFSQLSAIVDGPPPKLPADKFSDEAQDFVSLCLQKIPDRRPNYSNLYEHPWLAKYRSIDVQMGPYITKRLEIRKRILAEKGEDGLHRTVPALHKGGL

SEQ ID NO: 39311 - protein, 52 aa, Pseudomonas putida KT2440
MDFIRIIIAILLPPLGVFLQVGFGGAFWLNILLTLLGYIPGIVHAVYIIAKR

SEQ ID NO: 39312 - protein, 979 aa, Arabidopsis thaliana
MALITLLEVSISLLFFSFLYGYFLISKKPHRSFLTNWPFLGMLPGLLVEIPRVYDFVTELLEASNLTYPFKGPCFGGLDMLITVDPANIHHIMSSNFANYPKGTEFKKIFDVLGDGIFNADSELWKDLRKSAQSMMTHQDFQRFTLRTIMSKLEKGLVPLLDYVAEKKQVVDLQDVFQRFTFDTSFVLATGVDPGCLSTEMPQIEFARALDEAEEAIFFRHVKPEIVWKMQRFIGFGDELKMKKAHSTFDRVCSKCIASKRDEITNGVINIDSSSKDLLMCYMNVDTICHTTKYKLLNPSDDKFLRDMILSFMLAGRDTTSSALTWFFWLLSKNPKAITKIRQEINTQLSPRTNDFDSFNAQELNKLVYVHGALCEALRLYPPVPFQHKSPTKSDVLPSGHRVDASSKIVFCLYSLGRMKSVWGEDASEFKPERWISESGRLIHVPSFKFLSFNAGPRTCLGKEVAMTQMKTVAVKIIQNYEIKVVEGHKIEPVPSIILHMKHGLKVTFNLPPSPARPLPFIGHLHLLKQPLHRTFLSFSQSLGDAPIFSLRLGNHLTVVVSSYSIAEECFTKNDIVLANRPKFILGKHIEYNFTTMTSAPYGDHWRNLRRIGTLEIFSSHKLNGFLSVRKDEIRHLLLRLSKNSQHGFAKVEMRQLFYDLTINNILRMVAGKRFYGEGTEQDEVARRVTQLIDEIVYRAGVGNAADYIPILRWITDFEKGVKELASRVDEFLQSLVDERRVHKQKGNTMMDHLLSLQETQPDYYTDVTLKGIIIVMILAGTETLAGTLEWAMLNLLNHPEVLEKARTEIDTEVGFDRLMDEADTKNLPYLQWIVLETLRLYPVAPTNIPHMTSDDCILAGYDVPRGSMLLVNVWSMHRDPSIWEAPEMFKPERFKNEKLNQKLLSFGFGRRACPGVGLAHRLMSLALGSMVQCFEWQRIGEEYVDTREEPMAMMRPATPLLAMCKARPIVHKFLDAFA

SEQ ID NO: 39313 - protein, 494 aa, Glycine max
NPRKKRRRKWRWSPWSRTSTSSSQVESLKKLSFKSLKRALDLFSPIHGHLATPDAESKKIRTSHKVSVEYGGIKSTANQPPPRQVSSATQDPGSSNTLALPGPGDSKDSQKGGPQNALVVGPTIPSTTPNDTGFQNKSTAVVSASGSSERNLSTSALMERMPSKWPRPVWHAPWKNYRVISGHLGWVRSVAVDPSNTWFCTGSADRTIKIWDLASGVLKLTLTGHIEQVRGLAVSNRHTYMFSAGDDKQVKCWDLEQNKVIRSYHGHLSGVYCLALHPTIDVLLTGGRDSVCRVWDIRSKMQIHALSGHDNTVCSVFTRPTDPQVVTGSHDTTIKMWDLRYGKTMSTLTNHKKSVRAMAQHPKEQAFASASADNIKKFTLPKGEFCHNMLSQQKTIINAMAVNEEGVMVTGGDNGSMWFWDWKSGHNFQQSQTIVQPGSLDSEAGIYACTYDLTGSRLITCEADKTIKMWKEDESATPETHPLNFRPPKDIRRF

SEQ ID NO: 39314 - protein, 215 aa, Petunia integrifolia subsp. inflata
MFNSTFSSVLFILLFSLSPIYGAYYEYMQLVLQWPTAFCHASPTCKVTPNNFTIHGLWPDNVSTTLNYCKSKTGKYNNIKDPTIKNELYKRWPDLTTSETDCLGNQNFWKREYNKHGTCCSGRYNLQQYFHLAMALKDKFNLLTSLTNHGIIPGSNYNVQKINSTIKTITRGYPNLSCTEEMELWEIGICFDSTVKNVIDCPHPKTCNPTIIKFP

SEQ ID NO: 39315 - protein, 541 aa, Bifidobacterium breve
MAKIISYDEEARQGMLEGLDKLANTVKVTLGPKGRNVVLDKTYGAPTITNDGVSIAKEIDLEDPYERIGAELVKEVAKKTDDVAGDGTTTATVLAQSLVHEGLKNVVAGSNPIALRRGIEKATEVIVKELVVAAKDVETKDQIAATATISAADPEVGEKIAEALDKVGQDGVVTVEDNNRFGLDLDFTEGMRFDKGYIAPYFVTNADDQTAVLEDPYILLTSGKVSSQQDIVHVAELVMKTGKPLLIIAEDVDGEALPIPDSEQHSWYLQVLRCQGSGLRRPPQGMLQDMAILTGAQVVSDELGLKLESVDTSVLGHAKKVIVSKDETTIFQGAGSKEDIDARVAQIRAEIENTDSDYDREKLQERLAKLAGGVAVIKVGAATEVEAKERKHRIEDAVRNAKAAIEEGLLPGGGVALVQAAAKAEKAEAVTSLTGEEATGAAIVFRAIEAPIKQIAENAGVSGDVVINKVRSLPDGEGFNAATDTYEDLLAAGVTDPVKVTRSALQNAASIAGLFLTTEAVVANKPEPKAAAPAAGADMGY

SEQ ID NO: 39316 - protein, 391 aa, Thermosynechococcus elongatus BP-1
MNLLEQLRQMTVVVADTGDILAIQKFTPRDATTNPSLITAAAQMKEYQSIVDETLRQAKADLGSGATSREIVSLAVDRLAVAFGLKILQIIPGRVSTEVDARLSYDTAATVQKARELISQYEAAGVGRDRVLIKIAATWEGIRAAEILEKEGIHCNLTLLFGFHQAVACAEAGVTLISPFVGRILDWYKKKTGRAEYPGPEDPGVISVTKIYNYYKKFGYPTEVMGASFRNIGEIIELAGCDLLTISPALLQELQNTTGELKRKLDPAIAATLDIEKVAMDEATFRKMHAADEMASEKLEEGIKGFTKALETLEDLLRRHLARIEGEATLTHAAEELFHVYDLDGDGIITREEWLGTDAVFDALDANHDGKVTPEDMGAGLGVVLHLAQAK

SEQ ID NO: 39317 - protein, 624 aa, Glycine max
  misc_feature (216)..(216): Xaa can be any naturally occurring amino acid
  misc_feature (225)..(225): Xaa can be any naturally occurring amino acid
  unsure (1)..(624): unsure at all Xaa locations
SIIYVVVSLVDVSGKMDLASVLLLLTSLCSSSALHELDSQEDALYALKVSLNVSANQLTNWNKNLVNPCTWSNVECDQNSNVVRISLEFMGFTGSLTPRIGSLKSLTILSLQGNNITGDIPKEFGNLTSLVRLDLENNKLTGEIPYSLGNLKKLQFLTLSQNNLNGTIPESLASLPSLINVMLDSNDLSGQIPEQLFSIPTYKYVCFTGNNLNCGXEYLHLCTSXYAYQGSSHKTKIGLIAGTVTGLVVILFLGGLLFFWYKGCKREVYVDVPGEVDRRITFGQIKRFSWKELQIATDNFSEIFILGQGGFGKVYKGILADGTKVAVKRLTDYESPAGDAAFQREVELISIAVHRNLLRLIGFCTTSTERLLVYPFMQNLSVAYRLRELKRGEPVLDWPTRKRVALGTARGLEYLHEQCNPRIIHRDVKAANILLDGDFEAVVGDFGLAKLVDIRHTNVTTQVRGTMGHIAPEYLSTGKSSERTDVFGYGIMLMELVTGQRAIDFSRLEEEDDVLLLDHVKKLQREKRLETIVDCNLNKNYNIEDVEVIVQIALLCTQASPEDRPAMSEVVRMLEGEGLAERWEEWQHVEVNTRQDYERLQRRMNWGEDSVYNNQDAVELSGGR

SEQ ID NO: 39318 - protein, 539 aa, Zea mays
MACLAPQFKWAPSAAAHMPSSSSSSSYSRCSALRVHCAVTSAAVVEDRTNGSAAQLRLAYAAPAIQRNFEATLASEALLNEEAVVAAAAAEAVALARAAAEAAQEVVQIVQRNNHQPVIRPKKCVDNYLANEILRTEMRSSSPDMYANNPLMEYLDSYGIMDAEDELDAYAQYTENIAVKSARQSERKARRTRAAIKASTTLHASQKVALSSKKKRSKGSSSSMNPLGSLWKMTGRRLLTAKEEVEFSEGIQDLLKLEAIQAELIEYNGGQPTFSQWATAAGVDEKTLRKRLNYGIYCKNRMVTSNVRLVISIAREFEGPGMDFYDLIQEGMQGLIRGAEKFDSSKGFRFSTYSHWWIKQAMRKSVSEQSQIFRLPAHMVEASYRVKECTKRLRRKLRRRPTNEEIAVDTGIPIKRVEAAVNLPKYSVSLDSKIGSTDMTYQEVTADPSAETAEEMLNRMSMKKDVHMALDTLTTREKQVVVLRFGLEDGRIRTLQEIGNIMGVSRERIRQIESGAFRKLRSKKKVKALKDYLVPVGNW

SEQ ID NO: 39319 - protein, 298 aa, Triticum aestivum
  misc_feature (246)..(246): Xaa can be any naturally occurring amino acid
  unsure (1)..(298): unsure at all Xaa locations
MGALRRHQCLIAAFVLAGLLLVQAEARGVTSAYRRRLEAAEDMPLDADVFAVPPGHNAPQQVHVTLGDQAGTAMTVSWVTVDEVGNSTVMYGRAMGRLDMAAEGTHTRYKYHNYTSGFIHHCTLTSLEHGTKYYYAMGFGHTVRTFWFTTPPKPGPDVPFRLGLIGDLGQTSDSNSTLTHYEATGGDAVLFMGDLSYADKHPLHDNNRWDTWGRFSERSVAYQPWIWVTGNHEVDYAPELGETTPXKPITHRYPTPHRSSGSPEPYWYSVKLASAHIIILSSYSAFASTRAVQWLEAS

SEQ ID NO: 39320 - protein, 504 aa, Solibacter usitatus Ellin6076
MNNQVQLITYVDRLGGGGLQTLRSLLEGPLREMFGGVHLLPFFHPIDGVDAGFDPIDHTQVDPRLGTWDDLRALGSTLEITADLIVNHVSTQSPQFEDYSRRGAASAFSGMFLTFDRVFPQGATESDLLRIYRPRPGLPFTTVLLRNGEQRLIWTTFTPQQVDIDVRSPMGAAYIGSILERFQSAGVTMIRLDAVGYAIKKAGTSCFMIPETFDYIAELTQQAHALGIEVLVEIHSYYRDQIEIARKVDRVYDFALPPLVLHTLFEKNARALKEWLAVSPRNAVTVLDTHDGIGVIDVGADARDPQGRAGLLPPEGIDRLVETIHARSRGESRKATGAAANNLDLYQVNCTFYDALGRRDDEYLIARAIQFFAPGIPQVYYTGLFAGINDMDLLARTGVGRDINRHYYAAEEVREHLERPVVRRHLELIRFRNRHGAFNGSFEVASSPDKRLVLEWRDGAEWARLEVDLASLTAMISYSTPQGTQTLDVTSLGAASKSAQGEVR

SEQ ID NO: 39321 - protein, 193 aa, Ustilago maydis
MQTIKCVVVGDGAVGKTCLLISYTTNAFPGEYIPTVFDNYSANVMVDGKPVSLGLWDTAGQEDYDRLRPLSYPQTDVFLVCFSLVSPPSFENVRTKWWPEVSHHAPNIPTILVGTKLDLREDPETIAKLRDRRMQPITYAQGNQMARDIHATKYLECSALTQKGLKGVFDEAIRSVLAPAPVQSKKKNNCLIL

SEQ ID NO: 39322 - protein, 400 aa, Staphylococcus epidermidis RP62A
MAKIPVTVLSGYLGSGKTTLLNHILKNREGRRIAVIVNDMSEVNIDKDLVAQGGGLSRTDEKLVELSNGCICCTLRDDLLREVERLVHKGGIDQIVIESTGISEPVPVAQTFSYIDEELGIDLTSICRLDTMVTVVDANRFVNDIRSEDLLADRDESVDDEDERTIADLLIDQVEFCDVMIINKIDLISDEALEKLENVLRALQPEAKIIKTVNAKVELSDVLNTQLFDFEKASESAGWIKELTAGGHATHTPETEEYGITSFAYTRRLPFHAKRFHQWLEQMPENIVRTKGIVWLAQYNDVACLLSQAGSSCNIHPVTYWVATMSESQQQAILEARQDVVEDWDIEYGDRQTQFVIIGTDLDQEKISRELDACLIHSSEIDEDWRLLDSPYQWTYDRRM

SEQ ID NO: 39323 - protein, 100 aa, Mycobacterium bovis AF2122/97
MAKVNIKPLEDKILVQANEAETTTASGLVIPDTAKEKPQEGTVVAVGPGRWDEDGEKRIPLDVAEGDTVIYSKYGGTEIKYNGEEYLILSARDVLAVVSK

SEQ ID NO: 39324 - protein, 361 aa, Saccharomyces cerevisiae
MTTAVRLLPSLGRTAHKRSLYLFSAAAAAAAAATFAYSQSQKRSSSSPGGGSNHGWNNWGKAAALASTTPLVHVASVEKGRSYEDFQKVYNAIALKLREDDEYDNYIGYGPVLVRLAWHTSGTWDKHDNTGGSYGGTYRFKKEFNDPSNAGLQNGFKFLEPIHKEFPWISSGDLFSLGGVTAVQEMQGPKIPWRCGRVDTPEDTTPDNGRLPDADKDADYVRTFFQRLNMNDREVVALMGAHALGKTHLKNSGYEGPWGAANNVFTNEFYLNLLNEDWKLEKNDANNEQWDSKSGYMMLPTDYSLIQDPKYLSIVKEYANDQDKFFKDFSKAFEKLLENGITFPKDAPSPFIFKTLEEQGL

SEQ ID NO: 39325 - protein, 379 aa, Methylobacterium extorquens
MPGRNHLFVPGPTNIPDRVMRAMMVQSEDHRSVDFPSLTKPLFEDTKKVFGSTEGTIFLFPASGTGIWESALSNTLARGDKVLAARFGQFSHLWIDMAQRLGLDVVVQEEEWGTGAKPEKIEEALRADKNHEIKAVMVVHNETATGVTSNIGAVRKAIDAAGHPALLFVDCAIAGSQKGLMLPAGLGVICVSQKALKAAEGQSGRNDRLARVYFDWEDQKKQNPTGYFPYTPPLPLLYGLREALACLFEEGLENVYHRHAVLGEATRQAVAAWGLKTCAKSPEWNSDTVTAILAPEGVDAAKIIKHAYVRYNLALGAGLSQVAGKVFRIGHVGDLNELSLLGAIAGAEMSLIDNGVKVTPGSGVAAASSYLRENPLAKA

SEQ ID NO: 39326 - protein, 476 aa, Yarrowia lipolytica CLIB122
RMDPCVYHAAILTTAGLNIVRMNFSHGSYEYHQSVIENARESEQQFQGRPLAIALDTKGPEIRTGVTKDDKDWDVKAGHVMLFSTNPKYKDQCDDKIMYIDYTNIVKQIDIGKIIFVDDGVLSFKVLEKIDGETLKVETLNNGKISSRKGVNLPGTDVDLPALSEKDKADLKFGVEHGVDMIFASFVRTANDVQAIRDVLGEKGKGIQVISKIENQQGVNNFDEILKETDGVMVARGDLGIEIPAPQVFIAQKQLIAKCNLAGKPVICATQMLDSMTYNPRPTRAEVSDVGNAVLDGADCVMLSGETAKGTYPIESVKMMHETCLVAEKAIAYAPLFNEMRTLTVRPTETVETIAISAVSASFEQQARAIIVLSTSGTSARLCSKYRPNCPILMVTRNAQAARFSHLYRGVYPFIYHKARASNPAEWQHDVEERLKWGMDEAVALGILNKGDVVVAIQGWTGGLGHTNTLRVLECV

SEQ ID NO: 39327 - protein, 162 aa, Dehalococcoides ethenogenes 195
MTLERWQPGWSLRPWRPFREILSPGLWSMLANERDWLPATEMLELKDKYLIKAEMPGINEEDIEVSVSDNVLTIKGEKKYTSEVSEENYYFSERSYGSFSRSMTLPNNTSIQNIAATLDNGILEISIPKVSEAKAKKVSVTKAAKTRKANINTKPGNPKTKS

SEQ ID NO: 39328 - protein, 339 aa, GIBBERELLA ZEAE PH-1
MADAAECNGEAVDLGRRGLRIGAIFIIMASSLIGAILPIFLARQKTIPVPKFTFFICKFVGTGVIIATAFMHLLVPAVENLGDECLADRLGGYDWAEAIALMTVIVMFFVEMLAARLSNADMEHNHSDEFDPAMEVIAKKQPSTDIETGDRRASGYAPGGDEHLAHGREHKEGDAQGGLAGQLLAIFILEFGVVFHSIFIGLTLGTIASDELTVLLIVLVFHQMFEGLGLGSRLAVAPWPSNRQWMPYLLGLIFALSTPIGIAAGIGAKPNNASDQKLINGIFDAISAGILMYTGLVELLAHEFMFNPYMRKAPIKILLLAFACVSFGVAVMAILAKWA

SEQ ID NO: 39329 - protein, 152 aa, Yarrowia lipolytica CLIB122
MSNTEQTFIAIKPDGVQRGLISPILHRFEQRGFKLVAIKLTNPDEKLLREHYEDLQEKPFFPSLLKYMQSGPVLATVWEGKDVVKQGRNILGATNPLQSAPGTIRFDYAIDIGRNVCHGSDSVESAKKEIGIWFKPEELASYTPANIGWIYE

SEQ ID NO: 39330 - protein, 97 aa, Bifidobacterium breve
MSIKLTPLEDKIIVKQAEAETQTASGLYIPDNAKEKPQQGEVLAVGPGRRDDKGERIPVDVKVGDKVLYSKYGGTEVHYEGEDYLIVSSRDILAILG

SEQ ID NO: 39331 - protein, 121 aa, Brassica napus
MAATQLTASPVTVSARSLASLRASSAKFSSFGTLKPGTLRQSHFRPLVVRAASVVAPKYTSIKPLGDRVLVKIKEAEEKTMGGILLPSTAQSKPQGSEVVAVGEGRTIGKNKIDITGPYWS

SEQ ID NO: 39332 - protein, 631 aa, Kluyveromyces lactis NRRL Y-1140
MKVSTHHFLPSLLVALWSWATVAQAATHTFNWTTGWGNYNVDGNFERPVITCNGEFPWPDLKVKRGDRIQVYLTNGFDDRNTSLHFHGLSQNGTNMMDGPEMITQCPIAPGDTMLYNFTIDDNDGTYWYHSHTGGQYQDGMKGTLVVEPEDSLPFDYDEEVVVQLAEWYYDNVDTLDRKFMNVYNPTGAEPIPQNLIINNTRNMTWNVEPDTTYLLRIVNTGGFVSQYFWIEDHDMTVVEVDGVYVEKNTTSMLYITVAQRYSVLIHTKNDTSKNYAIMQKFDDTMLDVIPNDLMLNATSYMMYDKDGEKPEQSYVDSIDDFLDDFYLTPLDKVELYEDPDYTITVDVVMDNLKNGVNYAFFNNLTFTAPKVPTLMTALSAGKDALNPLVYGTNTNAFVLKKDEIIEIVLNNNDTGKHPFHLHGHIFQLVDRERGYDDAIGEGPHPFDPEDHNPFPDYPMMRDTVYVNPQSSIVLRFKADNPGVWFFHCHIEWHLKQGLALLLIEAPEEMQNTESQQLTDNHKQVCENVGLSWEGNAAGNTNDFLDLVGQNVQVANIPDGFTAKGIVAMTFSCLAGVLGLISLSTYGLMGVKKSEEEIIRDLGMDPDAVEKVDVSDINSDEDSSRTSKNIE

SEQ ID NO: 39333 - protein, 465 aa, Ustilago maydis 521
MSVLPEVSAPERKVPFESRVMWTAIVLAIFLVSSQIPLYGIVSSDSSDPLYWMRVILASNRGTLMELGISPIVTSGMIMQLLAGANLVEVDFSLKEDRALFGGAQKLFALIISLGQATVYVLTGLYGQPKDLGAGVCLLLILQLVVAGLIVILLDELLQKGYGLGSGISLFIATNICESIVWKAFSPTTVNTGRGPEFEGALVALFHLLFTWNDKSRALKEALYRDRLPNVMNLLATLLIFLVVIYLQGFRIEIPVKSNRFRGQRGTYPVKLFYTSNMPIMLESALTSNVFIISQMLASRFPSNLFVKLLGVWEPLEDSAQLHAVGGVAYYMSPPHNFKEVVGDPIHTAIYIAFTLTACALFSKTWIEVSGSGPREVAKQLKDNQMVMAGHRDASMYKELKRVIPTAAAFGGATIGALSVCADLIGAFGSGTGILLAVTIIYSYFEIGMREAGGPEMAAMGELFG

SEQ ID NO: 39334 - protein, 484 aa, Agrobacterium tumefaciens str. C58
MHLNDPTLFCEKVPVAGRWIGCDDRETATIRNPATGKIVGQVPELGATETQAAITAAVIAQKAWARRTAGERAAILKAWHRLVMENRDDLGMILTLEQGKPLAEAKGEIAYGASFIEWFAEEARRINGETVPGHQADKRILVLRQPVGVVAAITPWNFPNAMITRKVGPALAAGCAVVLKPAPQTPFSAIALAILAERAGLPLELFSIVTGPAAEIGGVLTASPDIRLLTFTGSTRTGEHLYRQCAPTIKKLGLELGGNAPFIVFNDADLDAAVEGALIAKFRNNGQTCVCANRLYVQSGVYDAFAEKFARAVSGLKVGNGLEEGSILGPLIDGNAVAKVEAHIADALSKGAQIAAGGSRYALGGNFFEPTILRNVTADMQVAREETFGPLAPLFRFEDEEDVIAQANNTDFGLASYFYARDLSRVFRVAEALEYGMVGVNTGAISTAEAPFGGVKMSGLGREGSRHGIEEYTELKYVCIGNIL

SEQ ID NO: 39335 - protein, 259 aa, Arabidopsis thaliana
MSGQRLDGKIVIITGGASGIGAEAARLFTDHGAKVVIVDLQEELGQNVAVSIGLDKASFYRCDITDETEVENAVKFTVEKHGKLDVLFSNAGVMEPHGSILDLDLEAFDRTMAVNVRGAAAFIKHAARSMVASGTRGSIVCTTSVTAEIGGPGPHSYTASKHALLGLVRSACGGLGKYGIRVNGVAPYGVATGLTSYNEETVKMVEDYCSATAILKGVVLKARHVADAALFLASDDSVYISGQNLGVDGGYSVVKLTSN

SEQ ID NO: 39336 - protein, 475 aa, Zymomonas mobilis subsp. mobilis ZM4
MTEGLFPRGRKVRVVSTLGPASSTAEQIRDRFLAGADVFRINMSHGTHDEKKVIVDNIRALEKEFNRPTTILFDLQGPKLRVGDFKEGKVQLKEGQTFTFDQDPTLGDETRVNLPHPEIFKALDKGHRLLLDDGKIVVRCVESSPTKIVTRVEVPGPLSDHKGFNVPDVVIPLAALTPKDRKDLDFALQEKADWVALSFVQRVEDVIEAKELIKGRAPLLVKLEKPAAIENLESILAATDAVMVARGDLGVECLPESVPPTQKRIVERSRQLGKPVVVATAMLESMIKAPAPTRAEVSDVANAIYEGADGIMLSAESAAGDWPHEAVNMMHRIASYVENAPGYIERVRFTPTPAEPTTVDALAENASKTAETVGAKAIIVFTETGKTAQRVSRARPVAPILSLTPDAEVARRLGLVWGAQPVQVSTVKTLDEAKKLAAETAKKYGFAKAGDKLVVVAGEPFGKAGTTNIVDVIEA

SEQ ID NO: 39337 - protein, 371 aa, Vibrio sp. Ex25
MEIEMKNEYLLLTPGPLSTSETVREAMLKDWCTWDDEYNKDIVEVIRTKLVKLATDQDGYTSVLMQGSGTASVEATIGSAIGKDGKLLVVDNGAYGARIAQIADYLNIPCHVVSPGETSQPHLNEVETALASDPTITHVAIVHCETTTGMLNPIEAFASAAKAHGKVVILDAMSSFGGIPIDIAELGIDFMISSANKCIQGVPGFGFVIAKQTELEKCQGQARSLSLDLYDQWQCMEVNHGKWRFTSPTHTVRAFYQALLELEQEGGIEARHHRYQTNQKTLVAGMRSLGFEPLLSDDLHSPIITSFYSPTHSDYQFKAFYTRLKEQGFVIYPGKVSNADCFRIGNIGEVYPADIERLIGAIEKAMYWQVA

SEQ ID NO: 39338 - protein, 616 aa, Pseudomonas putida KT2440
MSGKAQQQSRIKELITRGREQGYLTYAEVNDHLPEDISDPEQVEDIIRMINDMGINVFESAPDADALLLAEADTDEAAAEEAAAALAAVETDIGRTTDPVRMYMREMGTVELLTREGEIEIAKRIEEGIREVMGAIAHFPGTVDYILGEYDRVTTEGGRLSDVLSGYIDPDDNIAAPTEEVPIPGAKAAAAKEESDDDEEESESGDDEEEAESGPDPVVAAQRFGAVSDQLQATSKVLKKNGRNHKESIEALQALADLFMPIKLVPKQFEVLVERVRDALNRLRQQERAIMQLCVRDARMPRADFLRMFPSNETDQTWSGDLAKRNTKWAAALGEKNAAIVACQQKLIDLETETGLTVAEIKEINRRMSIGEAKARRAKKEMVEANLRLVISIAKKYTNRGLQFLDLIQEGNIGLMKAVDKFEYRRGYKFSTYATWWIRQAITRSIADQARTIRIPVHMIETINKLNRISRQMLQEMGREPTPEELGERMEMPEDKIRKVLKIAKEPISMETPIGDDEDSHLGDFIEDSTMQSPIDVATVESLKEATRDVLSGLTAREAKVLRMRFGIDMNTDHTLEEVGKQFDVTRERIRQIEAKALRKLRHPTRSEHLRSFLDE

SEQ ID NO: 39339 - protein, 312 aa, Solibacter usitatus Ellin6076
MTPGNPTLQHEASAQSNPIRIVVLGEVLWDVFPDSVRLGGAPLNFAVHASRMGFESLLVSAVGDDDLGRRAHQAVAKMGLDTSLLHTSARWQTGTASVQLDASGYPAFQIPRPAAYDDARLTEKDILRLTAWSPAWLYHGTLFPSKKEGRSTLSRLIQALPQTMRFYDVNLRPGFDSPELVTGLLADADVVKLNETELREVSRFAGLPSEIEAFGRAGAEQYGWRAVCVTLGERGCAILTGKDYLVAAAHPVDVVDTVGAGDAFAAAFLHGLSRQWAIENIAAFANRVGAIVASRAGAIPDWSVAETADPLH

SEQ ID NO: 39340 - protein, 692 aa, Zea mays
MAAPSEDALRRALAARKAAVDAQAEAVRALKAGGGASKADVDAAVEALKALKVEAGAAARRLQQAVGAGAGGAAREELRQAVVNTLERKLFYIPSFKIYRGVAGLYDYGPPGCRVKANVLSFWRQHFVLEENMLEVDCPCVTPEVVLKASGHVEKFTDLMVKDEKTGTCYRADHLLKDFCKEKLEKDFALPQEKADEFKRILAILDDLSAEELGAKIKEYGIVAPDTKNPLSDPYPFNLMFQTSIGPTGLSVGYMRPETAQGIFVNFKDLYYYNGQKLPFAAAQIGQAFRNEISPRQGLLRVREFTLAEIEHFVDPEDKSHPKFVDVADLEFLMFPRELQLSGESANLMKLGEAVSKGTVNNETLGYFIGRVYLFLTSLGIDKGRLRFRQHLPNEMAHYAADCWDAEIECSYGWIECVGIADRSAYDLKAHTDKSGVPLVAHEKFSKPREVEKLVIVPSKKDLGLAFKGNQKMVLEALEAMSEKEAFEMKAELETKGETNFKVCTLGKDVVITKKMVSISMEKKLEHQRVFTPSVVEPSFGIGRIIYCLFEHSFYTRPSKSEEEQLNVFRFPPLVAPIKCTVFPLVKNQEFDDAAKVIAKALTTAGISHIIDTTAISIGRRYARTDEIGVPFAVTVDSATNVTIRERDSKEQVRVDIDEVAPMVKQLTEGQSTWTDVSAKYPAHVGPQSEQE

SEQ ID NO: 39341 - protein, 191 aa, Triticum aestivum
  misc_feature (120)..(120): Xaa can be any naturally occurring amino acid
  misc_feature (129)..(129): Xaa can be any naturally occurring amino acid
  misc_feature (142)..(142): Xaa can be any naturally occurring amino acid
  unsure (1)..(191): unsure at all Xaa locations
SIVFQEPRFVEYFRSATPETEYGRMNIGSRPSKRKPSGGIESLRAIPWIFAWTQTRFHLPVWLGFGAAIKHIMQKDIRNIHILREMYNEWPFFRVTLDLLEMVFAKGDPGIAAVYDKLLXVADDLQSFXGEQLRKNYEETKXLPLQVAGHKDFLEGDPYLNSRCVIHHPLQAPERYRPTQVTQRPSRRQPL

SEQ ID NO: 39342 - protein, 182 aa, Dechloromonas aromatica RCB
MSQSAHSFATLAGGCFWCLEAAFEQLDGVVAVLPGYMGGHDPRPTYEAVCRGDSGHAEVVQIEFDPAIIDFETLLTAFFTIHDPTTLNRQGHDVGTQYRSAIYFHDAGQQSAAEAMIARLNAEGVWASPIVTEVSPASAFFVAEDYHHQYFRRNPYQGYCMAVVAPKAMKLRQVFAERIKAG

SEQ ID NO: 39343 - protein, 309 aa, Zymomonas mobilis subsp. mobilis ZM4
MTDKPAILLRTPLFYGARDKLDSLFTVYDYGTKITPKIASQIQALIGGGQTQISADEINQYPNLQIIAQYAVGFDGIDLEAAKKRDIRITNTPGVLTEDVADMAVGLFLTLKRDIIRNDKLVRDGGWIKKEEIPLSHSASNLDVGVFGLGRIGQAIAERLAPMSKSVSYCSRHPKEVSWNYYNNILDLAKAVDVLVLAAPGTAETKGLVNKEVLEALGQKAVLINIARGSIVDEDALIEALEKGVIAGAGLDVFANEPNVPAALQQSQKVVLQPHLGSATVETRTTMAHLVIDNLQAFFAGKPLLTPVI

SEQ ID NO: 39344 - protein, 568 aa, Shewanella oneidensis MR-1
MAAPWHQVSWQAFDEISHKIAQVLIQLGVQVQDRCVILSQNCPQWTCADVGTLKSRAIVVPIYPTSTVEQASFIVNDAAAKVIFVDDAKQYALACELQTLCPTLEHVIVFDAAVQLAQDKPQHKHLDSLLALEYDQSAELEQRLKDANLDDLLTLIYTSGTTGDPKGVMLDYRNMASTVHQHDLILPFKTGDVSLAFLPLSHVFERGWSFYVLCRGGRNVYLQNTQRVKEAISAVRPHTLCVVPRFLEKVYSAVQDKVAKSAEGRKKLFAWAMGVGERQFEVSQGRVKGGLWLSLQWRLANKLVYSKLQAVLGGRLKFMPCGGAALDLNVASFFHAIGIPVLCGYGMTETNATVTCNTLDNRVAGSNGKVLPEIQIKLGKDDEILVRGDTVMRGYYNRPEDTAAAFEDGWLKTGDAGRLDAHGNLFITDRIKELMKTSNGKYIAPQRVEGTVGRCPFIEQVAVIADARNYVTALIVPAFESLEAWAKEKGLKYESPIELLRHSHVVEHFEQRLKHLQQELAGFEQIKKFTLLPEAFSMEAGLITPTLKLRRKMIYHKYVHEINAMYNN

SEQ ID NO: 39345 - protein, 228 aa, Oryza sativa
SGIVFRLTIEVEKFYKQCDPEKENLCLYGLPNGTWAVTLPADEVPPELPEPALGINFARDGMQEKDWLSLIAVHSDSWLLSVAFYFGARFGFDKKARERLFMMTSSLPTVFEVVSGGVNTQSKTANGSSKNKSGSKPPKRPNSDSKPQKQVQAKYEEENGGRGNGGDEDQAETICGACGEAYANGEFWICCDICETWFHGKCVRITPAKAEHIKHYKCPGCSNKRTRE

SEQ ID NO: 39346 - protein, 438 aa, Zea mays
MSFRSMVRDIRESFGNISRRNFEVRIHHRGKSLGSSGDLQDRPAEVQQSRWASLPPELLCDVMKRLEEDDSSWPDRKDVVSCASVCTTWRDMCKDIVRSPEHCAKLTFPVSLKQPGPRDGVIQCFIKRDKSKLTYRLYLSLSSGVLDENGKFLLAAKRSRRMAHTEYAIFMDSRNFSRSSTGYIGKLRSNFLGTKFIIYDTQAPYNGGRVCTQERAPSRRLSSRKVSPRVPSGSYPVAQVNYELNVLGTRGPRRMQCAMHSIPASAVEPGGVVPGQPKELLPRLFDESFRSTATSSFSKYSVADSSMDLGSCPFSEVEVGGGSLREGDESEKERPLVLRNKAPRWHEQLQCWCLNFRGRVTVASVKNFQLIAPAKTQPQPQASGPPPPPPSSSYHDPVILQFGKVGRDMFTMDYRYPLSAFQAFAICLTSFDTKLACE

SEQ ID NO: 39347 - protein, 333 aa, Chlorobium tepidum TLS
MSGIPILITGATGYIGARLLVDMIARYGDSVRCRVTVREGSDASFLRNLPVEIAQADMHDPIAVNEAVKGAEVVFHCAGLIAYTRNFRNRLYDTNVLGTRHIVDACLEAGVKRLVATSSIAAVGSSDAKSGIRESNEQTPFTEWQRHNVYMESKYLAELECRRGVAEGLDVVMVNPGVVIGKNSEPGMSGSSSNEVLRMIYEGRLPLCPDGATGFVDVRDVADAHIAAWQKGKAGERYIIVGENLSFRELFERIAALPGSRSGKVFRVNRVARMLAGVGGELFSLLTKRPSFISIESLRQAAHLSRYSNQRSVRELGMSYRPFEETLRSAIMQ

SEQ ID NO: 39348 - protein, 447 aa, Schizosaccharomyces pombe
MSTPYEPEFQQAYKEIVGSIESSKLFEVHPELKRVLPIISIPERVLEFRVTWEDDKGNCRVNTGYRVQFNSALGPYKGGLRFHPSVNLSILKFLGFEQIFKNALTGLPMGGGKGGSDFDPKGKSDNEIRRFSQAFMRQLFRYIGPQTDVPAGDIGVTGFVVMHMFGEYKRLRNEYSGVVTGKHMLTGGSNIRPEATGYGVVYYVKHMIEHRTKGAETLKGKRVAISGSGNVAQYAALKCIQEGAIVKSISDSKGVLIAKTAEGLVPEEIHEIMALKEKRASIADSASLCKKHHYIAGARPWTNVGEIDIALPCATQNEVSGEEAAALIKQGCRYVAEGSNMGSSAEAVEVFEKSRASGEGCWLAPGKAANAGGVAVSGLEMAQNAQFSTWTHAEVDAKLAGIMQNIFEQSTDVASKYCDSGSNNIPSLVDGANIAGFLKVATAMQAV

SEQ ID NO: 39349 - protein, 373 aa, Aphanothece halophytica
MLNKNTIFFGLLLFIPISLLGHWLHWDEVSIFLTASLAIIPLAAFMGEATEEIAIVVGPTLGGLLNATFGNATELILAFIALKSGLISVVKATITGSIISNLLLVMGFAMLLGGLRYKEQVFQSEVARVNASSMNLAVIAILLPTAVEHTSNGIGEETLQTLSVAVAIVLIIVYGLTLLFSMKTHSYLCEVGEIDQQSSSAMESGDKIPEKKPEDVNLWFWLGILLVVTITVAIESELLVNSLESATESLGLTALFTGVILLPVIGNAAEHFTAVTVAMKNKMDLSLSVAVGSTLQIALFVAPVLVIAGWIMGQPMDLDFNPFELVAVAVSVLIANSISSDGKSNWLEGSLLLATYIVIGLAFFFHPVVPEIG

SEQ ID NO: 39350 - protein, 438 aa, Schizosaccharomyces pombe
MSAESLLHNTFSTEQIEVLENEYAAHNYHPLPVCFSKAKGAKVWDPEGREYLDFLSAYSAVNQGHCHPKIIEALVEQAQRVTLSSRAFYNDKFGPFAKYITEYFGYEMVIPMNTGAEAVETACKLARLWGYKAKKIPTDEAIILSCVDNFHGRTMGIISMSTDPDARDNYGPYLPNVGPKISGADRVLRYNNIEDLKYYLDTFGPKVAAFLVEPIQGEAGVMVPDDGYLEEAYKLCKAHNVLFIADEVQTGVARTGKMLCIEHSNVKPDVVILGKAISGGVYPVSAVLSSREIMLNFEPGTHGSTYGGNPLGAAVSIAALEVVKEEKLTERAAVLGEKFRTALIECKSPIVQKVRGRGLLNAVVIDESKTNGRTAWDLCLIMRSRGVLAKPTHGNIIRFSPPLVITEEDLMKGIEVIKKSLNDLPTIDMTPYAEKPIH

SEQ ID NO: 39351 - protein, 246 aa, Oryza sativa
MDNQQLPYAGQPAAAGAGAPVPGVPGAGGPPAVPHHHLLQQQQAQLQAFWAYQRQEAERASASDFKNHQLPLARIKKIMKADEDVRMISAEAPVLFAKACELFILELTIRSWLHAEENKRRTLQRNDVAAAIARTDVFDFLVDIVPREEAKEEPGSALGFAAGGPAGAVGAAGPAAGLPYYYPPMGQPAPMMPAWHVPAWDPAWQQGAAPDVDQGAAGSFSEEGQQGFAGHGGAAAGFPPAPPSSE

SEQ ID NO: 39352 - protein, 589 aa, Pseudomonas syringae pv. phaseolicola 1448A
MISRITRRHRQALRLAASFIAPYRWQAFGVLLALVITAGITLSIGQGIKLMVDQGFMTRSPQLLERSIGFFMLLTVGLAIGTFARFYLVSWIGERVVADLRKKVFDHLIELHPGFYENNRSSEIQSRLTADTTLLQSVIGSSLSMFLRNVLMVVGGIVLLFITNPKLTSIVVVALPLIIAPILMFGRRVRNLSRESQDRVANVGSYVAEALGQIKTVQAYNHQEQDKQRFSHTVEQAFDTARKRILQRSWLITLVIVLVLGVVAVMLWVGGMDVISGRISSGELAAFVFYALMVGMAFGTLSEVIGDLQRAAGAAERIGELLQARSEIKAPATELQSLPQRISGRLALENVTFAYPSRPERNALDNLTLNIEPGETLALVGPSGAGKSTILDLLLRFYDPTQGRILIEGVPIAQLDPHDLRRCFALVSQSPALFFGSVEDNIRYGNASASLEQVQAAARIAHAHEFILDMADGYGTHLGEGGVGLSGGQRQRLAIARALLVDAPILLLDEATSALDAQSEHLIQQALPSLMQGRTTLVIAHRLATVQNADRIAVMDQGRLVAVGTHQQLIASNPLYARLAALQFNAGVE

SEQ ID NO: 39353 - protein, 515 aa, Yarrowia lipolytica CLIB122
MFKALTTFLLATTALGQTYSTCNPLTQTCKPDPALGGAKMFDFTQEQGDWHVTFKPDRVEYTPEGVSLRVQTQGDNPTLQSDFYLMFGRVEAVIQAAPGVGIVSSFVLQSDDLDEIDLEWLGGDNTQVQTNFFVKGNTDTYDRGQFHGIGNPTGQFHTYVIEWTSEQITWTINGQVVRTLLSNDWHGFPQSPMNIRMGVWAGGDPTNNPGTIQWAGGETNYQTGPYPMLIKSVNVEDYSTGDAYEYSDRSGTWQSIKAQNGEVHPVRPAVIPPADGSKFDLVSADQGDKPSTGALQASSTQASPEASSQAPSEAPSEASSKTSSEASSVQATPSVEPTSSIPAPSTSAASSAASSAAPTTSSTLSIPVLVPGPAKNTSSAVSSSTNSSTPVTTHVTKPANRTSSTVFATVTSCKDDACKKTEVPKPVANSTVATSKPASKPASKTVLPVTSVAPTTSKPVPTQTKTEAESSASVSGVPTISQATASTTAHQANTGVVTEASFGAIAVAAFALMLI

SEQ ID NO: 39354 - protein, 137 aa, Campylobacter lari RM2100
MEKTLSIIKPDAVKKGVIGQILTRFESNGLRIAATKKIQLSEKEAQEFYAVHKDRPFFKDLVEFMISGPVVVSVLEGKNAVLKNRELMGATNPKEAAAGTIRADFADSIDANAVHGSDSLENAKIEIEFFFSKTEIL

SEQ ID NO: 39355 - protein, 127 aa, Dehalococcoides ethenogenes 195
MAFYFEKVMEYFVNPLNSGEMENPDGIGRAGNDICGDVTEFYIRVKDNRLVEVKFKTYGCGAAVAISSLVSLMATDKTIEEAMKIDNKAVEAEIKGLPQNRSHCSQMGPQALHSAIADYKSKVQARG

SEQ ID NO: 39356 - protein, 140 aa, Glycine max
MGACPHAWQQHHLHHRGRMWAASPAFRRQLFLLRSLAPTCADGGRASSSSLRPHLMYAAAGPVYEADAEAVVRRITPPLDRARHKGQAGKIAIIGGCREYTGAPYFAAISALRVGADLSHVFCTKDAATVIKSYSPELIV

SEQ ID NO: 39357 - protein, 1207 aa, Oryza sativa
  misc_feature (463)..(463): Xaa can be any naturally occurring amino acid
  unsure (1)..(1207): unsure at all Xaa locations
MGAEAEESLDHPGSLSGMSPATPDVAWKPAERRRRRSEADAEGSSCCSLSAATAAWVGAGNVESDDPSVRSVAAGEQSRSVSRPEEEEEECASCTQDSTVSPPVSECGDRTAQQEPSTQEYTVSPPPVSECGDKVVQQESSNQESTVSPPPVSECGDKIAQQGSSTRESTVLLPVSECCNKVAQQESSTQESTVSLPVIECGDKVAQQESSTQESTVSLPSSECGDKVAQQESSTQESTVSLPLSECGDKVAQQESSTQESTVSPPVSECGDKIARQEGAASAIPTPEKVEATPRRPRKRSTKGLTRFKIMKDHKAAQRTATPVEVKIKRKAKDNGRRPLGDKSVRRKLNFEGDAVDFEGNREFSRAKLMEDLRCLAKVHGLRDDLGAGKRSKKGKKRKKMTGEHQDNGESALVPYQKAPAATSSSALVPIQNSTQLAIVHHRNHLKNLRTKVLGLDEKTLQXYNVLRKWDETDSESFEGVDIGSGPEWNETRRHFEHYVDVFIATVHGLWGPRRFSEWGGSVTDSVVGTFLTQNVADNLSSNAFLNLVAKFPPTKRHINAEACSNLSLLIDDMRRKLNLNEQSNGTDSGSSDFTKPVDFEKENGYNEEVKGNYGRDYSTIIENFISIIEKHHKDMSTWDNARLENMVKDKSGTPVCSHRTLRKFMDTFEEKDTSHWDKLREEAYSKGYKIKGTGISDSADWEAVLHAPAVEIANSIAVRGQHYVIALRIQAFLKRVKKDHGNFDLDWLRYVPRESAKNYLISILGLGDKSVDCIRLLSLKHKGFPVDVNVARIVTRLGWVKLQPLPFSAEFHLVGLYPIMRDVQKYLWPRLCTISKEKLYELHCLMITFGKAICTKVSPNCRACPFSAKCKYYNSSLARLSLPPAEGHGHEYGEEQASTATPGRLLLSNDSHIAGFQQVCQPQIKINMPAGRESIYKCPGCRLRTPSPEHEYEESPYEQELYEDDLCDIEDTIPELQYDFEIDLCSLKHTVNNGSWTPNSGKDLALINSQHASVQNKRLKNIGRLRTEHNAYVLPDDHAILEEFEDRVPEDPCPYLLVVISCSDEHTVKGTILIPCRTATRGNFPLNGTYFQDHEVFADHSSSRSPITIPRECIWNLDRCIVYFGSSIQSIMKGQTRQDIEDCYKKGYICVRGFDRNTRYPKPICAKLHATNERNGTGENSRKKKKTSQEGKKIDDKSSFGKLEIN

SEQ ID NO: 39358 - protein, 346 aa, Ashbya gossypii ATCC 10895
MEIMEQELCVAEEARRRSMLPQRSTVSKGKYSLQDFQIMRTLGTGSFGRVHLVRSIHNGRYYAIKVLKKQQVIRMKQIEHTNDERRMLKVVEHPFLIRMWGTFQDARNLFIVMDYIEGGELFSLLRKSQRFPNPVAKFYAAEVTLALEYLHAHNIIYRDLKPENILLDRNGHIKITDFGFAKEVDTVTWTLCGTPDYIAPEVITTKPYNKSIDWWSLGILIFEMLAGYTPFYDVTPIKTYEKILAGKVVFPPFFHPDAIDLLGKLITDDLTRRLGNLQSGSQDIKSHPWFSEVIWEKLLAKDIETPYEPPITAGVGDSSLFDQYPEEHLDYGVQGDDPYASYFVDF

SEQ ID NO: 39359 - protein, 630 aa, Dehalococcoides ethenogenes 195
MAEVDTIPKLVKNNAEQWGNKPAMCMKNLGIWQKYTWSDYYGTVKYFGLGLLSLGTKPADRVAIIGDNEPEWFWAEFAAQAIGAIPTGIYVDSIPDEVKYIARHADVKIAVVNDQEQADKFLELLPELPNLTKIIYWDPKGLKNYDDPMLISFKEVVKLGQEYEKAHPGLFEELLGATKPDDIAFIYYTSGTTGLQKGAMLSHRSLITTAKGFIARYPLDYKDDLISNFPASWVGDSFFATVPHILSGARLNFPEEPETVAEDTREIGPDFVIYGPRQWESLVSEIQVKIMDAHPLKRLAYRALSPLGYKMAEKMLAGSKPGLPLKIGHKIADGLLFHPLKDKLGVSKVRFGVTGSSVLSLDTFKMIHSMGIELRQNYASTEAGFISSHGKGDISFESVGRPALGTEVRLTNEGELLIRSDCMFSGYYKDPEKTAQSFKNGWFATGDAVNINEKGHLIFLDRLKDLGVLASGIKYAPQYIEGRLRFSPYIKDAMVVGGEDKEYVTAIINIDFTMVSKWAQKNRLNFTTFVDLSQKKEVADLVAKDLIRVNSYLPEGSRVKKFVLLHKEFDPDEAELTRTRKLRRGFVSERYKDLIDAMYHLDKEVKVEAAVTYRDGRKGVVTTSIKVRSL

SEQ ID NO: 39360 - protein, 175 aa, Oryza sativa (japonica cultivar-group)
MNVDKLKKMAGAVRTGGKGSMRRKKKAVHKTTTTDDKRLQSTLKRVGVNNIPGIEEVNIFKDDVVIQFQNPKVQASIGANTWVVSGTPQTKKLQDLLPTIINQLGPDNLDNLRRLAEQFQKQVPGAEAGASAGNAQDDDDDVPELVPGETFEEAAEEKEPEEKKEAEVEEKKESS

SEQ ID NO: 39361 - protein, 356 aa, Clostridium acetobutylicum ATCC 824
MHKKLFIPGPVEVAEDVLQKMAEPMIGHRSKEASSLQRGISDKLRIVFQTKEEILLSTSSGSGLMEGAIRCCTAKRAAVFSIGAFGKRWYEMAIDNRVPADLYEVEWGEAIKPEFVDEVLGTGKYDLIALTHNETSTGIMNPVGEIAKVIKKYPEVVWCLDTVSSMGGTNIPVDELGVDVCITSSQKALGLPPGLAACSFSKKAIERARNVEHRGYYLDLLKLYEFIQKKDYQYPSTPSLSHMFALDYALNKMLEEGMDNRYKRHIEMAEYVRAWARKNFEIFGDEDNLSNTVTTIKNTRGISVADLNKELGKRGFAISNGYGKLKEKTFRIAHMAEFTLDDIKELIENINDILKL

SEQ ID NO: 39362 - protein, 1375 aa, Arabidopsis thaliana
  misc_feature (68)..(68): Xaa can be any naturally occurring amino acid
  unsure (1)..(1375): unsure at all Xaa locations
MGKNKRERKDGEEKSPHAAATVCVSGLPYSITNAQLEEAFSEVGPVRRCFLVTNKGSDEHRGFAFVKXVNRAIELKNGSTVGGRRITVKQAAHRPSLQERRTKAAEGISVPDNSQGQSDKDTSIPETDEKVSPPEKKLEKPVERKKVEKPIERKQVEKPVERKKAEKPIELKQVEKPFERKQVEKPVERKQVEKPVERKQVEKPIERKRPTKLHVDLPDKETCSDKQRVARTVIFGGLANAEMAEVVHSRVKEIGTVCSVRYPLPKEELQQNGLTQDGCRAEASAVLFTSVKSACAAVAKLHQTEVKGNLIWARQLGGEGSKAQKWKLIIRNLPFQAKPSDIKVVFSAVGFVWDVFIPKNFETGLPKGFAFVKFTCKKDAANAIKKFNGHMFGKRPIAVDWAVPKNIYNGAADATTASADDTVSGRSFVLSPPNRSSYFLTRSLAGDKEGSDGDSENSSVDLEEVDEAVESHPPPGDDTDDDEDGSNKLTESDALDKDVGTDMNFEDEADVARKVLKNLLASSKGSTATPEGETEESDKSKLKSSSTKPVADSSGVSEPLKSGKTKVVAPKETQDNDDFERTLFIRNLPFDVTKEEVKQRFTVFGEVESLSLVLHKVTKRPEGTAFVKFKTADASVAAISAADTASGVGVLLKGRQLNVMRAVGKKAAKDIELKKTEEKNVDHRNLYLAKEGQILDDTPAAEGVSAEDMDKRRRLHENKMKMLQSPNFHVSRTRLVIYNLPKSMNPKQLNRLLVDAVTSRATKQKPCIRQIKFLQNEKKGKVDTKNYSRGVAFVEFTEHEHALVALRVLNNNPETFGPQHRPVIEFAVDNVQKLKIREAKQQQFQQREKHNESDQQQANGEAQAPDNKYKRKTREGDNTGPRKENAARFKKGPREESKEEAKSNIAVKDNAAEKKRPIRTQEKPSSNKKGQLMRQKETTEKPDPKISKDLSEPRKRKFGEDRGEENRNGQRKRKKQGQGQGGAEVVDKLDLLIEKYRSKFSQSSAKTGPQKQSSGQVRRWVLFSVSLIFVFVSVSVCGDEDVLIRQVVDETEPKVLSSEDHFTLFKKKFGKVYGSIEEHYYRFSVFKANLLRAMRHQKMDPSARHGVTQFSDLTRSEFRRKHLGVKGGFKLPKDANQAPILPTQNLPEEFDWRDRGAVTPVKNQGSCGSCWSFSTTGALEGAHFLATGKLVSLSEQQLVDCDHECDPEEEGSCDSGCNGGLMNSAFEYTLKTGGLMREKDYPYTGTDGGSCKLDRSKIVASVSNFSVVSINEDQIAANLIKNGPLAVAINAAYMQTYIGGVSCPYICSRRLNHGVLLVGYGSAGFSQARLKEKPYWIIKNSWGESWGENGFYKICKGRNICGVDSLVSTVAATTS

SEQ ID NO: 39363 - protein, 394 aa, Oryza sativa (japonica cultivar-group)
HAFAKSTFTYEELLRATDGFSDANLLGQGGFGYVHRGVLPTGKEIAVKQLKVGSGQGEREFQAEVEIISRVHHKHLVSLVGYCISGGKRLLVYEFVPNNTLEFHLHGKGRPTMEWPTRLKIALGAAKGLAYLHEDCHPKIIHRDIKASNILLDFKFESKVADFGLAKFTSDNNTHVSTRVMGTFGYLAPEYASSGKLTEKSDVFSYGVMLLELITGRRPVDTSQTYMDDSLVDWARPLLMQALENGNYEELVDPRLGKDFNPNEMARMIACAAACVRHSARRRPRMSQVVRALEGDVSLEDLNEGVRPGHSRYFGSYSSSDYDSGQYNEDMKKFRKMAFTNNNDTSSQYSAPTSEYGQIPSASSSEGQQTQEVESRTTKRGGYSGYSSGYSGAS

SEQ ID NO: 39364 - protein, 92 aa, Helianthus annuus
MASQQGQQTRKIPEQEKKDLDQRAAKGETVVPGGTRGKSLEAQERLAEGRTKGGQTRKDQLGTEGYKEMGKKGGQTTGDKSAGEREEEEEED

SEQ ID NO: 39365 - protein, 184 aa, Hordeum vulgare
KYPYIASMGVYVFKRDVLLNLLKSRYAELHDFGSEILPRALHDHNVQAYVFTDYWEDIGTIRSFFDANMALCEQPPKFEFYDPKTPFFTSPRYLPPTKSDKCRIKEAIISHGCFLRECKIEHSIIGVRSRLNSGSELKNAMMMGADSYETEDEISRLMSEGKVPIGVGENTKISNSYYDMNARI

SEQ ID NO: 39366 - protein, 186 aa, Hordeum vulgare
KYPYIAGMGIYVISKHVMLQLLREQFPGANDFGSEVIPGATSTGMRVQAYLYDGYWEDIGTIEAFYNANLGITKKPIPDFSFYDRSAPIYTQPRHLPPSKVLDADVTDSVIGEGCVIKNCKIHHSVVGLRSCISEGAIIEDALLMGADYYETEADKKLLAEKGGIPIGIGKNSHIKRAIIDKNARI

SEQ ID NO: 39367 - protein, 369 aa, Crocosphaera watsonii WH 8501
MENIPNHLSKIDGQLGKLIILGFPFEELAVNASFEEMIYLFLHNHLPNKNELDNVTKKLLSHRYLDEKILDILKSAASNKIELIEGVRIGVSCLTMDMESNRIDKEGINGALKIISSVPIITAAYWRLLQDQPIIQPHLELSHGANYLYMLTGENPSPENVKTLEIYLNTVIEHGMNASTFAARVVMSTRSDFVSAVTAAIGAMKGVLHGGAPGPVLDMLLDMQESGDIEGYLRHKFENRELLMGFGHRVYRVKDPRAILLSQVSADVWKRREDKEFWAFAVDVESTALRLLREYKPNRRIETNVEYYTALVLHGLGLPPALFTSTFTVSRVVGWLAHCLEQLELDRIIRPSSVYTGPTEQKWCPMEER

SEQ ID NO: 39368 - protein, 219 aa, Crocosphaera watsonii WH 8501
MSKDQNAELPLWVQDRNTVLDHDQGVKWRNGEKPDYSYTDQYLHKESKYNHAPGSLEAIAQNLVRTFEMEASHKADPQQWLSIVVDKFQMSSNGGPSYSAKEVSDHGTYNLFIDKTPGYDPEAEDFQSSFELFHKAFPNGFLWELMEVLSGPPNVTFKWRHWGTFTGPYKDHQPTGETIEIRGISVAKLTEDLKILSVEHYFDNSTFLKKLTSGCPVAH

SEQ ID NO: 39369 - protein, 609 aa, Glycine max
SARAPNEPYRVILGDVRDKLYNTRERARQLLANGTSDIPEETTFTYVEQFLEPLEQCYRSLCACGDRPIADGSLLDFLRQVSTFGLSLVRLDIRQESDRHTDVMDAITKHLEIGSYREWPEEKRQEWLLSELRGKRPLFGHDLPKTEEINDVLETFHVISELPSDNFGAYIISMATAPSDVLAVELLQRECHVKQPLRVVPLFEKLADLEAAPAAVARLFSIDWYRDRINGKQEVMIGYSDSGKDAGRLSAAWALYKAQEELVKVAKEYGVKLTMFHGRGGTVGRGGGPTHLAILSQPPDTIHGSLRVTVQGEVIEQSFGEEHLCFRTLQRFTAATLEHGMHPPVSPKPEWRALMDEMAVIATKEYRSVVFKEPRFVEYFRCATPELEYGRMNIGSRPSKRKPSGGIESLRAIPWIFAWTQTRFHLPVWLGFGSAFKHVVEKDPKNLQMLQDMYNQWPFFRVTLDLVEMVFAKGDPGIASLFDKLLVSEELRPFGENLRSKFEETKRFLLQVAGHKDILEGDPYLKQRLRLRDSYITTLNVLQAYTLKRIRDPDYHVKLRPHLSKDYMESSKPAAELVKLNPKSEYAPGLEDTLILTMKGIAAGMQNTG

SEQ ID NO: 39370 - protein, 331 aa, Brassica napus
  misc_feature (86)..(86): Xaa can be any naturally occurring amino acid
  misc_feature (133)..(133): Xaa can be any naturally occurring amino acid
  misc_feature (158)..(158): Xaa can be any naturally occurring amino acid
  unsure (1)..(331): unsure at all Xaa locations
MEAFGGFHKEDDEQMVLPPGFRFHPTDEELITHYLHNKVLNIDFSAKAIGEVDLNKAEPWELPYKAKMGEKEWYFFCVRDRKYSNXVLRTTRATQPVNGRATGKGKGIFRGKSLVGMKKTLVFYSPRAPKGQXTRTWVMHEYRLDGKLSPHNSPKTAXKNEWVICRVFQKSAGGKKIPISSLMRIGSLGTDFSPSLMPSLTDASPFTDKTKTEPVYVPCFSNQTDQAQGNPLNCFSSPDIFHRIPLYQTQSLQVSGNLQSPILGQEHSVLHAMIDNNRRQSLKGMSVSQETAVSTHMHTDISSDFEYGKRRAQEDPSSSAGPVDLDPFWNY

SEQ ID NO: 39371 - protein, 321 aa, Thermotoga maritima MSB8
MWFAVLSSNEVRRKPVGVRRLGRDLVFWRDSLGKVYALEDFCVHRRARLSAGKVINDRIQCPFHGFEYDGNGRVRLIPALGKNYKVPDRFRVNSYPVYEKNNIIWLWSGEGEPEKEPKFFDDIDEDFAYAEFRELWNVPFPRAVENQLDVMHLPFVHRTTIGRGNRTLVHGPVVKWIDEDSFIFYVFNEVDRGQRVKRPEELSGEESRVYLEFIFPNLWQNHISEGTRVVAFFVPVDRQKTMIYLRFYVKMTGLKPVDSIIARLSMPLNRIILHQDRRVVETQERDIRKDVLVQGDLPIMEFRKRLYKEKKLIDFLFGGGQ

SEQ ID NO: 39372 - protein, 219 aa, Burkholderia vietnamiensis G4
MQDIIDGFLRFQRDIFPQREALFKQLATSQSPKALFVTCSDSRVVPELLTQREPGELFVIRNAGNIVPSYGPEPGGVSATVEYAVAVLGVRDIVICGHSDCGAMGAISRCTCLDHLPAVANWLRHADAAKVINAAHEYDTPRAKLDGLVRENVIAQLANLRTHPSVALALEQGRMNLHGWVYDIESGGIDALDGATRRFVPLAESPSVVAVNARDRGQA

SEQ ID NO: 39373 - protein, 310 aa, Streptococcus pyogenes MGAS10394
MNWLITSQPYKELNMKAATYLSTGNLQLIDKPKPVIIKPTDAIVQVVKTTICGTDLHILGGDVPACKEGTILGHEGIGIVKEVGDAVTNFKIGDKVIISCVTSCHTCYYCKRGLSSHCEDGGWILGHLINGTQAEYVHIPHADGSLYHAPDTIDDEALVMLSDILPTSYEIGVLPSHVKPGDNVCIVGAGPVGLAALLTVQFFSPANIIMVDLSQNRLEAAKTFGATHTICSGSSEEVKAIIDDITNGRGVDISMECVGYPATFDICQKIISVGGHIANVGVHGKPVDFNLDELWIKNITLNTPIQLKCY

SEQ ID NO: 39374 - protein, 579 aa, Zea mays
MAAATSSSTYLAIGRKTLNPAPSVATAATSVSFPATQHPCLVAASADRRRAVAAKVSSPSVIGTAMPSLDFETSVFKKEKVSLAGHEEYIVRGGRDLFPLLPEAFKGIKQIGVIGWGSQGPAQAQNLRDSLVEAKSDIVVKIGLRKGSKSFEEARAAGFTEESGTLGDIWETVSNSDLVLLLISDSAQADNYEKIFSHMKPNSILGLSHGFLLGHLQSLGFDFPKSISVIAVCPKGMGPSVRRLYVQGKEINGAGINASFAVHQDVDGRATDVALGWSVALGSPFTFATTLEQEYRSDIFGERGILLGAVHGMVEALFRRYTEQGMDEDSAYKNTVESITGIISKTISKKGMLEVYNSLTEEGKKQFIEAYSAAYYPCMDILYECYEDVSSGSEIRSVVLAGRRFYEKEGLPAFPMGKIDQTRMWKVGERVRSTRPQGDLGPLHPFTAGVYVALMMAQIEVLRKKGHSYSEIINESLIESVDSLNPFMHARGVAFMVDNCSTTARLGSRKWAPRFDYILTQQAFVTVDKKAPINQDLISNFMSDPVHGAIEVCAQLRPTVDISVTADADFVRPELRQSS

SEQ ID NO: 39375 - protein, 584 aa, Candida albicans SC5314
MFRQSLIYMNRPKKSVKSIYFHRYMNTKIPITSFKPINPRPKPKPKPKPKLKFKLKPQGKFRPLVYGVAIVATGLGTAYYIDNHYYSSLMTRSVRAVYVLLWIAYAYGFNSNSYQNIDDLHEIASDKLLHLLTTNKGLYIKLGQAIANQGNLFPLAYQKKFPQLYDQAPVQSWQDIDRILKENLGDDYQIRLFETINHEPIASASIAQVHYGKLKNGEEVAIKVQHGYIEKQVVVDLMIYRFISKVYEKVFDIPLSMFTKYISEQLIKETDFVHEMQNSEKLKKFIDKDSSLKYDNIKLPKNYPHLTTKQVLTAEWINGIPLTNKQTLLDQNYDLTLIMKQYIKLFGRQIFEYGFIHSDPHPGNLLVRFDSKNKQQLVLIDHGLYITLSDSFRLQYCNLWRYLFSLNTKGIEQIGREWGISSIDLFATVVQLRPVLLSPEVQSNANANANANKNEDEDNRNISDLFRDFIGDQKKFPGELPFLSRTMRMIQNLNQSFGSPVNRINLLTKESINALLQEKDLKFGNYWDLVRIKITLLLSGFMFYIVRLRQILSGDRFGGKGKGLEDYIEMYMQNTAKSLGMEWI

SEQ ID NO: 39376 - protein, 283 aa, Bacteroides fragilis YCH46
MDFKELNNGVKMPIQGFGVFQIPDATECERVVTDALAVGYRLIDTASVYGNERAVGMAIRKSGIPREELFITTKAWISEMGYERTLRALDTSLARLGLDYLDLYLIHMPFGDYYGAWRAMEKLYAKGRVRAIGVCNFEPDRLLDLCHNANVIPAVNQIEVHPYTPQTDAIRTMQELGIQAEAWGPLAEGRNGLFTDDILTGIARKYDKSAAQVVLRWHLQRGVVAIPKSVHRQRMQENFNIGDFMLTPEDMAAIASMNMGYDMILDLHAPEEVQRLYGIECPA

SEQ ID NO: 39377 - protein, 287 aa, Oryza sativa
  misc_feature (85)..(85): Xaa can be any naturally occurring amino acid
  unsure (1)..(287): unsure at all Xaa locations
MAAVAGGAARALSQAEQDVQMMLAADVHLGTKNCDFQMERYVYKRRSDGIYIINLGKTWEKLQLAARVIVAIENPQDIIVQSARXAGRHTPGTFTNQLQTSFSEPRLLILTDPRTDHQPIKESALGNIPTIAFCDTDSPMRYVDIGIPANNKGRNSIGCLFWLLARMVLQMRGTILPGHKWDVMVDLFFYRDPEEAKEQEEEAPAQDFAAITDYTAPEQWSADQWTSDVAAPPAATVGDWGAAPAPVAAAEGWDQAGAPVATEAAVVPPVAPTGWDPAAQPAAQGWD

SEQ ID NO: 39378 - protein, 228 aa, Triticum aestivum
  misc_feature (170)..(170): Xaa can be any naturally occurring amino acid
  unsure (1)..(228): unsure at all Xaa locations
AYLGDSIEQVCTKKQAGTGPEFPGYRRPTRPVPLQPVGRLVLDRNVDNFFNENEQLAFGPGLVVPGIYYSDDKMLQCRVFAYADTQRYRLGPNYLMLPVNAPKCGFKNNHYDGAMNFMHRDEEVDYYPSRHAPLRHAEPASFPVPTRPVVGKREKTRIKKENDFVQPGEXYRSWAPDRQERFVRRFADALAHPKVSHELRVIWIDFLSKCDKSCGMKVANRLNVKPSM

SEQ ID NO: 39379 - protein, 309 aa, Cryptococcus neoformans var. neoformans JEC21
MSAPTSFKLNNGVEIPAVGLGTWQAPPGQVQAAVAHALKNGYRHLDCALIYQNEAEVGDGIKESGVPRSEIFITSKVWNTHQPNVADGLRQTLEALQTDYLDLYLIHWPVRLVPNESSGLLPVNPDGSRSVDRDWDQSETWRQMEEVYASGKVKAIGVANWSIPYLEELKKTWKIVPAVNQVELHPFLPQHKLVKYCRDLGILLEAYSPLGSTNAPLLSDPEINAIAEKYKTSPATICISYQVNRGIVVLPKSVSPKRIEDNLKTIPIEKEDMVKLDGMAAAGKAQRINTPKWGWDLGFDDWYGPVKQQ

SEQ ID NO: 39380 - protein, 409 aa, Streptomyces glaucescens
MSAPAPVVVTGLGIVAPNGTGTEEYWAATLAGKSGIDVIQRFDPHGYPVRVGGEVLAFDAAAHLPGRLLPQTDRMTQHALVAAEWALADAGLEPEKQDEYGLGVLTAAGAGGFEFGQREMQKLWGTGPERVSAYQSFAWFYAVNTGQISIRHGMRGHSSVFVTEQAGGLDAAAHAARLLRKGTLNTALTGGCEASLCPWGLVAQIPSGFLSEATDPHDAYLPFDARAAGYVPGEGGAMLVAERADSARERDAATVYGRIAGHASTFDARPGTGRPTGPARAIRLALEEARVAPEDVDVVYADAAGVPALDRAEAEALAEVFGPGAVPVTAPKTMTGRLYAGGAALDVATALLSIRDCVVPPTVGHRCARAGLGIDLVLHQPRELRVDTALVVARGMGGFNSALVVRRHG

SEQ ID NO: 39381 - protein, 205 aa, Cryptococcus neoformans var. neoformans JEC21
MTISSRSSLSVTLASVNLLSRFTRNEFNLESKSTIGVEFATRSINVDGKTVKAQIWDTAGQERYRAITSAYYRGAVGALLVYDIAKHQTYENVTRWLKELRDHADANIVIMLVGNKSDLKHLRAVSTDEAKQFATENGLSFIETSALDASNVESAFQNILTDIYRIVSSKSLESSGDVIKPSGGETILVAPTADDGGAKSGSKCC

SEQ ID NO: 39382 - protein, 309 aa, Triticum aestivum
  misc_feature (57)..(57): Xaa can be any naturally occurring amino acid
  unsure (1)..(309): unsure at all Xaa locations
MAAHLVPCTGAQIPSVGLGTWPSEPRVVGDPVYAPVKAGYRHIDGAQVSGNEKEIGXALKKVFDEGITSRQDLLITSKLWCTTHAPEDVPVALDGTLQDLQTDYVDLYLVHWPIRMKKGAGFSPENVIPADIPATWAAMEGLYDSGKARAIGVSNFSCKKLEELLAAARVPPAANQVECHPVWQQAKLRDLCASKGIHFSAYSPLGSPGTFKAFSVLEHPVVVSAAEKLGKTPAQVALRWGIQAGHSVLPKSTHEERIRANFDVFDWSIPSDLFASFSEIEQTRLIRGKFWTHPEGVFKSEEEIWDGEI

SEQ ID NO: 39383 - protein, 569 aa, Ashbya gossypii ATCC 10895
MTRRGRRRGRGRQALRQHHRYGSGGRGGVVEDIVNPALDAGALPHMLAEEDDAVSTMMMPFSPLLPHHLPLNSSTAGAGDHIVRRGTPVGVYGSATPELAGEHGSQLHSGLLSYNLRSSKLLTQKPSLVGRGPSKAGSSPPQLGGMPKKKLAAAKTKPAFVNKLWSMVNDPVNQSLIHWSHDGKSFIVTQREQFVHEILPKYFKHSNFASFVRQLNMYGWHKVQDVKSGSIQSNSDDRWEFANENFLRGREDLLANIIRQKSSAGSRDGAGMSVGAAHPNAVLVANGEEVDLGILFSELETVKYNQLAIAEDLKRISKDNELLWKENMLARERHQNQQQALEKIVKFLSSLYGSNTTRLLSDHVFREPQQAVAAPQGYGVHSTASMSPLHMADPLDAAPSPDVTATPVHRPRLLLKQRASPASDWPAQVQELRTSQVPSPVLQPLPARIHEIHPDAQLPADTPVLSPAVVDQASFFNDLQDNLDKQGESIQEIQDWIDKLSPASPFSRFDPRDYLAAPGFPAPPPDAADPISPRPAYKRPSNHREETRSEDYSPASKKQRQLSARDPPT

SEQ ID NO: 39384 - protein, 490 aa, Arabidopsis thaliana
MCSHDPLHFVVIPFMAQGHMIPLVDISRLLSQRQGVTVCIITTTQNVAKIKTSLSFSSLFATINIVEVKFLSQQTGLPEGCESLDMLASMGDMVKFFDAANSLEEQVEKAMEEMVQPRPSCIIGDMSLPFTSRLAKKFKIPKLIFHGFSCFSLMSIQVVRESGILKMIESNDEYFDLPGLPDKVEFTKPQVSVLQPVEGNMKESTAKIIEADNDSYGVIVNTFEELEVDYAREYRKARAGKVWCVGPVSLCNRLGLDKAKRGDKASIGQDQCLQWLDSQETGSVLYVCLGSLCNLPLAQLKELGLGLEASNKPFIWVIREWGKYGDLANWMQQSGFEERIKDRGLVIKGWAPQVFILSHASIGGFLTHCGWNSTLEGITAGVPLLTWPLFAEQFLNEKLVVQILKAGLKIGVEKLMKYGKEEEIGAMVSRECVRKAVDELMGDSEEAEERRRKVTELSDLANKALEKGGSSDSNITLLIQDIMEQSQNQF

SEQ ID NO: 39385 - protein, 966 aa, Flaveria brownii
MANKNVEKLASIDAQLRLLVPGKVSEDDKLIEYDALLLDKFLDILQDLHGEDLKEAVQECYELSAEYEGKHDPKKLEELGSVLTSLDPGDSIVIAKAFSHMLNLANLAEEVQIAYRRRIKLKRGDFADEANATTESDIEETFKRLVHKLNKSPEEVFDALKNQTVDLVLTAHPTQSVRRSLLQKHGRIRNCLAQLYAKDITPDDKQELDEALHREIQAAFRTDEIRRTPPTPQDEMRAGMSYFHETIWKGVPKFLRRVDTALKNIGINERVPYNAPLIQFSSWMGGDRDGNPRVTPEVTRDVCLLARMMASNMYFSQIEDLMFEMSMWRCNSEVRVRAEELYRTARKDVKHYIEFWKQVPPTEPYRVILGDVRDKLYNTIERSRHLLAHGMSDIPDEAVYTNVEQFLEPLELCYRSLCDSGDRVIADGSLLDFLRQVSTFGLSLVKLDIRQESDRHTDVLDAITQHLKIGSYREWSEEKRQEWLLAELSGKRPLFGSDLPKTEEVKDVLDTFNVIAELPSDCFGAYIISMATSPSDVLAVELLQRECHVKHPLRVVPLFEKLADLEAAPASMARLFSIDWYRNRIDGKQEVMIGYSDSGKDAGRFSAAWQLYKAQEEIIKVAKEFGVKLVIFHGRGGTVGRGGGPTHLALLSQPPDTIHGSLRVTVQGEVIEQSFGEEHLCFRTLQRFCAATLEHGMNPPISPRPEWRELMDQMAVVATEEYRSTVFKEPRFVEYFRLATPELEYGRMNIGSRPSKRKPSGGIESLRAIPWIFAWTQTRFHLPVWLGFGTAFKHAIKKDSKNLQMLQEMYKTWPFFRVTIDLVEMVFAKGDPGIAALNDKLLVSEDLWPFGESLRANYEETKDYLLKIAGHKDLLEGDPYLKQRIRLRDAYITTLNVCQAYTLKRIRDPNYHVTLRPHISKEYAAEPSKPADELIHLNPTSEYAPGLEDTLILTMKGIAAGMQNTG

SEQ ID NO: 39386 - protein, 180 aa, Oryza sativa
MTLSGGTLSSGITSGSSHGTRSSGSEGDIQLQVQMDLKRKRRKESNRESAKRSRLRKQQHLDDLTSQVNQLKMENQQLTTTLNMVTQSCAFAESQNSVLRTQMMELDSRLSALREIIFYMNNGNQSPSNPTIAATTYPSTTTMTAATTGHYDYYDVFTANAWGSGMQMMQQPIDQFLYQC

SEQ ID NO: 39387 - protein, 318 aa, Apodachlya brachynema
SKVGINGFGRIGRLVLRAAENNPLINVVAVNDPFIPTNYMEYMLKHDTVHGMFNGTVSHEGDHIIVNGRKVRVFGERDPQNIKWSDCDIEYVVESTGAFTTLEKASAHLKNGPKKVVISAPSADAPMFVMGVNHQLYTNNMNVVSNASCTTNCLAPLAKVVNDSFGIKEGLMTTVHAVTASQLSVDGPSKKDWRGGRAACFNIIPSSTGAAKAVGKVIPELNGKLTGMSFRVPTADVSVVDLTCRLNNKASYDEIKAAIKYASENELKGILGYTDAAVVSSDFITDSRSSIFDASAGIALTDDFVKLVSWYDNEWGYS

SEQ ID NO: 39388 - protein, 409 aa, Zea mays subsp. parviglumis
MQFALALDTNSGPHQIRSCEGDGIDRLEKLSIGGRKQEKALRNRCFGGRVAATTQCILTSDACPETLHSQTQSSRKNYADANRVSAIILGGGTGSQLFPLTSTRATPAVPVGGCYRLIDIPMSNCFNSGINKIFVMSQFNSTSLNRHIHRTYLEGGINFADGSVQVLAATQMPEEPAGWFQGTADSIRKFIWVLEDYYSHKSIDNIVILSGDQLYRMNYMELVQKHVEDDADITISCAPVDESRASKNGLVKIDHTGRVLQFFEKPKGADLNSMSVETNFLSYAIDDAQKYPYLASMGIYVFKKDALLDLLKSKYTQLHDFGSEILPRAVLDHSVQACIFTGYWEDVGTIKSFFDANLALTEQPSKFDFYDPKTPFFTAPRCLPPTQLDKCKMKYAFISDGCLLRECNI

SEQ ID NO: 39389 - protein, 966 aa, Flaveria pubescens
MANRNLEKLASIDAQLRLLVPGKVSEDDKLIEYDALLLDKFLDILQDLHGEDLKEAVQECYELSAEYEGKHDPKKLEELGSVLTSLDPGDSIVIAKAFSHMLNLANLAEEVQIAYRRRIKLKRGDFADEANATTESDIEETFKRLVHKLNKSPEEVFDALKNQTVDLVLTAHPTQSVRRSLLQKHGRIRNCLAQLYAKDITPDDKQELDEALHREIQAAFRTDEIRRTPPTPQDEMRAGMSYFHETIWKGVPKFLRRVDTALKNIGINERVPYNAPLIQFSSWMGGDRDGNPRVTPEVTRDVCLLARMMASNMYFSQIEDLMFEMSMWRCNSELRVRAEELYRTARRDVKHYIEFWKQVPPTEPYRVILGDVRDKLYNTRERSRHLLAHGMSDIPDEAVYTNVEQFLEPLELCYRSLCDCGDRVIADGSLLDFLRQVSTFGLSLVKLDIRQESDRHTDVLDAITQHLEIGSYREWSEEKRQEWLLAELSGKRPLFGSDLPKTEEVKDVLDTFNVLAELPSDCFGAYIISMATSPSDVLAVELLQRECHVKHPLRVVPLFEKLADLEAAPAAMARLFSIDWYRNRIDGKQEVMIGYSDSGKDAGRFSAAWQLYKAQEEIIKVAKEFGVKLVIFHGRGGTVGRGGGPTHLALLSQPPDTIHGSLRVTVQGEVIEQSFGEEHLCFRTLQRFCAATLEHGMNPPISPRPEWRELMDQMAVVATEEYRSIVFKEPRFVEYFRLATPELEYGRMNIGSRPSKRKPSGGIESLRAIPWIFAWTQTRFHLPVWLGFGTAFKHAIKKDSKNLQMLQEMYKTWPFFRVTIDLVEMVFAKGDPGIAALNDKLLVSEDLWPFGESLRANYEETKDYLLKIAGHKDLLEGDPYLKQRIRLRDSYITTLNVCQAYTLKRIRDPNYHVTLRPHISKEYAAEPSKPADELIHLNPTSEYAPGLEDTLILTMKGIAAGMQNTG

SEQ ID NO: 39390 - protein, 191 aa, Saccharomyces cerevisiae
MQTLKCVVVGDGAVGKTCLLISYTTNQFPADYVPTVFDNYAVTVMIGDEPYTLGLFDTAGQEDYDRLRPLSYPSTDVFLVCFSVISPPSFENVKEKWFPEVHHHCPGVPCLVVGTQIDLRDDKVIIEKLQRQRLRPITSEQGSRLARELKAVKYVECSALTQRGLKNVFDEAIVAALEPPVIKKSKKCTIL

SEQ ID NO: 39391 - protein, 321 aa, Isochrysis galbana
SKVGINGFGRIGRQVVRIAMDRDAFVLKHINSPMTPEYMKYLLEHDTVHGRFPGTCEVNKDGLVINGLPVSLSSTRDPTEIPWGKVGVEYVCESTGAFLSTPDCLKHIAGGAKKVIISAPAKDAETPTIVVGVNTDTYDPETMNVVSCASCTTNGLAPLVKTINDKFGIKQGLMTTVHAATASQVVVDSSMKGADWRAGRAASANIIPSSTGAAKAVAKCYPVMKGKLTGMAFRVPTVDVSVVDLTCELETPCTYDEIKAEVKLASETYAKGIVGYTEDQVVSSDFVGETCSTVFDAGAGIQLTPTFVKLVSWYDNEWGYS

SEQ ID NO: 39392 - protein, 1319 aa, Neurospora crassa
MPFITPGQLAFSAMQFLPVPILVLDSLKTVVLANESMGRLLGMPSDATGEGDDLSSTMDQLRGQTLSQVGIDLIQDGMPVWIAWEHFLDQIALEMGVGNSGGKEILKSVLQTDPDGDATPRQAELPPSASTSSPRSRSTSAQSGDGVCDGDAGNTTCRPSPNAVVDVVIVKRDIARSTYHTRARSESSTFHAQAKMIISVWQLSPQQTFFTLTFTNTDSKYVPPVGAKKLAGRRDVLDAAEKKYPYSINDPPSLTSSRDSRSRSPSFPLSPSAVAMSSSPFPPLGPPSHSSITSAPSMLQKITVMKDALLDKTQTPIIAMWKDGSVILPNKPARRLSYPDPVQGAPHEGFNLLSQWRMWTDDFSRQLETDEYPISLMIKSETPFESFRVGMLGPDDERLIFDVEGAVIRDEITGELLAGVITCRDITRIEHEISQIKAADEERFRLICETMPQLVWTAGPDGAHDFYNSRWYSYTGLSVEASLGGGWRTAFHPDDLAEADKRWQNSTRTGEPYVIEYRCRSKDGEWRWFLGRALPLKNKQTGEIEKWFGTCTDVHETMEAKLEAKRTRQQLRSVIAHSRMTMFAVDPNRKVTLLEGSLIWDALSPECGSSSWFIGKDVYEVFNNINQQLPDGQTPAFLQPLESILGGKSPVELQDHKFGRWYRTGFQPILRRDPLTGNSTEDFIEGVMGFIMDVTELKDRERDIEAQALEKRQLLANEAAAKEASRLKSQFLANMSHEIRTPITGVIGMAELLLDVELDAEQRELTENIFRSANALLTVINDILDFSKIESGRLDIEEVQFSLAVVIQEVGKMLSFTAERKSLAFNYEICSDIGIDLVVMGDPGRVRQIITNLATNSIKFTHEGHVKLHVSVEQETDDTIEVKFVIQDTGIGIEEEVLKRLFQPFSQGDPSTARKFGGTGLGLTISKNLLELMKGRMALASKKDEGTTATFWIPFKKPQKAQSITGPLSDRLQSETSVSCNCPAPADQESGALSGEQRSAWRQSSTSLSPTTSQEELSMPDRSKIFILVVEDNEINQQIAIRTIRKLGFQVAAAWNGKEALEYLSKASTGKTRKPDIILMDVQMPLIDGYLCTHLLRHHAPYRSYVRDVPIVAMTASAIQGDKEKCKRAGMDDYLSKPVKRTTLERMLLRWCTTKREELSPITSQCTESGEHCQSAGIPAVGLNEEPSELDLNAYDNVDDHEGSNLATPMGPGRVAEGMSPGGGAEIEQSPTAGYFSSGSGSGHGVPDATKPTGDPGEQTGLGQAEQLLDASSQHYPSQPSVADMTTSPASIERREGEALTEENLGKLQEEQNEELQSI

SEQ ID NO: 39393 - protein, 321 aa, Bacillus anthracis str. A2012
MAVNEKVELATFAGGCFWCMVSPFEEMVGIIKVVSGYTGGHKENPTYKEVCSETTGHYEAVQITFDANKMPYEELLNIYWRQIDPTDVGGQFHDRGQSYETVIFYHNEEQHKKAEASKEELAKCGRFSKPIATKILPAATFYPAEEYHQGYHKKNTFRYELYRKGSGRDAFIKQHWPKDNAHLKEKLNDMQFYVTQENGTEPPFRNEYWNHKEEGLYVDIVSGEPLFTSIDKFDSGCGWPSFTKPVMSASVKEKMDVSHNMTRTEVRSKEGDSHLGHVFPDGPGPNGLRYCINSAALRFIPKEELEKEGYGDFLMLFGNKK

SEQ ID NO: 39394 - protein, 1551 aa, Kluyveromyces lactis NRRL Y-1140
MSQNNDSRDEAYVREQFQRYTTKMASNKNSNTDSKCRSTSHLNSLASISSDTSNETLKGNLSAASPTFSSDSTLSTKKLPVLQTLPTSLPNGQHQQGQLFPASSSSSSAISSRKPSVSGSFGTQTPTTAQLKTITSPKLSGALSTRSRSNSLTSSKLFALNQSNDSPSSTSVYPVPPNVASLNSQTASSMSVSTSADQYFPAQQNGSTTTVNLTPTLSSPSIRSLNNSTTSTTKSFKPLQKQYVLNEQLYLSSMKNKKADDYYTRGITSSGNEDDDDFRVDGENDDVDNDLSKLNNGLGSAIFGNNIATTTDKGFHSIDDDELVLMNDKILLERMEWLRSVEPNNPLIENSLNLLNKTGGSTDSLESFSNIETQLALEQLSNNHLVRERLEWQTMLSSVLNGDIVKSEKTKLAKRKPDEILLNHNDLIWLELKAWLNGRTVEDQRKSLEYSKTTADEVFEEILNYKNEKEENPEVVIEEAKILLNKYYKVVGYWKNLPNMNLEKPVTKTSNFVSRIEALNSLINSYEGLQYEIEALKQWTQNDDLDVTFTKDSLDTEGIFKNDRSFAEQIMKEKDIEGIFQKKIFFKHAPWMFKSKLVFLKQQNSIHEMRLPLPVDKLHSLLTFPLRLIQEIISIRLEYARKLKKPTMMMIDQMIDDFSTYIKLSVQIKHTLMEYRSGWSLKVEISDAFDAKVVEAIEFLFKLLHLKLIDSSKNSFKTFKEPDILFAHWENLKNFGCYISGASKVIAQGFVNITIRLLNRLHLYIMEEQRNSVDLVTSDDARKWVVEVIENVGAFKRKTNRFSNVLTKAFQNSVLYNIKDHSMLLERLRNSGHFLIYTGGILEQNGIYLIASEELLGCSDDEIMDIIKSTKIGSDLIPKVEINNSLTIYNPPEDLTLPEAMFVQKERRNGVSYYHLKQDDLTQRVGIRGKGGSSTAPEEEGEELVQLENKLKMLGYVLVFCPTKPMVWNGEMYNLTSEEPLTMEEFGLSVEEDVIVMLNQGSTYALDYQVDRFQHFAGDAISIREKKCAINSIETALQRINKSYFRMTYIVLKNFGSVQKNVTLQTNESVFFNIAYLFVKDFAKNFLLLNVATPETKAIIIRLMIQISIDWLTFVLDECDPANPETFRWCVPAMEFAMRMTNGWNILGIEEKEFKLLKEKIARCMSLLISHFDITGARSREAERIDAQQTRPNFDIDDADDDMILAVNSEMRMNAITDMEKVVKVKRHYSVGKVIDDTDNQSKLLKSLASSISNLSIRWQKRSFIGSGSFGTVYSAVNLDTGDILAVKEIKIQDAKSMKQIFPSLKEEMRVMEILNHPNIVQYYGVEVHRDKVNIFMEFCEGSSLASLLEHGRIEDEMVTQVYTLQLLEGLACLHQSGVVHRDIKPENILLDRNGVIKYVDFGAAKLIAKNGSKRISLDANNKSTGGKDMIGTPMYMAPETVTGQGHGKFGSDDIWSLGCVVLEMVTGRRPWANLDNEWAIMYHVAAGHLPQFPTKSEISSAGRKFISRCLIQDANKRATAMELLLDPWISQIRNIAFGGNAESFNNETHN

SEQ ID NO: 39395 - protein, 321 aa, Isochrysis galbana
SKVGINGFGRIGRLVCKAACMKDGATVTAVNDPFCDVEYAAYLFKYDSTHGRYKGTVTFDTASSTLIVDGQKIKFYACRNPNEVPWGEAGADIVCESTGIFTVIEKASMHLQGGAKKVIISAPSADAPMFVMGVNHTSYTKDINILSNASCTTNCLAPLAKIINDEYGIVKGLMTTVHATTATQKTVDGPSGKDWRGGRGAGQNIIPSSTGAAKAVGKVIPALNGKLTGMAFRVPTPDVSVVDLTCVLGKPASYAEICEFIKKSCEKPEYKGIMAYTDEEVVSNDFISDPASSTFDAKAGIGLDDTFVKLVSWYDNEWGYS

SEQ ID NO: 39396 - protein, 555 aa, Bacillus coagulans
MTEWWKKAVVYQIYPRSFYDTNGDGIGDLRGIMDKLDYLKTLGIDCIWISPVYDSPQDDNGYDIRDYRKIDKMFGTNEDMDRLLDEAHARGIKIVMDLVVNHTSDEHAWFVESRKSKDNPYRDFYFWKDPKPDGTPPNNWGSMFSGSAWEYDETTGQYYLHYFSKKQPDLNWENEKVRKEIYDMMKFWMDKGVDGWRMDVIGSISKFLDFPDYELPEGQKYGIGKYHANGPRLHAFIQEMNREVLSKYDCMTVGEAIGSDVEIARKYTGPDRHELNMIFNFEHMDVDTKPGSPAGKWALKPFDLVELKQILSRWQYELADTGWNALYFENHDQARVVSRWGNDTTYRAECAKAFATILHGLKGTPFIYQGEEIGMVNADLELEEYDDIEIRNAYQELVMENQIMSKDEFLTAVRKKGRDNARTPMQWDGSFNAGFTTGTPWLKVNSRYSEINVAKALQEPDSIFYYYQSLIKLRHSYDVFTDGRYELLMPDHPHLYVYTRENESEKLLVAANLSENTVSFDQPDDNWKLLLGNYEDTGTSTLFRPYEAAIYYLEK

SEQ ID NO: 39397 - protein, 152 aa, Oryza sativa (japonica cultivar-group)
WGGEGAGQVLPIANISRIMKKAIPANGKIAKDAKETVQECVSEFISFITSEASDKCQREKRKTINGDDLLWAMATLGFEDYIEPLKVYLQKYREMEGDSKLTAKAGDGSVKKDVLGSHGGSSSSAQGMGQQAAYNQGMGYMQPQYHNGDVSN

SEQ ID NO: 39398 - protein, 319 aa, Mallomonas rasilis
SKVGINGFGRIGRLSLRAVKGHPNVKVVAINDPFIPLDYMKYMFYYDSVHGKYDGTVTIDNGKLIVDGTPITVSNEREPEKIKWGDAGAEIVLESTGKFLEEAGAAKHFVGGAKKVVMSAPSKDATPMFVMGVNHFEYKGQKIVSNASCTTNCLGPLAKVINDNFGIQEGLMTTVHAATATQPTVDGPSVKDWRGGRGAVGGNIIPSSTGAAKAVGAVIPALKGKLTGMAFRVPTANVSVVDLTCVLTKGAKYSDIKAAIKAASEGPMKGILGYTEDSVVSTDFISDPRSSIFDAGAGIALNDKFVKLVSWYDNEWGYS

SEQ ID NO: 39399 - protein, 409 aa, Zea mays subsp. mexicana
MQFALALDTNSGPHQIRSCEGDGIDRLEKLSIGGRKQEKALRNRCFGGRVATTTQCILTSDACPETLHSQTQSSRKNYADANRVSAIILGGGTGSQLFPLTSTRATPAVPVGGCYRLIDIPMSNCFNSGINKIFVMSQFNSTSLNRHIHRTYLEGGINFADGSVQVLAATQMPEEPAGWFQGTADSIRKFIWVLEDYYSHKSIDNIVILSGDQLYRMNYMELVQKHVEDDADITISCAPVDESRASKNGLVKIDHTGRVLQFFEKPKGADLNSMRVETNFLSYAIDDAQKYPYLASMGIYVFKKDALLDLLKSKYTQLHDFGSEILPRAVLDHSVQACIFTGYWEDVGTIKSFFDANLALTEQPSKFDFYDPKTPFFTAPRCLPPTQLDKCKMKYAFISDGCLLRECNI

SEQ ID NO: 39400 - protein, 422 aa, Kluyveromyces lactis NRRL Y-1140
MSALKDFSFKEDEDGELPVLVTGNEPDLKKILDTYKPDGGKHIVSDKKIALANRQLDEDFDRQQRIPVTIITGYLGAGKSTLLEQIALKGSNKRLAVILNEFGDSSEIEKSITIKNKGEVYEEWLDLGNGCLCCSLKDVGVKAIEDMVARSPGKIDYILLETSGIADPGPIAKMFWQDKGLNSNVYIDGIITVLDSEHIITCLDDISPTAHWHGEKVTVDDESKTTIAHLQIAMADAILVNKSDKIEGDESKKYDLENVVRSINTVAPIYYTKFGDINLDLVLDLNAFESTKFLQKDYTTTFHDHRISTITLAFPFFQTEDQLDTFIKDFLQVLLWKDFGVDTGSGLQSAHHENPDFEVHRTKGVIMVGNECKVIQGVRDTYDIIPGEKLPNITENKIVLIGKHLDENYIRHLLNKAISSQK

SEQ ID NO: 39401 - protein, 301 aa, Glycine max
  misc_feature (86)..(86): Xaa can be any naturally occurring amino acid
  misc_feature (91)..(91): Xaa can be any naturally occurring amino acid
  misc_feature (96)..(96): Xaa can be any naturally occurring amino acid
  misc_feature (108)..(108): Xaa can be any naturally occurring amino acid
  misc_feature (114)..(114): Xaa can be any naturally occurring amino acid
  misc_feature (122)..(122): Xaa can be any naturally occurring amino acid
  misc_feature (131)..(131): Xaa can be any naturally occurring amino acid
  misc_feature (135)..(136): Xaa can be any naturally occurring amino acid
  misc_feature (141)..(141): Xaa can be any naturally occurring amino acid
  misc_feature (145)..(145): Xaa can be any naturally occurring amino acid
  misc_feature (147)..(147): Xaa can be any naturally occurring amino acid
  misc_feature (151)..(152): Xaa can be any naturally occurring amino acid
  misc_feature (154)..(154): Xaa can be any naturally occurring amino acid
  misc_feature (156)..(156): Xaa can be any naturally occurring amino acid
  misc_feature (160)..(160): Xaa can be any naturally occurring amino acid
  misc_feature (163)..(163): Xaa can be any naturally occurring amino acid
  misc_feature (165)..(165): Xaa can be any naturally occurring amino acid
  misc_feature (167)..(167): Xaa can be any naturally occurring amino acid
  misc_feature (170)..(170): Xaa can be any naturally occurring amino acid
  misc_feature (175)..(175): Xaa can be any naturally occurring amino acid
  misc_feature (183)..(183): Xaa can be any naturally occurring amino acid
  misc_feature (190)..(190): Xaa can be any naturally occurring amino acid
  misc_feature (200)..(200): Xaa can be any naturally occurring amino acid
  unsure (1)..(301): unsure at all Xaa locations
MALALKSSCFLQLKKPEAGFNVCFSSKKAIISVKRHTPVAAIRTMEAVGLSATFTRLKKEGKVAFIPYVTAGDPDLSTTAEALKVXDSCGXSDIIXELGVPYSDPFGXMACIQXAATRSLTXGTNLNAIIXMFEXXVPNRXSMPXTXTIHXXRXLXIMVXIRXGXPXLEXPMPLXERNLSQAXTWNETGXPNPPFSNRNXIVDVAEGFVYLVSSVGVTGARASVSGSVQSLLQEIKEATTKPVAVGFGISKPEHVKQVAGWGADGVIVGSAIVKVLGEAKSPQEGLKELEVLTRSLKAALP

SEQ ID NO: 39402 - protein, 488 aa, Kineococcus radiotolerans SRS30216
MSTTQHEQDLVRAVPTGLFVGGGWREAEGGRTVDVEDPATGQVLVAVSDASVADGTAALDAAVAAAPAWARTPTRQRAEVLRRAFELITARADDFALLMTLEMGKPLAEARGEVAYGAEFFRWFSEEAPRIAGRYAQNPAGGSRLLTLKQPVGPVLAILPWNFPLAMGTRKIAPALAAGCTIVVKPATQTPLTTLLLAQVLAEAGVPDGVVNVVTTTSTAEVVEPLVRDPRLRKLTFTGSTPVGKKLVAQSAERLLRVSMELGGNAPFLVFDDADLDAAVEGAVAAKMRNTGEACTAANRFYVQRPVAEEFSRRLGERLGAMVVGRGTEDGVQVGPLIDARARDGVARRVSEAVDAGAQVLVGGSPVGERGYFYAPTVLTGVPAGSRLLTEETFGPVAPVVVFDEEAEGVALANDTEYGLVGYAFTRGLDRGFRVAEALETGMVGLNAGVISNAAAPFGGVKASGFGREGGAEGIEEYLETKYVGFPL

SEQ ID NO: 39403 - protein, 525 aa, Triticum aestivum
  misc_feature (182)..(182): Xaa can be any naturally occurring amino acid
  unsure (1)..(525): unsure at all Xaa locations
MSEVKPEEISHSAMEQLQGFEYCIDSNPPWGEAIILGFQHYILALGTAVMIPAVLVPMMGGNDGDRVRVVQTLLFVTGINTLLQSLFGTRLPTVIGGSYAFVIPVMAIVQDSSLAAIPDDHERFLQSMRAIQGALIVSSSIQIILGYSQLWGIFSRFFSPLGMAPVVALLGFGLFERGFPVXVGRCVEVGLPMLILFVVLSQYLKNVQIREIPILERFSLFICIALVWAYAQLLTPGGAYNHSTEVTQINCRTDRANLISSAPWIKIPYPLQWGAPTFSAGQSFGMVSAVLVSLIESTASYSAAARLASATPPPAHILSRGIGWQGIGILLCGLFGTGTGSTVSVENVGLLGSTRIGSRRVIQICAGFMIFFSMLGKFGALFASIPFTIFAAVYCVLFGLVAAVGLSFLQFTNMNSMRNLFIVGVSIFLGLSVPEYFFRYSMAAQRGPAHTKAGWFNDYINTIFSSPPTVGLMVAVFLDNTLEVKDAGRDRGMPWWVPFRSFKGDSRNEEFYSLPFNLNRFFPPS

SEQ ID NO: 39404 - protein, 663 aa, Zymomonas mobilis subsp. mobilis ZM4
MSVPYRHLANAIRALSMDAIQAANSGHPGLPMGMADVATILFGRYLKFNPKDPTWPDRDRFVLSGGHGCMLLYSLLYLTGYDEPSLEDIKNFRQLGSRCAGHPENTLLSGVEATTGPLGQGIGMAAGMALAERHLKAQFGEDIVNHRVWTIAGDGCLMEGINHEVVGIAARLGLGNLNVLWDDNGITIDGDVTISRKEDVMARHRACGWHVVACDGHNTESIIKAMDEAIADPRPSLIACRTTIGYGSPGKQGTAAAHGTPLGEEEILLTREALEWTSPDFTVPHHILKKWKELGTRHLDEYHAWKERLEANKDKDEFLRITKGQLPQDFDLTDHKNNIISSAMPMATRKASEMALSVLIRQLPELVGGSADLTPSNNTKPKGMTTLSSADYGGRYIHYGIREFGMATVMNGLALHGGVIPYGGTFLAFSDYSRPAIRLSALQKTRVVYVMTHDSIGVGEDGPTHQPIEQVMSLRLIPNLRVFRPADSVETAECWELALKNIDGPSLIVLSRQNLPLLRESADENLSARGAYRLRSAVAKRRVILMATGSEVSLAVEVADLLETAGFGADVVSMPSWTLFDQQPESYRNDVLPDQPQSTILRVSIEAGTTIGWERYTGINGLRYGIDVFGASAPANDLYAHFGLTAVGITNKVLAAIAGKSAR

SEQ ID NO: 39405 - protein, 549 aa, Zea mays
MVSSQPSSLTAILAQGPNHCPVKILLPMGPPDVVSSDNVEYDFSDVFGSTPVQTPTNLCGFGPESPAPTVESNEEFYSDPVVIINRSHSLVGPTSLVSRSLRLSKLSLGKNEGSSELVKCLSEEKEGDQGQLSDEDLGNAMTGDGGIGLDDLEILKLVGQGAFGKVFQVRKKNTSEIYAMKVMRKDRILEKNHSEYMKAEREILTKVDHPFIVQLRYSFQTKYRLYLVLDFINGGHLFFQLYKQGLFREELARIYTAEIVSAVAHLHANGIMHRDLKPENILLDADGHAMLTDFGLAKEFCENTRSNSMCGTLEYMAPEIVLGRGHDKAADWWSVGILLFEMLTGKPPFVGNREKVQQKIIKDKLKLPSFLSSEAHSLLRGLLHKEPNKRLGSCPGGSNEIKNHKWFKPINWRKLEARQIQPSFRPNVAGLTCIANFDECWTKTPVLDSPVSTPAGGGHSNFAGFTYVRPAPILEPRAGCVHLLKDPTPNPRPSSPAAAGARARGRWTALPAHRTSASPAFGSASSRTTTPSSNSATPTLAWPTPSAAS

SEQ ID NO: 39406 - protein, 412 aa, Chlorobium tepidum TLS
MPGKNVEVKPQTVEKTKDIFKKCVDFTLADEVKALGVYPFFRPIDDSEGPVVSFEGRKLVMAGSNNYLGLTNDPNVKQASIDAIKKYGTSCSGSRYMTGTVRLHIELEEQLADFFEKECCLLFSTGYQTGQGIIPTLVQRGEYVVADRDNHASLVAASIMAIGGGANQVRYRHNDMADLERVLQNIPESAGKLIVSDGVFSVSGEIVDLPALVALAKKYNARIVIDDAHAVGVIGKGGRGTPSEFGLVNEVDLIMGTFSKTFGSLGGYVVGERSVINYIKHTASSLIFSASPTPASVAAVLATLKIIREQPQLTERLIANTDYVRQGLLKAGFTLMPSRTAIVTVLIADQMKTLYFWKKLFDAGVYVNAFIRPGVMPGHEALRTSFMATHEKEHLDKVITEFCSIGRELGVI

SEQ ID NO: 39407 - protein, 490 aa, Candida albicans SC5314
MSIRLYSKQSLNTFKKATFIPLTTTATTAITTTQFRYFHDTPNKQNVTVNNMMPRVTKPTPTNTFTTSPQLPSTEYLKAFNNKELISFFMIGLATLNKPILQLCIKLFPYVPMSIIKALVYRIYCGGETIDQVKKTGLRLHERGINNMMISLTIEACDGNDNVDPKYIVEETAKSIETILVPHTVAMIEQATDDINDIPPGYVALKPTGFAKDAANVLKNYNTTMIKEFDELVDKAIIVCQKIYDSNKELSQKYPERVSPFVVGVIDAEKHELQEGVYELQRRLYQKFNKLNQPISIVGTLQMYLSDSANLLTKEENLANENNYRLGLKLVRGAYIHSEKNRDIVIHKTKQDTDNNYNSGISYCIDSILNQNQNQNGSTIGHLVVASHNAESMRLASDKVYNPMNESNKNKTNVVLGQLLGMADNVTYDLITNNKIGNVIKYVPWGPPLETKEYLLRRLEENGDAVKNDNGWPLVKASFKMLTKRLFGSG

SEQ ID NO: 39408 - protein, 169 aa, Kalanchoe fedtschenkoi
SDSGKDAGRLSAAWQLYKAQEELIEVAKKHGVKLTMFHGRGGTVGRGGGPTHLAILSQPADTIQGSLRVTIQGEVIERSFGEAQLCFKTLQRYTAATLEHGMIPPLTPKPEWRALMDDMAVVATERYRSIVFREPRFVEYFRLATPELEYGRMNIGSRPSKRKPSGGHR

SEQ ID NO: 39409 - protein, 183 aa, Pseudomonas syringae pv. phaseolicola 1448A
MNIRFVSIPLLLLAMSGAAMAADCPPLLQGELPKLRAKENIDLCKRFAGKPLVVVNTASFCGFAPQFKGLEELSQRYKGQGLEVLGVPSNDFKQEAKDGEETAKVCYVNYGVTFTMTEPQAVRGDDATHLFKVLAEQSSAPRWNFYKYVVDRQGKVIANFSSMTKPDDPELIAAIEKAIASKP

SEQ ID NO: 39410 - protein, 401 aa, Bordetella parapertussis 12822
MRRAAIVSPLRTPVGAFGGALKAVPVEELGAAVARAIVQRTGLDPARIDDVVFAQSYASGETPCTGRWVALQAGFPIEVAGMQLDRRCGGGVQTVATAAMMVQTGAADVVMAGGVESMSNVEHYTTDMRWGKRAGSVTLHDRLDRGRERSQPESRFGRISGMIETAETLAREYGISREQADLFAARSHQRAAAAQAAGHFDAEIVPISVAQRKGEPLLVGQDEGVRGETSAESLGRLRTIMKEGVVTAGNACQQNDAAAACLIVAEDRLEELGLEPMGWLVGWAAAGCDPARMGIGPVPAVSKVLARTGLGFDQMDLIELNEAFACQALACVKGWGSSMDALEDRLNVNGSGISLGHPVGATGVRIMTTLLHEMQRRKARYGLETMCIGGGQGIAMIVERA

SEQ ID NO: 39411 - protein, 149 aa, Oryza sativa (japonica cultivar-group)
MSLVRRSNVFDPFADFWDPFDGVLRSLVPATSDRDTAAFANARVDWKETPESHVFKADLPGVKKEEVKVEVEEGNVLVISGQRSKEKEDKNDKWHRVERSSGQFMRRFRLPENAKVDQVKASMENGVLTVTVPKAEVNKPEVKAIEISG

SEQ ID NO: 39412 - protein, 325 aa, Mallomonas rasilis
SKVGINGFGRIGRLVARIMVNDPRTTLKAINTGADATYMAYQFKYDTVHGQWKGSLEVEGDDLIINGQRIKTVHARDPKEIGWGKLGVEYLCESTGVFLTADSAKPHVDGGVKKVIFSAPAKDKSPTIVMGVNDKDYTSDMTYVSCASCTTNGLAPMVKAIHDNFGIEEALMTTVHAMTSTQMVVDGSSKKDWRGGRAASANIIPSSTGAAKAVTAVIPSLKGKLTGMAFRVPVPDVSVVDLTCRLARDTTYEEICNKVKELSQGEMKGILGYTNEDLVSQDFVSSPISSVFDAKAGIMLNPRFVKLVAWYDNEWGYSKGEFQHT

SEQ ID NO: 39413 - protein, 580 aa, ASPERGILLUS NIDULANS FGSC A4
MPEPSLSSSHHGSHHGSQRDEAILSQHLDPQYTAALHEEAILPDNGDGTASNATDVSEPQSSLLLQGGDMHRDLYRLDAKTKRARMDKRAATFSAAPRGSDLFEEAVAPLEPGSFRRNFIRQQGQDHPALHRSFLEYLDLYGNFAGEDLEESEEETEQGEEETQQEAERRPLLGTQRHRRSRSYRPGDASNVKTFFTLLKAFIGTGIIFLPKAFRNGGILFSSVALVTVALISTLCFHLLLECRRRYGGGYGDLGEQIAGSKLRSLILSSVAISQIGFVCACIIFTAENLRAFFVAIMPETVHSLSTLRLIVLQLVVLIPLTMIRNISKLGPIALLADAFILFGLGYIYCYDIASLASRGLAPRVDLFNSDSFTLTIGSCIFTFEGIGLILPIQSSMKKPQCFDNLLYTVMFIITVLFTGVGALSYATFGADTKTEIISNLPQNSRLVNTVQFLYSIAILVGTPIQLFPPVRIIEGNLFGSASGKRDPGIKWKKNSFRTVAVLACGVIAALGAGDLDKFVSLIGSFACVPLVYIYPAYLHWKGVAESPWAQRGDIAMMVLGFGFMVYTTAATVSVWVADS

SEQ ID NO: 39414 - protein, 433 aa, Bacillus anthracis str. A2012
MMNVTTDVQSTTEETKEKRYKTLFGSALGYAAEGLDMLLLSFVLVYILKEFHLSPVEGGNLTLATTIGMLIGSYLFGFIADLFGRIRTMAFTILLFSLATALIYFATDYWQLLILRFLVGMGVGGEFGIGMAIVTETWSKEMRAKATSVVALGWQFGVLIASLLPAFIVPHFGWRAVFLFGLIPALLAVYVRKSLSEPKIWEQKQRYKKELLQKEAEGNLTTTEAAQLKQMKKFPLRKLFANKKVTITTIGLIIMSFIQNFGYYGIFTWMPTILANKYNYTLAKASGWMFISTIGMLIGIATFGILADKIGRRKTFTIYYVGGTIYCLIYFFLFTDSTLLLWGSALLGFFANGMMGGFGAVLAENYPAEARSTAENFIFGTGRGLAGFGPVIIGLLAAGGNLMGALSLIFIIYPIGLVTMLLCVPETKDKVLE

SEQ ID NO: 39415 - protein, 324 aa, Pavlova lutheri
SKVGINGFGRIGRLVFRIAMARDNMVVKHINSPMAPEYMKYLLSYDSAHGRYKGTVEVDAKGSLIVDGLEVTLTATRDPTEIPWGKRDVAYVCESTGAFTSTESCMLHVTSANPAKKVVISAPAKDAETPTLVVGVNAAEDYKTSMNVVSCASCTTNGLAPLVKHIDQTYGIAEGLMTTVHATTASQLTVDGSMKGSDWRAGRAAAANIIPSSTGAAKAVAKCYPASKGKLTGMAFRVPTIDVSVVDLTCRLVKSTTYDELKASVKAASEGSMKGILGYTEDQVVSQDFVGSEMSTTFDAGAGIMLNPNFVKLISWYDNEWGYS

SEQ ID NO: 39416 - protein, 409 aa, Zea mays subsp. mexicana
MQFALALDTNSGPHQIRSCEGDGIDRLEKLSIGGRKQEKALRNRCFGGRVAATTQCILTSDACPETLHSQTQSSRKNYADANRVSAIILGGGTGSQLFPLTSTRATPAVPVGGCYRLIDIPMSNCFNSGINKIFVMSQFNSTSLNRHIHRTYLEGGINFADGSVQVLAATQMPEEPAGWFQGTADSIRKFIWVLEDYYSHKSIDNIVILSGDQLYRMNYMELVQKHVEDDADITISCAPVDESRASKNGLVKIDHTGRVLQFFEKPKGADLNSMRVETNFLSYAIDDAQKYPYLASMGIYVFKKDALLDLLKSKYTQSHDFGSEILPRAVLDHSVQACIFTGYWEDVGTIKSFFDANLALTEQPSKFDFYDPKTPFFTAPRCLPPTQLDKCKMKYAFISDGCLLRECNI

SEQ ID NO: 39417 - protein, 602 aa, Mesorhizobium loti MAFF303099
MAGYNFVDHKFDVVVVGAGGAGLRATLGMAEQGLRTACITKVFPTRSHTVAAQGGIAASLSNMGPDSWQWHMYDTVKGSDWLGDVDAMEYLVREAPAAVYELEHYGVPFSRTEEGKIYQRPFGGHMMNYGEGPPVQRTCAAADRTGHAILHTLYGQSLKNNAQFFIEYFALDLIMEPDGTCTGVVAWNLDDGTIHRFSAKMVVLATGGYGRAYFSATSAHTCTGDGGGMASRAGFPLQDMEFVQFHPTGIYGAGCLITEGARGEGGYLVNSEGERFMERYAPSAKDLASRDVVSRCMTLEIREGRGVGKKKDHIFLHLDHLDPAVLHERLPGISESAKIFAGVDLTKEPIPVLPTVHYNMGGVPTNYWGEVLNPTTRSPDKVSPGLMAVGEAGCASVHGANRLGSNSLIDLVVFGRAAAIRAGQVIDRKSAIPSPNEASVEKIMDRFDGLRHANGSTPTAVLREKMQKAMQEDAAVFRTQESLENGCKRISQIWGELKDIKVFDRSMIWNSDLVETLELENLMANAITTVYSAEARKESRGAHAREDFSARDDAAWRKHTLARVSEDGKVTLSYRPVHTEPLLAEKDGGISLAKIAPKARVY

SEQ ID NO: 39418 - protein, 532 aa, Pediococcus pentosaceus ATCC 25745
MTKYIFVTGGVVSSLGKGIVAASLGRLLKNRGLKVTIQKFDPYINVDPGTMSPYQHGEVFVTDDGTETDLDLGHYERFIDINLNKYSNVTTGKIYSEVLRKERHGDYLGATVQVIPHITDAIKEKIMRAGKVTDSDIVITEIGGTVGDIESLPFLEAIRQMKSQAGSENVFYIHTTLVPYLKAAGEMKTKPTQHSVKELRGLGIQPNMLVVRTEEDITDGMRSKIAAFCDVEPEAVIESQDVASLYEIPLNLKAQKMDDIVMDHFGLQAPQADMSKWEDLVDHVNNRLNHTINIALVGKYVALQDAYISVNEALKHAGYVVDADIKITKIDSEKLTKENVAEQLAGQDGIIVPGGFGDRGIEGMIHSIQYARENDVPFLGICLGMQMASVEFARNVLGYQDANSAEMDPATKHNIIDLMADQEGVKDMGGTQRLGLYPCKLKEGSVAAAAYNNQEMIEERHRHRFEFNNDYRAEMEAKGLVFSGTSPDNRLVEVIELPEKKFFVAAQYHPEFLSRPQRPEGLFKAFIAAANK

SEQ ID NO: 39419 - protein, 273 aa, Pavlova lutheri
THGRFPGTVECDEANNILIVNGKKIKFYAAKSPNEVPWGEAGAHIVCESTGIFTVIDKASAHLQGGAKKVIISAPSADAPMFVMGVNHTSYTKDVNILSNASCTTNCLAPLAKIIHEEFGIVEGLMTTVHATTATQKTVDGPSGKDWRGGRGAGQNIIPSSTGAAKAVGKVLPALNGKLTGMAFRVPTPDVSVVDLTCRLSKQTTYDEIKKVIKAKCETPEYKGIMGYTEDEVVSQDFVHDSRSSIFDAGAGIMLTGDFVKLVSWYDNEWGYS

SEQ ID NO: 39420 - protein, 224 aa, Bacillus subtilis
MTLHSCALAKKVIAIGNPLGQQFSGTVTQGIISGLNRTIDVDTTQGTVEMNVLQTDAAINPGNSGGPLINASGQVIGINSLKVSESGVESLGFAIPSNDVEPIVDQLLQNGKVDRPFLGVQMIDMSQVPETYQENTLGLFGDQLGKGVYVKEVQANSPAEKAGIKSEDVIVKLNGKDVESSADIRQILYKDLKVGDKTTIQVLRKGKTKTLNATLTKQTESSSS

SEQ ID NO: 39421 - protein, 409 aa, Zea mays subsp. mexicana
MQFALALDTNSGPHQIRSCEGDGIDRLEKLSIGGRKQEKALRNRCFGGRVAATTQCILTSDACPETLHSQTQSSRKNYADANRVSAIILGGGTGSQLFPLTSTRATPAVPVGGCYRLIDIPMSNCFNSGINKIFVMSQFNSTSLNRHIHRTYLEGGINFADGSVQVLAATQMPEEPAGWFQGTADSIRKFIWVLEDYYSHKSIDNIVILSGDQLYRMNYMELVQKHVEDDADITISCAPVDESRASKNGLVKIDHTGRVLQFFEKPKGADLNSMRVETNFLSYAIDDAQKYPYLASMGIYVFKKDALLDLLKSKYTQLHDFGSEILPRAVLDHSVQACIFTGYWEDVGTIKSFFDANLALTEQPSKFDFYDPKTPFFTAPRCLPPTQLDKCKMKYAFISDGCLLRECNI

SEQ ID NO: 39422 - protein, 318 aa, Phytophthora palmivora
SKVGINGFGRIGRLVLRAAAKNPEINVVAVNGPFIATKYMEYMLKYDTVHGRFGGELSHDEQNIYVDGKAIRVFNEMNPANIKWGEEQVQYVVESTGAFTTTEKASAHLKNGVEKVVISAPSSDAPMFVMGVNHELYEKNMHVVSNASCTTNCLAPLAKVVNDKFGIKEGLMTTVHAVTATQKTVDGPSKKDWRGGRGACFNIIPSSTGAAKAVGKVIPSLNGKLTGMSFRVPTADVSVVDLTARLVNPASYEEIKAAIKSASENEMKGILGYTEEAVVSSDFIGDSHSSIFDAEAGIALTDDFVKLVSWYDNEWGYS

SEQ ID NO: 39423 - protein, 409 aa, Zea mays subsp. huehuetenangensis
MQFALALDTNSGPHQIRSCEGDGIDRLEQLSIGGRKQEKALRNRCFGGRVAATTQCILTSDACPETLHSQTQSSRKNYADANRVSAIILGGGTGSQLFPLTSTRATPAVPVGGCYRLIDIPMSNCFNSGINKIFVMSQFNSTSLNRHIHRTYLEGGINFADGSVQVLAATQMPEEPAGWFQGTADSIRKFIWVLEDYYSHKSIDNIVILSGDQLYRMNYMELVQKHVEDDADITISCAPVDESRASKNGLVKIDHSGRVLQFFEKPKGADLNSMRVETNFLSYAIDDAQKYPYLASMGIYVFKKDALLDLLKSKYTQLHDFGSEILPRAVVDHSVQACIFTGYWEDVGTIKSFFDANLALTEQPSKFDFYDPKTPFFTAPRCLPPTQLDKCKMKDAFISDGCLLRECNI

SEQ ID NO: 39424 - protein, 321 aa, Plectospira myriandra
SKVGINGFGRIGRLVARAAFANPNATVVAINDPFMSLDYMVYLFKYDSTHGPYQGTVEAKDGNLVIDGQVVRIFTAKNPAEIGWGEAGADYVCESTGVFTNTEACLAHVKGGAKKVIISAPPKDNTPMYVIGVNHTKYDGSAHVVSNASCTTNCLAPLAKVVHEKFGIVEGLMTTVHATTANQLTVDGPSKGGKDWRAGRGASANIIPASTGAAKAVGKVLPELNGKLTGMAFRVPVPDVSVVDLTVRLEKSATLAEIKAAIKEASENELKNILGYTEDDVVSQDFVTDKRSSIFDANACISLNDNFVKLVSWYDNEWGYS

SEQ ID NO: 39425 - protein, 532 aa, Clostridium acetobutylicum ATCC 824
MKKSVQRFRKIVKVLAFYGFGYIVDSKLNNAKNSPENLRRAFEALGPTFIKIGQILSTRPDIIPPDYIHELSKLQDKAPAETFENMERIFIEEFKRPIDDFFSYFNKKPLASASIAQVHEATLKSGKKVIVKIQRPNIEEKMKLDLSILYKIVSLTKAKFLDTLIDSKEAIEELISSTELELDFKNEANNMVLFKKLNSDTDFVTCPDLVSKLSSRHIITMDKIDGLKVTDVKALKEAGHDIDDIGKKLALSYFKQVFEDGFFHGDPHPGNILIQKNKICYIDFGIMGHISKNLKNALNDIIISIAYQNIDKLISVIMSIGIKTGYIDRNQLYEDIDYIFASYLSTSLENIKISQLIQEVFDCSKRNNVRMPKDLIILVRGFVIIEGVIAKISPDISFLDVAIPFVKAQNKAEIFGNFNMYEVLLNSYMFFKSSLKVPKKFIDLSDSIMRGRAKLQLSHTNLEESINELSKMVNRLILGIIISSMIISSSVIVHSNIGPKVCNISIIGITGYILTALMGFWLLISIIRSHKM

SEQ ID NO: 39426 - protein, 84 aa, Hordeum vulgare subsp. vulgare
DDVGIPLNYRHMDGFGVNTYTLISRDGKAHLVKFHWKPTCGVKCLLDDEAVTVGGTCHTHATKDLTDSIAAGNYPEWKLFIQTI

SEQ ID NO: 39427 - protein, 301 aa, Zea mays subsp. huehuetenangensis
VPVGGCYRLIDIPMSNCFNSGINKIFVMSQFNSTSLNRHIHRTYLEGGINFADGSVQVLAATQMPEEPAGWFQGTADSIRKFIWVLEDYYSHKSIGNIVILSGDQLYRMNYMELVQKHVEDDADITISCAPVDESRASKNGLVKIDHSGRVLQFFEKPKGADLNSMRVETNFLSYAIDDAQKYPYLASMGIYVFKKDALLDLLKSKYTQLHDFGSEILPRAVVDHSVQACIFTGYWEDVGTIKSFFDANLALTEQPSKFDFYDPKTPFFTAPRCLPPTQLDKCKMKDAFISDGCLLRECNI

SEQ ID NO: 39428 - protein, 355 aa, Zea mays
MVSAVLRTILVTGGAGYIGSHTVLQLLQQGFRVVVVDNLDNASEAALARVAELAGHDGANLVFHKVDLRDRHALVDIFSSHRFEAVIHFAGLKAVGESVHKPLLYYDNNLVGTITLLEVMAANGCKKLVFSSSATVYGWPKEVPCTEEFPLCATNPYGRTKLVIEDICRDVHRSDPDWKIILLRYFNPVGAHPSGYIGEDPCGVPNNLMPYVQQVAVGRLPHLTVYGTDYSTKDGTGVRDYIHVVDLADGHIAALRKLHEDSDKIGCEVYNLGTGKGTSVLEMVAAFEKASGKKIPLVFAGRRPGDAEIVYAATAKAEKELKWKAKYGIEEMCRDLWNWASKNPYGYAGSRDNSK

SEQ ID NO: 39429 - protein, 409 aa, Zea diploperennis
MQFALALDTNSGPHQIRSCEGDGVDRLEQLSIGGRKQEKALRNRCFGGRVAATTQCILTSDACPETLHSQTQSSRKNYADANRVSAIILGGGTGSQLFPLTSTRATPAVPVGGCYRLIDIPMSNCFNSGINKIFVMSQFNSTSLNRHIHRTYLEGGINFADGSVQVLAATQMPEEPAGWFQGTADSIRKFIWVLEDYYSHKSIDNIVILSGDQLYRMNYMELVQKHVEDDADITISCAPVDESRASKNGLVKIDHTGRVLQFFEKPKGADLNSMRVETNFLSYAIDDAQKYPYLASMGIYVFKKDALLDLLKSKYTQLHDFGSEILPRAVVDHSVQACIFTGYWEDVGTIKSFFDANLALTEQPSKFDFYDPKTPFFTAPRCLPPTQLDKCKMKNAFISDGCLLRECNI

SEQ ID NO: 39430 - protein, 380 aa, Vibrio sp. Ex25
MKNISKLLVGFSFALPVLFLLLSKAGTADTMDKMKTSENAEIAILAGGCFWCTESDLEQLTGVVDVVSGYSGGHVENPTYRQVSSGKSGHIEVIEVKYDPKVVSYEQVLDYFFRHIDPTDDKGSFVDRGPQYRPAIFYHNAEQKQIAEQFIMEIDKAMIYPKPLKTELIEFEKFYPAEEYHQDYYKKSSLKYKYYRYASGRDKYLDEVFGDDRKEPPKTLRQLIEEKKLLSKVKEYSKPAKSEIKSNLTELQYYVTQEEGTERPFDNEYWDNKEAGIYVDIVTGEPLFSSTDKYKSGTGWPSFTKPINPGYIVEKTDYKLIYPRTEVRSKFGDSHLGHVFKDGPKPTGLRYCMNSAAMKFVPVSEMKTQGYEEYLYLFDK

SEQ ID NO: 39431 - protein, 406 aa, Streptomyces coelicolor A3(2)
MTEGPAAITGVGLVTPAGTDADSTWEAMCAARSLEGGDPEPLAGTGAWHSLRVPALRPGQLTGRGTARTDPFIRFALVAVAEALAQSGLDPDSWDGSRVGVVVGSAFGGVTTHDEQHRRLERQGAAMVSPYLHPRALINMAAGTIGARYGITGPGHTVAAACASGASAFGLGKTLLDAGVCDTVVVCGTDAAVTPLVVSGFARMGALSEQKATDASRPFGADRDGFVMSEGAAAVVMEKPAKARARGAEVLGRLLGHADTSDAHHPTAPRPDGAGAAAAVERALAAARMSVRNVTTVNAHGTSTPQNDLTEARLIARLFPHGPSVTANKGLLGHTLGAAGAIEAVLTLRSLRTGVLPPIAHTERADPGLPELDLVLGGVRRHDGNVAVSTSFGFGGSNCALVLDAG

SEQ ID NO: 39432 - protein, 397 aa, Neisseria meningitidis MC58
MYRHIEYYPGDPILSLVETFKNDPRPEKVNLSIGIYFDDEGKMPVLESVSRAETARAAAPAPSPYLPMEGLDTYRSAVQHLLFGKDNPALAQGRIVTVQTLGGSGALKVGADFLHRWFPEARAYVSDPTWDNHRGIFEGAGFEVGTYPYYDPATVGVKFDEMTAFFNTLPENSVLILHPCCHNPTGVDMSERQWDEVLHIIKTRKLIPFMDIAYQGFGGDLDSDAYAVRKAVEMELPLFVSNSFSKNLSLYGERVGGLSVVCPNKEEADLVFGQLKFTVRRIYSSPPAHGAYIAADVMNSPELYALWQNEVYMMRDRIRAMRQKLYDVLTAQIPNRDFTYFIKQRGMFGYTGLSVEQVRRLRDEFAVYLLDSGRMCVAGLNTSNTDYVARAFAEVLK

SEQ ID NO: 39433 - protein, 272 aa, Pseudomonas putida KT2440
MSGFEQLFPGTLPRLVMFDLDGTLIDSVPDLAAAVDRMLLELGRPPAGLEAVRHWVGNGAQVLVRRALAGGIDHADVDDALAEQALALFMDAYAESHELTVVYPGVRDTLRWLRKQGVEMALITNKPERFVGPLLDQMKIGNFFRWIIGGDTLPQKKPDPAALLFVMQMAGVTPQQSLFVGDSRSDVQAAKAAGVQCVGLTYGYNHGRPIDAESPSLVIDDLRALLPGCADPATGITLADLQASQDRESTVAVTGKFWMKVIKALARWRWRA

SEQ ID NO: 39434 - protein, 334 aa, Triticum aestivum
VEKWRRPTRPADLLLGADNPVIKQGLVATLQSLSGTGSLRLAAAFIQRYFPDAKVLISSPTWGNHKNIFNDARVPWSEYRYYDPKTVGLDFEGMIADIQAAPEGSFVLLHGCAHNPTGIDPTPEQWEKLADVIEEKKHMPFFDVAYQGFASGSLDEDASSVRLFVKRGLEVFVAQSYSKNLGLYAERIGAINVICSAPGVAHAAKSQLKRLARPMYSNPPIHGAKIVANVVGDPTMFGEWKEEMEQMAGRIKNVRQKLYDSLTEKDQSGKDWSFILRQIGMFSFTGLNRPQSDNMTDKWHIYMTKDGRISLAGLNLAKCEYLADAIIDSFHNVN

SEQ ID NO: 39435 - protein, 231 aa, Triticum aestivum
  misc_feature (45)..(45): Xaa can be any naturally occurring amino acid
  unsure (1)..(231): unsure at all Xaa locations
RVELAFLPSAPFSLVPVAPMQIPNEFSPAFNHSPRVRSDESTNNXPREVEIPTLITWSQGGNEVFVEGSWDNWTSRKVLERSGKDHAVLLVLPSGIYHYRMIVDGVPRYVSELPHVTDERGQEYIPDSLDSVAEFDAPPSPEHSYNMEFPTDEELTKQDPPALPPQLLMTALGGIDHFDEHALKPKPQHVVLNHLFIEKGWGAQSLLALGLTHRFQSKYVNFVLYKPLVRR

SEQ ID NO: 39436 - protein, 278 aa, Pirellula sp.
MTPLQSLFESLRGQNRKALMPFLTTGDPNIDTTEAVIAAARQAGADLCEVGVPYSDPIADGPVIQASYQRALDAGFKLQHVWDLGQRLTENPKVKAMPRVTMVSYSIIYRIGMAKYVDQAMQAGYCGAIVPDLLVEEAEDLSKICREKGFDLIQLVTPTTTRDRQCRIAELSSGFLYYVSVTGITGERTALPTNLVDNVGWLREQTELPICIGFGISGPETAAQLAPVSDGLIVGSAIVRRVADAVEKAKSSGADPVKTAAEEAGDFCHSLRQAIDAA

SEQ ID NO: 39437 - protein, 230 aa, Emericella nidulans
MSSGRVSEATNITQPPAYSKKFVVVGDGGCGKTCLLISYSQGYFPEKYVPTVFENYITQTLHRRSGKTVELALWDTAGQEEYDRLRPLSYPETDLLFVCFAIDCPASLENVMDKWYPEVLHFCPTTPIILVGLKSDLRNKRTCIELLKTQGLTPVTPEQGQAVAGRMNASYVECSSKEMRGVDSVFQLAVDTVVSLEEQNWDTRLPSSSGKPGGKPIGGKKIKKRSCKIL

SEQ ID NO: 39438 - protein, 586 aa, Zea mays
MAPANVRAAQAQAPSADRRLSTLVGHLLPSSPRRAAADTSATSTLESFPTMASQGSSVFAALEQAPEDPILGVTVAYNKDPSPVKVNLGVGAYRTEEGKPLVLNVVRRAEQMLINNPSRVKEYLPITGLAEFNKLSAKLIFGADRSYRYYDPATCSLHFEGLLEDLGSAPSGSIVLLHACAHNPTGVDPTIEQWEQIRQLMRSKSLLPFFDSAYQGFASGSLDKDAQSVRMFVADGGELLMAQSYAKNMGLYGERVGALSITQQARRLLDDLDAACQRMGRDALNAERARRPGSPPEREVEGKARTRVSTGPLHTPESFSFRDPAGVRTYPEALDFSHALLLLRPPRPFTFWASKWGAPVSSRGIRVKAVSSGDFTVGELPHRRSPRRMTTSLVVGRSKPGCGLSPTLSFKDVHHPRCGGRQVEPGPYPPYGLVTRFFLQHSEGKACLALWGWMALVPPPTLPPAVWLGHGCPSTAQVTVAPCAGLPHPWLPLPAGAHWGPYKTSYAATVAAAFLDGLVLTPVGRNGSENPFVHAEAAATHRCRGGRRHWLTVQDQAERLHGFRTPQETSARSSESDLLAVGCTRL

SEQ ID NO: 39439 - protein, 211 aa, Glycine max
MVRGKTQLRRIENATSRQVTFSKRRNGLLKKAFELSVLCDAEVALIIFSPRGKLYEFASSSMQDTIERYRRHNRSAQTVNRSDEQNMQHLKQETANLMKKIELLEASKRKLLGEGLGSCSLEELQQIEQQLERSVSSVRARKNQVYKEQIDQLKEKERALYAENARLCEQYGGIQPQPATKDPKEIQPYAESSPSSEVETELFIGLLRSSY

SEQ ID NO: 39440 - protein, 467 aa, Chlorobium tepidum TLS
MSTKFDVIIIGGGPGGTPAAMQLASQGKTVLLVEESGKLGGACLFVGCIPSKIIRHWADEYAVKLKYSAQEALSPEDREAAWNEIMRKMQTILSQRSGAAMQMLKHLSNLRFVAGHAKFVSNNELVINEKDTGRKEKYTFNKAIIATGSHSFIPPFKGNGVQDVLTSEVLFSQDKLPESLLIIGGGPIGIELAQMLTKLGTKCTIIELLDSILYGVVETEFVSIISNQLSSLGVNIYTSSQVQEINKSDGHFDVTFTDANGSEHKENFEDVLVVTGKVPNIESLNLDSTDIKYDRKGIIVDEYLETSVKGIYATGDVTHGPKFAHTATYEAHIASANISAGNNQKVDFSKNTWVLFSEPEIVAAGFTEAQAVQEGYDIITGVYDYKIDAAAQVMNSPFGYLKYVVNKKNSEIIGVHICMNNASSLAGEASLIIANRLILKNVAETIHPHPTLTEAFGILAQKMLSKS

SEQ ID NO: 39441 - protein, 264 aa, Solanum tuberosum
MAELREKWSLKGTTALVTGGSKGIGYAIVEELANFGARVYTCSRNENELQECLDIWRKKGLKVEGSVCDLLSRTEREKLMKTVEDVFDGKLNILVNNAGVAIHKEAKDFTKEDYNIIMGTNFEAAYHLSQIAYPLLKASQNGNVIFVSSIAGFSALPSLSLYSASKGAINQMTKNLACEWAKDNIRVNSVAPAVILTPLVETAIKKNPQQKEEIDSFVVKTPLGRAGKPEEASAVIAFLCFPAASYITGQIIWADGGFTANGGF

SEQ ID NO: 39442 - protein, 344 aa, Escherichia coli
TPDCYQAADWRHRGYHAVELPGGDDYPQSRSGAGSRLHHGAEARQSDAVLCLALAELAIRAGVPAGVFNVVTGSAGAVGNELTSNPLVRKLSFTGSTEIGRQLMEQCAKDIKKVSLELGGNAPFIVFDDADLDKAVEGALASKFRNAGQTCVCANRLYVQDGVYDRFAEKLQQAVSKLHIGDGLDNGVTIGPLIDEKAVAKVEEHIADALEKGARVVCGGKAHERGGNFFQPTILVDVPANAKVSKEETFGPLAPLFRFKDEADVIAQANDTEFGLAAYFYARDLSRVFRVGEALEYGIVGINTGIISNEVAPFGGIKASGLGREGSKYGIEDYLEIKYMCIGL

SEQ ID NO: 39443 - protein, 453 aa, Arabidopsis thaliana
MGVSLLKQQHRITNQADTFSRFMERSPENNLSRNEHIIIDIPRNAAIASSSSSHDRISNVLEPLQHEEERPSTVSPMAAPQPATATASSSSSMRSNPRSVRRRRSPLNSGLWISIELFLTVGQIIAAIVVLSLSKHEHPRAPLFTWIVGYACGCVATLPLLYWRYYHSNQASEQDSGQHRPNLNVAAGPFAFSISRTSEADGRQTNTTSSRGSRYPGFISAARLKVIVEYFKMALDCFFAVWFVVGNVWIFGGHSSAAEAPNLYRLCLVFLTFSCIGYAMPFILCTTICCCLPCIISILGYREDLTQPRGATPESINALPTHKFKLKKSRSNGDDNGSSTSEGGVVAAGTDNERAISGEDAVCCICLAKYANNEELRELPCSHFFHKECVDKWLKINASCPLCKSEVGEKNSDLTSQGILTSLSSGENDNHQQQQQQQRSELRVENGLANNVI

SEQ ID NO: 39444 - protein, 338 aa, Bacillus anthracis str. A2012
  misc_feature (12)..(12): Xaa can be any naturally occurring amino acid
  unsure (1)..(338): unsure at all Xaa locations
MAILITGGAGYXGSHTCVELLNNNYKIIVVDNLSNSSIESLNRVKEITGKQFEFYKENVLNREKMNEIFLENNIEAVIHFAGFKAVGESTTTPLAYYYNNIISAIVLCDVMQKHNVKNFIFSSSATVYGIPKTLPITEEFPLSVTNPYGQTKLMIEQIMRDVAKADDEWSIALLRYFNPFGAHQSGRIGEDPNGIPNNLMPYVTQVAVGKLKELNIFGNDYPTKDGTGVRDYIHVVDLAKGHVKALEKVLKTKGIEAYNLGTGKGYSVLEMVKAFEKVSGKKIPYKVIGRRPGDVAICFADVSKAKRELGWEAEYGLEEMCVDSWRWQVNNKNGYQMI

SEQ ID NO: 39445 - protein, 482 aa, Pseudomonas syringae pv. phaseolicola 1448A
MQLIWLRSDLRVHDNTALTAAMERGPTLAVYLLSPAQWRSHDDADCKVDFWLRNLVELEKALGALNVPLLIREADTWDQAPEVLSTLCTQLKIEGLHLNQEYGINETRRDQAVQKALEKAGVQVTSYLDQLLFKPGSILTKTGNYFQVFTQFKKVCYNRMHQAMPQPVRTPKAQQSLSIKSDSIPDQVEGFATPSKALRDLWPAGEAEARRRMATFADAQISYYKTERDFPAKPGTSQLSAYLAAGVISPRQCLHAALGSNQGEFETGDVGTVTWINELLWREFYKHTLVGYPRVSRHRAFRPETEALKWRDAPEELLAWQEARTGLPIIDAAMRQLLETGWMHNRLRMVVAMFLTKNLLIDWHEGERFFMRHLIDGDLASNNGGWQWSSSTGTDSAPYFRIFNPLSQSERFDPEGVFIKRWLPELADLNKKQIHDPASIGGLFGAADYPKPIVDLSKSRARALAAFKALPARQPAAGIEHD

SEQ ID NO: 39446 - protein, 321 aa, Prymnesium parvum
SKVGINGFGRIGRLVCRAAMMKEGAEVVAVNDPFCDVKYAAYLFKYDSTHGIYKGTVECDEASQMLIVDGKKIAFLAVKNPTEVPWGEKGADIVCESTGIFTVIEKASMHLQGGAKKVIISAPSADAPMFVMGVNHTDYKKDINILSNASCTTNCLAPLAKIIHDEFGIVEGLMTTVHATTATQKTVDGPSGKDWRGGRGAGQNIIPSSTGAAKAVGKVIPSLNGKLTGMAFRVPTPDVSVVDLTVKLGKETTYDAIKALVKAKAATPEWKGIMGYTEDEVVSTDFQGDSHSSIFDAKAGIMLTPTFVKLVSWYDNEWGYS

SEQ ID NO: 39447 - protein, 318 aa, Pythium graminicola
SKVGINGFGRIGRLVLRAAQTNPLINVVAINDPFIPTKYMEYMLRYDTVHGVFNGTVSHDEENLIVNGKKVRVFNEMKPTDIKWSQADVQYVVESTGVFTTTEKASAHLQNGVEKVVISAPSADAPMFVVGVNEDKYKSDMHVVSNASCTTNCLAPLAKVVNDTFGIKEGLMTTVHAVTATQLTVDGPSKKDWRGGRGACFNIIPSSTGAAKAVGKVIPSLNGKLTGMSFRVPTADVSVVDLTCRLEKKASYDEIKQVIKAASENELKGILGYTDELVVSSDFVGDSRPSIFDAQAGIALTDDFVKLVSWYDNEWGYS

SEQ ID NO: 39448 - protein, 616 aa, Streptomyces avermitilis MA-4680
MNTRQLTELGQQLRVDSVRAADAASSGHPTSSMSAADLMAVLLAHHLRYDFDRPAHPGNDRFILSKGHASPLLYAAYKAAGAIDDAELLTFRELGSRLEGHPTPRRLPWVETATGSLGQGLPVGVGIALSGKRLERTGYRVWVLCGDSELAEGSVWEAAEHAGYEHLDNLTAIVDVNRLGQRGPTRHGHDLDAYARRFQAFGWHTIEIDGHDVDAVDRAYGEAESTSGQPTVILARTLKGKGVAAVEDREGLHGKPLPDAEEAIAELGGVRELRIEVQDPPAARVLHAVAAPGQVELPRYDKGDEVATRDAYGQALTALGGAREDVVAIDGEVGDSTRSEYFAKEYPDRYFECYIAEQQMVAAAVGLAARGWVPYAATFAAFLTRAHDFVRMASISGAGINLVGSHAGVSIGQDGPSQMGLEDLAMFRSVYDSTVLYPCDANQTAKLVAAMAGLDGVRYLRTSRGASPVLYGPDEEFPVGGSKVLRSSGEDRLTLVAAGVTVHEALAAADSLAEAGIRARVIDLYSVKPVDRDTLRQAAEDTGCLLTVEDHREEGGIGDAVLDAFLDGRPVPRLVRLAVRTMPGSASPAEQLHAAGIDAESIATAARLLVEQAVVR

SEQ ID NO: 39449 - protein, 409 aa, Zea diploperennis
MQFALALDTNSGPHQIRSCEGDGIDRLEQLSIGGRKQEKALRNRCFGGRVAATTQCILTSDACPETLHSQTQSSRKNYADANRVSAIILGGGTGSQLFPLTSTRATPAVPVGGCYRLIDIPMSNCFNSGINKIFVMSQFNSTSLNRHIHRTYLEGGINFADGSVQVLAATQMPEEPAGWFQGTADSIRKFIWVLEDYYSHKSIDNIVILSGDQLYRMNYMELVQKHVEDDADITISCAPVDESRASKNGLVKIDHTGRVLQFFEKPKGADLNSMRVETNFLSYAIDDAQKYPYLASMGIYVFKKDALLDLLKSKYTQLHDFGSEILPRAVVDHSVQACIFTGYWEDVGTIKSFFDANLALTEQPSKFDFYDPKTPFFTAPRCLPPTQLDKCKMKDAFISDGCLLRECNI

SEQ ID NO: 39450 - protein, 479 aa, Sinorhizobium meliloti
MRRNRKVKILATLGPASADEQMIQKLHEAGADLFRINMSHASHEVMRTLIERIRVVEARCGRPIGILADLQGPKLRVGKFAEGKVELKIGQTFTLDNRDVPGDSRRVYLPHPEILEAVKPGHRLLIDDGKLHLRAEKTDGKSIVTTVVSGTRISDRKGVSLPDTLLGVGALTDKDRVDLDAVLATGEVDWVALSFIQRPEDLAEVRKIARGRVGLMSKIEKPQAIERIDEIIELSDALMVARGDLGVEMPLESVPGLQKQLTRACRRAGKPVVVATQMLESMISSPVPTRAEVSDVATAVFEGADAVMLSAESASGEYPVEAVSTMASIASNVERDPHYPGIIYAQRTPPEATGADAISLAAHQIAETLKLAAIVTYTSSGTTGLRAARERPQVPVIALSPIVQTARRLSVVWGLHCVVTEDATDLDDMVNRACRIVSTEGFGKPGDRIIVTAGVPLGTPGATNMLRIAYIGSDGQSGI

SEQ ID NO: 39451 - protein, 321 aa, Thraustotheca clavata
SKVGINGFGRIGRLVCRAAFANPNATVVAINDPFMDLDYMVYLFKYDSTHGGYKGTVVAEDGNLVIDGHVVRVFSERNPNEIPWGEAGADYVCESTGVFTTTEKAGLHLGGGCKKVVISAPPKGSTPMYVMGVNHDKYDGSAHVVSNASCTTNCLAPLAKVIHDNFGIVEGLMTTVHAVTANQLTVDGPSRGGKDWRAGRGAGANVIPASTGAAKAVGKVLPELNGKLTGMAFRVPVPDVSVVDLTVRLEKGASLATIKAAVKEASEGSMAGILGYTEDEVVSQDFVSDKRSSIFDANVCIALNDSFVKLVSWYDNEWGYS

SEQ ID NO: 39452 - protein, 1118 aa, Hordeum vulgare subsp. spontaneum
MDCLRLAVAAAALLLAALAAAADDAQLLDEFRMALPSQAPLEGWTAREGACRFPGAVCRGGRLTSLSLAAVTLNADFRAVANTLLQLSAVERLSLRGANVSGALAAARCGGKLEELDLSGNAALRGSVADVAALAGSCGALRTLNLSGDAVGAAKPAGGGGGGQGFAALDALDLSSNKIAGDADLRWMVGAGLGSVRWLDLAWNKISGGLSDFTNCSGLQYLDLSGNLIAGDVAAAALSGCRSLRALNLSSNHLAGAFPPNIAGLTSLTALNLSNNNFSGEVPADAFTGLQQLQSLSLSFNHFSGSIPDSVAALPDLEVLDLSSNNFSGSIPDSLCQDPNSRLRVLYLQNNYLSGSIPEAVSNCTDLVSLDLSLNYINGSIPESLGELSRLQDLIMWQNLLEGEIPASLSSIPGLEHLILDYNGLTGSIPPELAKCKQLNWISLASNRLSGPIPSWLGKLSNLAILKLSNNSFTGKIPAELGDCKSLVWLDLNSNQLNGSIPPELAEQSGKMTVGLIIGRPYVYLRNDELSSQCRGKGSLLEFSSIRSEDLSRMPSKKLCNFTRMYMGSTEYTFNKNGSMIFLDLSFNQLDSEIPKELGNMFYLMIMNLGHNLLSGAIPTELAGAKKLAVLDLSHNRLEGQIPSSFSSLSLSEINLSSNQLNGTIPELGSLATFPKSQYENNSGLCGFPLPPCESHTGQGSSNGGQSNRRKASLAGSVAMGLLFSLFCIFGLVIIAIESKKRRQKNDEASTSRDIYIDSRSHSGTMNSNWRLSGTNALSINLAAFEKPLQKLTLGDLVEATNGFHNDSLIGSGGFGDVYKAQLKDGRVVAIKKLIHVSGQGDREFTAEMETIGKIKHRNLVPLLGYCKIGEERLLMYDFMKYGSLEDVLHDRKKIGVRLNWAARRKIAIGAARGLAFLHHNCIPHIIHRDMKSSNVLVDENLEARVSDFGMARMMSVVDTHLSVSTLAGTPGYVPPEYYQSFRCTTKGDVYSYGVVLLELLTGKPPTDSTDFGEDHNLVGWVKMHTKLKITDVFDPELLKDDPTLELELLEHLKIACACLDDRPSRRPTMLKVMTMFKEIQAGSTVDSKTSSVATGLSDDPGFGVMDMTLKEAKEEKD

SEQ ID NO: 39453 - protein, 196 aa, Fucus distichus
MQNIKCVVVGDGAVGKTCLLISYTTNAFPGEYIPTVFDNYSANVMVDGKPINLGLWDTAGQEDYDRLRPLSYPQTDVFLVCFSVVDPTSFHNVKLKWIPELQHHAPGIPFILVGTKLDLRDDQDAIKRLAERRQTPISFSEAQGLSSDLEAYRYLECSALTQHGLKQVFDGAIRCVLEQNQRKMKKKKGKKGCVIS

SEQ ID NO: 39454 - protein, 420 aa, Shewanella sp. ANA-3
MSNVRYISNLTRETYALILAGGRGSRLHELTDWRAKPALYFGGKFRIIDFPLSNCINSGIRRVGVVTQYKSHSLIRHVMRGWGHFKKELGESVEILPASQRYSENWYQGTADAVFQNIDIIRHELPKYVMVLSGDHVYRMDYAGLLAAHAESGADMTVSCLEVPVAEAAGAFGVMEVDDEMRILGFEEKPKHPKHSPGNPEKCLASMGNYVFNTEFLFEQLKKDAQNANSDRDFGKDIIPSIIEKHKVFAYPFKSAFPNEQAYWRDVGTLDSFWQANMELLSPTPALNLYDAKWPIWTYQEQLPPAKFVFDDDDRRGMAVDSIISGGCIISGATVRRSVLFNEVRVCSYSVVEDSVVLPDVVVLRHCKIKNAIIDRGCIIPEGTVIGYNHDHDRAKGFRVSEKGITLVTRDMLGLPVGYE

SEQ ID NO: 39455 - protein, 438 aa, Arabidopsis thaliana
MEKKMEAKRRIVLVPIPAQGHVTPLMQLGKVLNSKGFSITVVEGHFNQVSSSSQHFPGFQFVTIKESLPESEFEKLGGIESMITLNKTSEASFKDCISQLLLQQGNDIACIIYDEYMYFCGAAAKEFSIPSVIFSTQSAANYVSHPDMQDKVVENLYPLRYKDLPTSGMGPLDRFFELCREVANKRTASAVIINTVSCLESSSLSWLEQKVGISVYPLGPLHMTDSSPSSLLEEDRSCIEWLNKQKPKSVIYISIGTLGQMETKEVLEMSWGLCNSNQPFLWVIRAGSILGTNGIESLPEDVNKMVSERGYIVKRAPQIEVLGHPAVGGFWSHCGWNSILESIGEGVPMICKPFHGEQKLNAMYIESVWRIGFQVEGKVDRGEVERAVKRLIVDDEGAGMRERALVLKEKIKASVSSGGASYNALEDIVNYLKTKQRC

SEQ ID NO: 39456 - protein, 223 aa, Bradyrhizobium sp. BTAi1
MRQRALLFDIDGTLADTDALHIQAFNAVFGRYGHIFDRARAARELLGRSNASIGAEFLPDEPPERRAEIMAQKEAVFRSLAAGEVQPLPGLMTLLDHAEAAAIPVVAVTNAPRANAEMILHGLGIAARFRAVIIGDELPHGKPHPLPYLEGMRAVGAAPDRSLAFEDSRAGITAANAAGLVTVGMRSNLGHDDLIAAGAALTAAAFDEPEVLALVTMRLGAGA

SEQ ID NO: 39457 - protein, 471 aa, Glycine max
MATPFPIPVTAAQVGTYFVGQYYQVLQSQPEFVHQFYSDASTMLRIDGNARETAAAMLQIHALIMSLSYARIEIKTAQSLESWSGGVLVMVSGSVQVKDYSRRRKFMQTFFLAPQEKGFFVLNDIFHFVEEDPVHQQQAVLLPQSNLDPKLNASSAINKPVSNYLLGRDIQARDYVATNEVKENGVVDNYGFSEQRMQRAPDSEHIREDNAVEESNGSLQSSVNAVQDHAPASPDEPAGEPQKHTYASILRVAKGQSTPSVASQHKNVSPSEWDHAPQSSSQQQQMTASANAFERSETDAAEEFPATEDEDEIKSVYVRNLSPTVSPSEIEDEFKNFGRIRPDGVVIRSRKDVGVCYAFVEFEDMTGVYNAVKAGSVQIAGRQVYIEERRPNSNIPSRGGRRGRGRGSYQSDAPRGRFNPRNFGRGHGQDGSDREYNKLKGNGFYRPSPHQERGHSGHHQVPRNGQNLAES

SEQ ID NO: 39458 - protein, 89 aa, Brassica napus
  misc_feature (53)..(53): Xaa can be any naturally occurring amino acid
  unsure (1)..(89): unsure at all Xaa locations
MSASRFVKCVTVGDGAVGKTCLLISYTSNTFPTDYVPTVFDNFSANVVVNGSXTVNLGLGDTARREGYNRLRPLGYRGAEVFILAFFLI

SEQ ID NO: 39459 - protein, 1478 aa, Saccharomyces cerevisiae
MPFLRKIAGTAHTHSRSDSNSSVKFGHQPTSSVASTKSSSKSPRATSRKSIYDDIRSQFPNLTPNSTSSQFYESTPVIEQSFNWTTDDHISAGTLENPTSFTNSSYKNDNGPSSLSDSRKSSGGNSVNSLSFDKLILSWDPTDPDEWTMHRVTSWFKFHDFPESWILFFKKHQLFGHRFIKLLAYDNFAVYEKYLPQTKTASYTRFQQLLKKTMTKNVTNSHIRQKSASKLKSSRSSSESIKSKLKNSKSQEDISNSRSTSESALSPTKSGPSKTDEKNFLHSTSTHQKTKSASSLYRRSFISLRGSSSSNASSAKSPSNIKLSIPARPHSIIESNSTLTKSASPPASPSYPSIFRRHHKSSSSESSLLNSLFGSGIGEEAPTKPNPQGHSLSSENLAKGKSKHYETNVSSPLKQSSLPTSDDKGNLWNKFKRKSQIGVPSPNTVAYVTSQETPSLKSNSSTATLTVQTADVNIPSPSSSPPPIPKTANRSLEVISTEDTPKISSTTASFKETYPDCINPDKTVPVPVNNQKYSVKNFLLDQKFYPLKKTGLNDSENKYILVTKDNVSFVPLNLKSVAKLSSFKESALTKLGINHKNVTFHMTDFDCDIGAAIPDDTLEFLKKSLFLNTSGKIYIKDQMKLQQKPKPAPLTSENNVPLKSVKSKSSMRSGTSSLIASTDDVSIVTSSSDITSFDEHASGSGRRYPQTPSYYYDRVSNTNPTEELNYWNIKEVLSHEENAPKMVFKTSPKLELNLPDKGSKLNIPTPITENESKSSFQVLRKDEGTEIDFNHRRESPYTKPELAPKREAPKPPANTSPQRTLSTSKQNKPIRLVRASTKISRSKRSKPLPPQLLSSPIEASSSSPDSLTSSYTPASTHVLIPQPYKGANDVMRRLKTDQDSTSTSPSLKMKQKVNRSNSTVSTSNSIFYSPSPLLKRGNSKRVVSSTSAADIFEENDITFADAPPMFDSDDSDDDSSSSDDIIWSKKKTAPETNNENKKDEKSDNSSTHSDEIFYDSQTQDKMERKMTFRPSPEVVYQNLEKFFPRANLDKPITEGIASPTSPKSLDSLLSPKNVASSRTEPSTPSRPVPPDSSYEFIQDGLNGKNKPLNQAKTPKRTKTIRTIAHEASLARKNSVKLKRQNTKMWGTRMVEVTENHMVSINKAKNSKGEYKEFAWMKGEMIGKGSFGAVYLCLNVTTGEMMAVKQVEVPKYSSQNEAILSTVEALRSEVSTLKDLDHLNIVQYLGFENKNNIYSLFLEYVAGGSVGSLIRMYGRFDEPLIKHLTTQVLKGLAYLHSKGILHRDMKADNLLLDQDGICKISDFGISRKSKDIYSNSDMTMRGTVFWMAPEMVDTKQGYSAKVDIWSLGCIVLEMFAGKRPWSNLEVVAAMFKIGKSKSAPPIPEDTLPLISQIGRNFLDACFEINPEKRPTANELLSHPFSEVNETFNFKSTRLAKFIKSNDKLNSSKLRITSQENKTE

SEQ ID NO: 39460 - protein, 278 aa, Baeomyces rufus
  misc_feature (1)..(2): Xaa can be any naturally occurring amino acid
  unsure (1)..(278): unsure at all Xaa locations
XXHGAVKVVAVNDPFIEPHYAAYMLKYDSTHGQFKGEITVDGSDLIVNGQRVKFYTERDPANIPWKDTGAYYIVESTGVFTTTEKAKAHLKGGAKKVVISAPSADAPMYVMGVNEKTYKSDIEIISNASCTTNCLAPLAKVINDEFGIVEGLMTTIHSYTATQKTVDGPSAKDWRGGRSAAQNIIPSSTGAAKAVGKVIPELNGKLTGMSMRVPTSNVSVVDLTCRLEKPASYDQIKATIRKASEGSLKGIMAYTEDDIVSTDLNGDSHSSIFDAKAG

SEQ ID NO: 39461 - protein, 365 aa, Arabidopsis thaliana
MTKMSKLPNDLLEEILSRSPLYSMRAIRLTCKKWNTLAKEESFTKKQLVQTKAAKEFMVIMMMDSKFCLMNINLNKEEDVEPSIKCNGKIINPIGMCRVYHCGGLVCITKSFSNTRDVVWNPYLGQTRWIKPRSHHAYIYAIGYETKKSCRSYKILSSEHNYINIDDERVDYEIYELDSNSWRALDVNSNWATAFYKMDVSVKGNSYTYTDYRGDFLISFDFTTERFGPTLPLPFHSRCGDIVALSSVREEKLAVLLHRCNISRMEIWITNKIEPNNVSWGKLFLTVDMKPLIIDDGIFFIDEEKKVVVVFDKDKEMRNRITAYIIGENGYFRKVDLGDSESFPVRCSYVPSSVEIKQLAKGKSN

SEQ ID NO: 39462 - protein, 262 aa, Pasteurella multocida subsp. multocida str. Pm70
MDKSLKAACIGEFLGTALLIFFGVGCVAALKVAGANFGQWEISIMWGLGVAIAVYASAGLSGAHLNPAVTIALWQFACFDGKKVVPYILAQLAGAFCSAALVYFLYHNLFIDVEIAQQMVRGTPESLSLASTFSTYPHPSISVLHAFIVEFVITAVLMALILALTDDGNGLPRGPLAPLLIGFLIAIIGGAMGPLTGFAMNPARDLGPKVFASLAGWGEIALTGGREIPYIFIPVIAPILGGLFGGWIYTKFVGKNLPCHCE

SEQ ID NO: 39463 - protein, 278 aa, Cladonia bellidiflora
VEHGAVKVVAVNDPFIEPHYAAYMLKYDSQHGQFKGTIEVEGSDLIVNGQKVKFYTEKDPSAIPWKDTGAYYIVESTGVFTTTDKAKAHLKGGAKKVVISAPSADAPMFVMGVNEKTYKSDIEVISNASCTTNCLAPLAKVMHDNFTIIEGLMTTIHSYTATQKTVDGPSAKDWRGGRTAAQNIIPSSTGAAKAVGKVIPDLNGKLTGMSMRVPTSNVSVVDLTCRIEKSVTYDEIKEAMKKASAGELEGIMAYSEDDLVSTDLNGDNHSCIFDAKAG

SEQ ID NO: 39464 - protein, 198 aa, Glycine max
MVPSEIRGVHYLAPENPFLVPPNFSLLQSDIPNLHLNTLLSNFPNCHFPPSGHEFVVPPSSCLSSNSTSDEADEIQFNIIDERKHRRMISNRESARRSRMRKQKHLDELWSQVVRLRTENHNLIDKLNHVSESHDRVLQENARLKEEASALRQMLADMQIGTAFACTMEDLEDLPCNTSQLKPDPLNQSITPADMIHE

SEQ ID NO: 39465 - protein, 278 aa, Heterodea muelleri
  misc_feature (275)..(275): Xaa can be any naturally occurring amino acid
  misc_feature (277)..(277): Xaa can be any naturally occurring amino acid
  unsure (1)..(278): unsure at all Xaa locations
VEHGDVKVVAVNDPFIEPHYAAYMLKYDSQHGQFKGTIEVEGSDLIVNGQKVKFYTEKDPSAIPWKDTGAYYVVESTGVFTTTEKAKAHLKGGAKKVVISAPSADAPMFVMGVNNESYKSDIEIISNASCTTNCLAPLAKVIHDNFTIIEGLMTTIHSYTATQKTVDGPSAKDWRGGRAAAQNIIPSSTGAAKAVGKVIPELNGKLTGMSMRVPTSNVSVVDLTCRIEKSVTYDEIKEAIKKASSGELKGIMSYSEDDLVSSDLNGDNHSCIFDXKXG

SEQ ID NO: 39466 - protein, 666 aa, Neurospora crassa
MDGSLMAALPQGQDVIRVISTGGVTKVVKIAECNTCEEVMRVTLRKFGLREDHERNYCFWVLAGVDPDPNQCRRLGDTELWRVIKDHTRPERNRLILRRVPSGEPGKAELERAAAIAMEEAQQTHRPPIEPSDKRSQLKLQKVLGVGWEDLQQQPPLSPMSYQDRERNVSNAARDLERPAPLETPRAMPRRTQALRQFGGLRPPSELIASDLTSYFPDHSREAIDRTARLSMRRSARLSRVNHRLSVASTLSFASSIQDAPPIPTIADSWLTASNQIAKVRPRDVLPRAPHGYRDSVASSVLDTLQEEGSPTEPNRRSFVPFSDSGSDTAAVSVIDPDGNIVRHSYYDSGTNNSADSAVIQEALAEDGEDAADKELQTFLAGDAWDDSMWMKGSLIGQGSFGSVYLALHAITGELLAVKQVETPAPGADSKNDARKKSMIEALKREITLLRDLQHPNIVQYLGCSSSAEYLNIFLEYVPGGSVQTMLDQYGALPESLVRSFVRQILQGLSYVHNRDIIHRDIKGANILVDNKGTIKISDFGISKKLEATNILNGANNNKHRPSLQGSVFWMAPEVVKQTSYTRKADIWSLGCLVVEMMTGTHPFPDCTQLQAIFKIGGSKASPTIPDNASEEAKQFLAQTFEIDHNKRPSADELMLSPFLTPVPGT

SEQ ID NO: 39467 - protein, 74 aa, Hordeum vulgare subsp. vulgare
MSCNCGSSCGCGSNCNCGKMYPDLEEKSGAIMQATAVILGVRPAKVRFEEVAESGEAGHGCSCGASCKCNPCNC

SEQ ID NO: 39468 - protein, 142 aa, Chlorobium tepidum TLS
MALTLYGKDPLKMFEDVFNERLTPFISSMGSMMAPAFKVDISEDEKAIYLSADIPGVKKEDVKVSIEDDVISISAERTQEEEEKKKNYHRVERSWGSLSRSFTIGDNVDSDNITANYDNGVLKVVIPKKEPEQKKSKEIAVS

SEQ ID NO: 39469 - protein, 582 aa, Thermoactinomyces sacchari
MLIEALFHETRVPYACPENLHSLRVRLRAGKGEIARCLVLHADRYELLDSCFQQTEAEWMASDQRFDYFEALLECTAKRLQYVFLLEGKKGERVYFGESGVSKERNRAGVFQYAYIHESALFVTPEWARDAVVYQIFPDRFANGDKENDPPRTEDWSKDARPGRDSFYGGDLEGVIHSLPYLRKLGVNALYFTPIFASPSNHKYDTADYLRIDPQFGNLDTFKRLIREAHRHGMRIILDAVFNHSGDRFFAFRDVLEKGADSQYRDWFFIEQFPVVQTPQPNYETFAVNVPVMPKLRTENREVKEYLFQVVRYWTEMGIDGWRLDVANEVDHAFWRDFRSFVKMLNPEALIIGEVWHNAVKWLEGDQFDSVMNYLFRDCVYRFFAEQTSDASEFDAELTTARISYPDQALQVAWNLLDSHDTERFLTSCGEKEERFRLAVLFQMTYVGTPLIYYGDEIGMTGETDPDCRRPMLWDKEEQNQALFSYYQRLIRIRRSCAPLRRGSFRTWLADPGSPVYAFVRSWQGENAGIVLNNSDSWQNVSLPLDTWAKRNWTDLLTGEKGQASGNRMELILSPYQGIVLV

SEQ ID NO: 39470 - protein, 217 aa, Arabidopsis thaliana
MASISNEPERENRDEEETGANEDEDTGAQVAPIVRLEEVAVTTGEEDEDTILDLKSKLYRFDKDGSQWKERGAGTVKFLKHRVSGKIRLVMRQSKTLKICANHLVGSGMSVQEHAGNDKSCVWHARDFSDGELKDELFCIRFASVENCKAFMQKFKEVAESEEEKEESKDASDTAGLLEKLTVEEKESEKKPVEKAEENKKSEAVEEKKTEESVPSA

SEQ ID NO: 39471 - protein, 268 aa, Xanthomonas oryzae pv. oryzae
MRRIDFRFAELRANGRKALIPFITAGDPSLEATVPVMHALVRAGADVIELGVPFSDPMADGPTIQRSSERALGRGAGLAYVLEAVHEFRREDAATPVVLMGYLNPIEIHGTRRFAEAAVAAGVDGLLLVDLPPEEADETRAIFTEVGLALIALASPTTSEQRLDMLCSTAQGYLYYVSFAGVTGASNLLDTHAASDRLRQLRQRAGAPVVAGFGIKDAASAAAMAVDADGVVVGSALVAALAEADDVRSARERAEAFLAPLRQALDQA

SEQ ID NO: 39472 - protein, 444 aa, Schizosaccharomyces pombe
CTDKPTLINLKTTIGYGSELQGTHSVHGSPLKPEDCVHVKKLFGFDPTKTFQVPPEVYAYYKERVAIASSAEEEYKKMYASYKQSYPDLSNQLERILSRKFPEGWEKHLPVYKPGDKAVATRKLSEIVLDALCPVLPELVGGSADLTPSNLTRWEGADDFQPPSSKLGTYAGRYIRYGIRENGMAGIMNGLAVYGPIIPYGGTFLNFVSYAAGAVRMAALNNSRVIYVATHDSIGLGEDGPTHQPIETFAHFRAMPNINCWRPADGNETSAAYYSALTSDSTPSILALTRQNLPQLENSTIENALKGGYVMLENKEADITLVGTGSEVSLCIDTVKTLETEYNLKARVVSLPCWEVFEQQPESYRLSVIPDGIPAMSVEVWATNGWRRYVHEAFGMHTFGDSGPAPKLYEKFHFTTSGVAQRAKKTVDAYKDIPYIRSPVRRAF

SEQ ID NO: 39473 - protein, 586 aa, Anoxybacillus flavithermus
MLKEAVYHRPTDQFAYAYDDKTLHIRLRTKKSDVHAVSLLHGDPYCWEDRQWQFTKTEMTKSGSDALFDYWWVAISPPYRRLRYGFELVSGNERCVYTEKGFFHEAPIDDIAYYFCFPFLNRIDVFHAPTWVKDTVWYQIFPERFANGDPSLNPKGTIPWGSADPTPTSFFGGDFAGIMERLDYLVELGINGIYFTPIFKASSNHKYDTIDYFEIDPQFGDKPTFKRLVERCHQKGIRVMLDAVFNHSGHFFAPFQDVLKHGEKSKYKDWFHIHEFPLQTEPLPNYDTFAFVPTMPKLNTENQEVKQYLLDVATYWIREFDIDGWRLDVANEVDHQFWREFRQAVKAVKQDVYILGEIWHDAMPWLRGDQFDAVMNYPFTNGVLRYFAKSEMKASEFAHSITNVLHSYPNNVNEVAFHLLGSHDTPRILTECGENKEKVKLMFTFQFSFTGTPCIYYGDEIGLTGGQDPLCRKCMVWEEEKQDLELFAHVQKLISLRRKYRSLSRGELHFLETNDETNHLVYTKTYEQETVIFLLNNSNRKLDITLPLSVKRKKLTDLWTNKQFVSEENEWTVTLAPYGFLMFLVE

SEQ ID NO: 39474 - protein, 444 aa, Clostridium thermocellum ATCC 27405
MKLLAGVMEQVIKRNPNEPEFHQAVREVLESLEIVAEKNPEYLKAGIFERIVEPERQIIFRVPWVDDNGKVQVNRGFRVQFNSAIGPYKGGIRFHPSVNLGIIKFLGFEQIFKNSLTGLPMGGGKGGSDFDPKGKSDGEIMRFCQSFMTELYRHIGPDTDVPAGDIGVGAREIGYMFGMYRKIRNEFTGVLTGKGLTWGGSLVRTEATGYGLCYFMEEAMKTIKGKSFEGATVVISGSGNVAIYATEKAQQLGAKVVALSDSNGYVYDPDGIKLDTVKQIKEVERKRISEYVKYHPNAKYTEGCSGIWSVKCDVALPCATQNELDGNAAKTLVENGCYAVGEGANMPCTPEAIDIFMKNGVLYAPGKASNAGGVATSGLEMCQNSMRYSWSFEEVDAKLKDIMVNIFRNVRAVAKEYGQEDNLVLGANIAGFLKVANAMMAQGV

SEQ ID NO: 39475 - protein, 253 aa, Arthrobacter ilicis
MASSVGNDFEGLAALVTGGASGIGAAIADRLAAGGAKVAVLDLAPETSPHFGVQCNVADDASVRTAVERVVQQFGRLDIVINNAGIGAQGDIAANDDDEWLRVLNVNVVGIARVSRAALPHLRESPAAAIVNTCSIAATAGLPQRALYSASKGAVLSLTLAMAADHVREGIRVNCVNPGTVDTPWVGRLLDSAADPAGERAALNARQPHGRMVVPAEVAGAVAYLASPLSGSTTGTSLAVDGGMQGLRLRPVQ

SEQ ID NO: 39476 - protein, 270 aa, Oryza sativa
MGRGRIEIKRIENTTSRQVTFCKRRNGLLKKAYELSVLCDAEVALIVFSSRGRLYEYSNNNNVKATIDRYKKAHACGSTSGAPLIEVNAQQYYQQESAKLRHQIQMLQNTNKHLVGDNVSNLSLKELKQLESRLEKGIAKIRARKNELLASEINYMAKREIELQNDNMDLRTKIAEEEQQLQQVTVARSAAMELQAAAAAQQQQQNPFAVAAAQLDMKCFFPLNLFEAAAQVQAVAAQRQQIIPTELNLGYHHHLAIPGATAADAPPPHF

SEQ ID NO: 39477 - protein, 149 aa, Triticum aestivum
  misc_feature (100)..(100): Xaa can be any naturally occurring amino acid
  misc_feature (124)..(124): Xaa can be any naturally occurring amino acid
  misc_feature (138)..(138): Xaa can be any naturally occurring amino acid
  misc_feature (145)..(145): Xaa can be any naturally occurring amino acid
  unsure (1)..(149): unsure at all Xaa locations
CSTASSSSSWPALPVLDRSFIAAAAATDESAVVSPDAAPDVDAEFGFQRHDFGKEKLAGTVEFHERHLFLCYQGPQEWRSHVEAIYSDQLPGLLAAAIEXRKPNLKKITKLTICEAKDSMEAAXGDILIFPDMIRYRXLTNSDVXNLLM

SEQ ID NO: 39478 - protein, 629 aa, Cryptococcus neoformans var. neoformans JEC21
MLSAALRVLARAAAIQRAEAAARTATAHSSPAGSLTALDRLIDAAPHHPPPPAPGTHPADKGHGISLPLSLKRGYRGPVKYVQPGPRPKPETVESVESVESVRPIETVKSSPLTAIPLTKPLGPAEPAEPAEPAEPVEPTRPAETVNAATVDVDADTPPAQPVPPIVKQLEAAAEAEAEAAEDDETPVILRASRVPASRLGRLFHYGSLAASLSWGAASESIRRSTGGNSSGSVFMSDANIRRLVSTLGRMRGAALKLGQFMSIQDNHMLPPEIEQVLHQVQAHANYMPDWQMDKVLRDELGADWQANLFTQFDRTPIASASIGQVHRAVLKDGRQVAVKIQFPGVASSIESDLSNLSLLLRTSALLPKGLYLQNTIAVMRRELEDECDYIREAAAGKKFAHLLAGDPFFIVPHVVDEATTGKVLTTEWMDGKPLSRVKNLSQETRDLIGTHILRLCLCELFQFRFMQTDPNWANFLFTPASSSAPPHIQLIDFGASREYTKQFMDGWYRLLKSALEGDREKMRVESLSLGYLTGQENDEMVQAHLDSMALVASPFAHHGPYPFANQTITDSIRALIPIMLKHRLTPPPQETYSLNRKLSGAFLMCAKMRANVDCRKLWEEQVGGYKQG

SEQ ID NO: 39479 - protein, 404 aa, Schizosaccharomyces pombe
MSFRNSSRMAMKALRTMGSRRLATRSMSVMARTIAAPRMRWAPRMTAPLMQTRGMRVMDFAGTKENVWERSDWPREKLVDYFKNDTLAIIGSGSQGHGQGLNARDQGLNVIVGVRKDGASWKQAIEDGWVPGKTLFPVEEAIKKGSIIMNLLSDAAQTETWPKIAPLITKGKTLYFSHGFSVIFKDQTKIHPPKDVDVILVAPKGSGRTVRTLFKEGRGINSSFAVYQDVTGKAQEKTIGLAVAVGSGFIYQTTFKKEVISDLVGERGCLMGGIPGLFLAQYQVLRERGHSPAEAFPETVEEATQSLYPLIGKYGLDYMFAACSTTARRGAIDWTPRFLEANKKVLNELYDNVENGNEAKRSLEYNSAPNYRELYDKELEEIRNLEIWKAGEVGRSLRPEHNKH

SEQ ID NO: 39480 - protein, 243 aa, Oryza sativa
MAMDAERRQAELIEQFSAQAAALSSSAPQLAALVLEATSHPALFAFSELLSLPALSKLTGTQYASSLDVLRLFAYGTLKDYKSNSGNLPALLPDQVRKLKQLSVLTLAESTKVLPYDQLMQELDVSNVRELEDFLINECMYSVQFATGRDLTPDQLNNMIDTLSDWLGTSDNLLHQIQEKIKWADTMSEVNKKHQKEFEDKVEEAKKSIKEATTNGIVSMAYLPASPLVEVLTPYLETFWHQS

SEQ ID NO: 39481 - protein, 492 aa, Glycine max
  misc_feature (193)..(193): Xaa can be any naturally occurring amino acid
  unsure (1)..(492): unsure at all Xaa locations
MDPYKHRPSSAFNSPFWTTNSGAPIWNNNSSLTVGARGPILLEDYHLVEKLANFDRERIPERVVHARGASAKGFFEVTHDISHLTCADFLRAPGVQTPVIVRFSTVIHERGSPETLRDPRGFAVKFYTREGNFDLVGNNLPVFFVRDGMKFPDMVHALKPNPKNHIQENWRILDFFSHFPESLHMFTFLFDDXGVPQDYRHMDGFGVNTYTLINKAGKAVYVKFHWKTTSGIKCLLEEEAIKVGGANHSHATQDLHDSIAAGNYPEWKLFVQTIDPEHEDKFDFDPLDVTKTWPEDIIPLQPVGRLVLNKNIDNFFAENEQLAFCPAIVVPGVYYSDDKMLQTRIFSYADSQRHRLGPNYLQLPANAPKCAHHNNHHEGFMNFIHRDEEVNYFPSRYDPVRHAERFPIPPAICSGRREKCGIEKENNFKQPGERYRSWAPDRQDRFARRWVDALSDPRVTHEIRSVWISYWSQADRSLGQKIASHLSTRPNI

SEQ ID NO: 39482 - protein, 370 aa, Shewanella sp. ANA-3
MRVPSMIIKAIPTNIITGFLGVGKTSLIKQLLKTKPEGETWAVLVNEFGEVGIDAGLMDASDSGVQIREVAGGCMCCAAGVPTQVAINQLIARAKPDRLLIEPTGLGHPNEIIKVLSAPHYHNVIRLQSTLCLIDARKLRDERYRGHDNFIQQLHVADVIVTTKTDLYPEFEAAEGGHLADDLSQYLNELQLSDTRVIEHNTSQGLSETLIGSLKQSRRQKASMGKSAVFTPVAASTSLLRKSGDSLGAQGVFAEGASEQAFKFDARGLVRKHNQGEGCFSCGWVIEPMQEFDFDKLMQFISAQTQGHSALLRLKAVMITSDGIAGINWSDGDMAVTELDDSLDSRLEMISTQALNWDEIEQGLLGCLAR

SEQ ID NO: 39483 - protein, 613 aa, Bacillus anthracis str. A2012
MKKVGFFQSIHLKFVLIYMLLILIAMQVIGVYFVRELEKSLVQGFRDSLTQQTNLLSYNLKQEFKKSYTKAETESTDETIKTSIRKFASDRKKDIQEVSVFDANRKLLAISDESKQNKVNRTSTDIAVQRVLVQKKPEVKIEKDGRTGHRVQVMITPIMDDNNKDALGAIYVVASMEDVYKQMKDINQIFATGTVIALLVTAVLGILLAQTITRPISDMRRQAIEMAKGNYSRKVKVHSHDEIGQLALSFNNLSKKLQQARSSTESERRKLSSVLSHMTDGVIATDRKGDIILLNDPAEKMLNVSRETALDQSVLEVLGIQEEFTLDHLYEEPDSVLLDFSTRNEPYILRASFSVIQKETGKANGLIAVLYDVTEQERIERERREFVANVSHELRTPLTTMRSYLEALTDGAWQDPNIAPQFLTVIQEETERMIRLVNALLQLSKLDSTEHRLMKEWVDFTDFFNNIIDRFEMSKEQNVSFKRSFSKKSRFIDMDTDKITQVLYNIISNALKYSPEGGTVTYRLRDRGELLEISVSDQGMGIPKENVDKIFERFYRVDKARSRQMGGTGLGLAIAKEMIEAHGGSIWAKSEEGKGTTIYFTLPMAADEEDEWE

SEQ ID NO: 39484 - protein, 469 aa, Pseudomonas syringae pv. phaseolicola 1448A
MSETTAPSGELKRGLKNRHIQLIALGGAIGTGLFLGSAGVLKSAGPSMILGYAICGFIAFMIMRQLGEMIVEEPVAGSFSHFAHNYWGGFAGFLSGWNCWLLYILVGMSELTAVGKYIHYWLPDIPSWVSAAAFFILINAINLTNVKVFGETEFWFAIIKVVAIIGMIALGSYMLVSGSGGPQASVSNLWEHGGFFPNGVGGLVMALAIIMFSFGGLEMLGFTAAEAEQPKTVIPKAINQVIYRILIFYIGALVVLLSLTPWDSLLASLNASGDSYSGSPFVQVFSMLGSDAAAHILNFVVLTAALSVYNSGTYCNSRMLVGMAEQGDAPRALAQVDRRGVPVKAIFASAAVTVVAVLLNYFVPQQALELLMSLVVATLVINWAMISYSHLKFRQHMNRTAQVPLFKALWYPYGNYVCLAFVLFILGIMLMIPGIQISVYAIPVWLAVMWVCYRAKNRRSVVMNAETGK

SEQ ID NO: 39485 - protein, 277 aa, Glycine max
MVYGGAMCAHAHKFLLSPRALNLCRQNTTRLQQFQTLTPLHSQSLPFNFKNSATPFKPTLIRLSALSNDGSGGNGPHGGAGGGGGSDGPNSGGAGDGGGKWSFLSWYLALLGKYPVAVKALTSSILNLIGDLICQLVIDQVPSLDFKRTFVFTFLGFALVGPTLHFWYLYLSKLVTLPGASGALLRLVLDQFLFSPIFIGVFLSTLVTLEGNPSRAVPKLKQEWFSAVLANWKLWIPFQFLNFRFVPQQFQVLAANVIALVWNVILSFMAHKEVLPK

SEQ ID NO: 39486 - protein, 150 aa, Triticum aestivum
FGRLQQLASVAGDVLLGKEKIQKVLLSRLTETVVMWLSNEQEFWDVFEDESIQLQPSGLQQLILDMHFLVEIAVCGRYPHRPVQQLVSVIITKSNCSFLGKGGDPQSALPEDEWFLRLPRLQSTTHAKDSGIRPRTPIAHMTTDTEDQIH

SEQ ID NO: 39487 - protein, 404 aa, Haemophilus somnus 2336
MRVFPKSDKLEHVCYDIRGPVHQEALRLEEEGKKILKLNIGNPAPFGFEAPDEILVDILRNLPAAQGYCDSKGLYSARKAIVQYYQSKNILSATVNDVYIGNGVSELITMSLQALLNDGDEVLIPMPDYPLWTAAATLAGGKAVHYLCDEQADWFPDVADIKSKVTSRTKAIVIINPNNPTGAVYSKELLLDIVEVARQNGLMIFADEIYDKILYDNAVHHHIAALAPDLLTVTFNGLSKSYRVAGFRQGWMILNGPKQQAKGYIEGLDMLASMRLCANHPMQHAIQTALGGYQSINEFILPGGRLLEQRNKAYELINQIPGLSCTKPMGALYMFPKIDTKKFNIYDDEKMVLDLLRQEKVLLVHGRGFNWQQPDHFRIVTLPYVNQIEDALGRLAKFLTHYRQ

SEQ ID NO: 39488 - protein, 1560 aa, Arabidopsis thaliana
MAPLPFIPEQTRSQTRLSSDTKKKNRNKKTSQPPPQTQKIKQKTVPSTSSSSSWSQIKNLLSCKQIEGPRVHEPSKITSSSCGSSLCKFSDVIYGNARVIHRSDHSPESSNLGQDTRLLTRKPISTRGSSSSVRSNGCGAYTSYSTSKAMHFRNLSGCYECHMIVDPSRYPIAPRICACPQCGEVFPKLESLEHHQAVRHAVSELGPEDSGRNIVDIIFKSSWLRKDSPIYKIERILKVHNTQRTIQRFEDCRDAVKSHAHASTRKEARSAADGNELLRFHCTTVSCSLGSRGSTSICSAIPGCRVCTIIRHGFHAKTVRVGNGEGKEEIKGVRTTASSGRAHDALRCFDQRRAMLVCRVIAGRVRRVQSDVPEDESGSGSYDSVAGAAGVYTNLDDLVVYNPKAILPCFVVIYKGNVYDLAGNLDFQGMTVEELQNLMSFRCSATDQDMLTREVTSEENQKVLFAMPSNKFPGPDGYTSEFFKATWSITGQDFIAAIKSFFIKGFLPKGLNATILALIPKKDEATLMRDYRPISCCNVIYKVISKIIANRLKVMLPTFILQNQSAFVRERLLIENVLLATELVKDYHKDSISPRCAMKIDISKAFDSVQWQFLLNTLEALNFPENFCHWIKLCISTATFSVQVNGELAGFFGSKRGLRQGCALSPYLFVICMNVLSHMIDVAAVHRNIGYHPKCKKLSLTHLCFADDLMVFIDGQQRSVEGVINIFKEFAGKSGLHISLEKSTLYLAGVSELNRNNILSAFPFASGQLPVRYLGLPLLTKQMTTADYSPLLDKVRSKISSWTARSLSYAGRLALINSVIVSLSNFWMSAYRLPAGCIKEIEKLCSAFLWSGPELNPKKAKITWTSLCKLKQEGGLGIKSLLEANKVSCLKLIWRLVSRQSSLWVNWVWTYIIRKGSFWSANDRSSLGSWMWKKLLKYRDVAKSMCKVEIKSGSSTSFWYDNWSQLGQLVDVTNARRTIDMGIPLAATVATVLASHRTKHHRTAIYNKIEAEIQSILQRERSGAPDIFLWRSSGDNFRQSFITKVTWHNIRVIHTHRQWYKGVWFSYNTPKYSFLLWLAIHDRLSTGDRIKKWNSGQQVNCVLCGNVEESRNHLFFSCHYTTAIWDNLTRRLLSHEYSTDWDRLLALLCSSTMSKDSLFLFRYVFQASLYHVWRERNARRHGEAHSTTTRLIKLIDKTVRNRISSINDVGDHSYDNCLRDPNGAALRFVNVLMLKTVFIRNQIINTEWGGFSKVLPQTIFDQEMDAESPNRGEHLYEKMVSGMYLGEIVRRVLLQMCETSDLFGQFVPGGNLSKPFALKTEHLNKMQEDTTDDLQTVGLVLYNILEERRRVVEVCDTVVKRGGRLAGAGVNARIKQKGIKPHVVHIAINELGRYWRKVLARHFGRTSKRATQDGWANEVLRTDGRTDELLDGPAGEILRTAACDGRTDELLEADRLARYFGRLLETGELMSYSLSLSVLLARYFGRKIEEETKRMDSGKRTVVAMDGSLYENYPQYQQYMEEALVELLGDNRSYIVIIHAKDVSGLGAALLAATNSIYST

SEQ ID NO: 39489 - protein, 717 aa, Brassica napus
MEELDRSRAFAKDVKRIVVKVGTAVVTGKGGRLALGRLGALCEQLAELNSDGFEVILVSSGAVGLGRQRLRYRQLVNSSFADLQKPQHELDGKACAGVGQSSLMAYYETMFDQLDVTAAQLLVNDSSFRDKEFRKQLNETVKSMLDLRVIPIFNENDAISTRRAPYQDSSGIFWDNDSLAALLALELKADLLILLSDVEGLYTGPPSDPNSKLIHTFIKEKHQDEITFGDKSRLGRGGMTAKVKAAVNAAYAGIPVIITSGYAAENIDKVLRGLRVGTLFHQDARLWAPITDSTARDMAVAARESSRKLQALSSEDRKQILYSIADALEANEKTIRAENELDVATAQEAGLEESLVARLVMTPAKISSLAASVRKLADMEDPIGRVLKKTEVADGLVLEKTSSPLGVLLIVFESRPDALVQIASLAIRSGNGLLLKGGKEARRSNAILHKVITDAIPETVGGKLIGLVTSREEIPDLLKLDDVIDLVIPRGSNKLVSQIKNTTKIPVLGHADGICHVYVDKACNVDMAKRIVSDAKLDYPAACNAMETLLVHKDLEQNAVLNELIFALQSNGVTLYGGPKASKILNLPEARSFNHEYCSKACTVEVVEDVYGAVDHIHRHGSAHTDCIVTEDPEVAELFLRQVDSAAVFHNASTRFSDGFRFGLGAEVGISTGRIHARGPVGVEGLLTTRWIMRGKGQVVDGDNGITYTHQDIPIQA

SEQ ID NO: 39490 - protein, 243 aa, Streptomyces coelicolor A3(2)
MAIIETEAALHEAHRDNHTHRDVNGGWLRPAVFGAMDGLVSNLALMTGVAGGTASQQTVVISGLAGLAAGAFSMAAGEYTSVASQRELVEAELDVERRELRKHPADEEAELAALYEARGVEPELAREVARQLSADPEQALEIHAREELGIDPSDLPSPTVAAVSSFGSFALGALLPVLPFLLGAGALWPAVLLALAGLFLCGAVVAKVTARSWWYSGLRQLALGGAAAGVTYLLGSLFGTAVG

SEQ ID NO: 39491 - protein, 331 aa, Brassica napus
  misc_feature (34)..(34): Xaa can be any naturally occurring amino acid
  unsure (1)..(331): unsure at all Xaa locations
PGVVVDLPTLTEKDKEDIMKWGVPNQIDMIALSXFVRKGSDLVQVRKLLGDHAKNILLMSKVENQEGVANFDDILVNSDAFMIARGDLGMEIPIEKIFLAQKVMIYKCNIQGKPVVTATQMLESMIKSPRPTRAEATDVANAVLDGTDCVMLSGETAAGAYPELAVRTMAKICVEAESTLDYGDVFKRIMQYSPVPMSPLESLASSAVRTANSARATLIMVLTRGGSTARLVAKYRPGMPILSVVVPEMKTDFFDWSCSDESPARHSLIFRGLIPVLYAGSARASHDESTEEAIEFATQHGKEKQLCKTGDSVVALLRVGNASLIKILTVK

SEQ ID NO: 39492 - protein, 318 aa, Haemophilus somnus 2336
MMSKTLTVLGSINADHVISVPHFAKPGETLSGKQYHIAYGGKGANQAVAAARLADFSQGATVNFVGCIGSDDIGRAMKKAFAQDGINVATITEIPNEMTGIAMIQVADSGENSIVISAGANAYLTPEIVDKFATEIERADYLLMQLETPLNAILEAAKLAKKHGATVVLNPAPANQLPDELLSLLDMITPNETETEILTGVKVTDEQSAAKAASVLHQKGVATVLITLGSKGVYVSRKSSTQELGQNKVIAGFRVNAVDTTAAGDTFNGAFLTALLENKSLDEAIRFAHAAAAISVTRQGAQPSIPTRRETLDFLAQH

SEQ ID NO: 39493 - protein, 590 aa, Bradyrhizobium sp. BTAi1
MCGICGEVRYSSPPLLHALSRMNDAMQARGPDAAGLYVQGGVALGHRRLSILDLSAAAQQPMIDAAFGLGIVFNGCIYNFRELRTELQAKGYRFFSDGDTEVILKSYHAWGKGCVQRFKGMFAFALWERDSGRVVLARDRLGIKPLYYAEGAGFFRFASSMPALLAAGDVDTSLDPTALHHFFSFHAAVPAPRTILNGVKKLAPATLLTIDPDGTQHRERYWSFNVGEQRPTDRAMSQEEWSDALLDEMTVAVDRRRVADVPVGVLLSGGLDSSLLVALLSKLGHQDIRTFSIGFDAVDEHSGDEFRYSDIIARTFGTDHEQIRIGGDRALEALPNAIAAMSEPMVSHDSVAFYLLSSEVAKRVKVVQSGQGADEVFGGYSWYPGFLAANDAVHQYQNAYFDWQHGDLRRLLAPDLLGDDVSLELVERFFADHAGVSAVDKVLQIDTEIMMVDDPVKRVDNMTMAFGLEARVPFLDHEVVELAARMPAELKVTHGGKHILKEAARRCVPAEVIDRPKGYFPVPSLRYLRGPFLAYVRDVLSDEKARSRGLYQRDFIDHMLQNPEAEMSPKGHSRLWQAGLLEAWLQTHGL

SEQ ID NO: 39494 - protein, 277 aa, Agrobacterium tumefaciens str. C58
MHNVTANGATIPALGFGTFRIPGSDVLRIVPHALKVGFRHVDTAQIYGNEAEVGEAIANSGVARGDIFLTTKVWVENYGHDAFIKSVDESLKKLKTDYVDLLLLHWPNEAVSLAEQIGALNEVKEAGKVRHIGVSNFNTELMAESVKLSRAPIVTNQIEYHPYLSQDVVIAAARKAGMSVTGYFGMADGKVFNDPVLRDIGARHGKSVAQVVLRWLVQQEGVIALSKTVGEARVLENFAIFDFALSADEMAAIHALAVPGGRIVSPDGLAPVWDKAA

SEQ ID NO: 39495 - protein, 141 aa, Haemophilus influenzae Rd KW20
MMTERTFSIIKPDVVKRNLIGAILTRFEQNGFKIIASKMVRLTREQAEGFYAEHQGKEFFVPLVEYMMSSPIVVSVLEKENAVKDYRTLIGTTNPETAAEGTIRKDFALSQRENSVHGSDSIESANREIAYFFTNSEIFER

SEQ ID NO: 39496 - protein, 134 aa, Zea mays
MRKHRIVSLVAALLILLALAVSSTRNAQEDSMADNTGTLAGGIKDVPGNENDLHLQELARFAVDEHNKKANALLGFEKLVKAKTQVVAGTMYYLTIEVKDGEVKKLYEAKVWEKPWENFKELQEFKPVEECASA

SEQ ID NO: 39497 - protein, 257 aa, Lecanora muralis
  misc_feature (4)..(4): Xaa can be any naturally occurring amino acid
  misc_feature (26)..(26): Xaa can be any naturally occurring amino acid
  misc_feature (40)..(40): Xaa can be any naturally occurring amino acid
  unsure (1)..(257): unsure at all Xaa locations
PFIXPHYAAYMLKYDSQHGQFKGTIXVKGNDLIVNGTTVXFYTEKDPANIPWKDTGAYYIVESTGVFTTTEKAKAHLKGGAKKVVISAPSADAAMFVMGVNEKEYKSDIEIISNASCTTNCLAPLAKVMHDNYTIIEGLMTTIHSYTATQKTVDGPSAKDWRGGRTAAQNIIPSSTGAAKAVGKVIPSLNGKLTGMSMRVPTSNVSVVDLTCRLEKAVSYDEIKATMKKASEGDLKGIMAYSEDALVSTDLNGDNHS

SEQ ID NO: 39498 - protein, 501 aa, Glycine max
  misc_feature (205)..(205): Xaa can be any naturally occurring amino acid
  unsure (1)..(501): unsure at all Xaa locations
RVSYVGPPPPLNHHFKEEIRSVLDEIFRYWMQGVEDIFLDPTTCAMAFRMLRLNGYDVSSDPFYQYSEDKFAESLKGYLKDVGAVIELYRASQAIIHPDESILVRQSLWTKHLLKQESSPYRLYADKLRSYVDLEIKDVLNFPYHANLERLLNRRSMEHYNTVETRILKASYRSCNLANQEILKLAVEDFNICQAIHIEELKQLXATIFSPELSDARISWAKSGVLTTVVDDFFDVGGSEEEHVNLIQLVEKWDVDINTVCCSETVKIIFSAIHSTVCEIGEKSVKQQGRNVKNNVIKIWLNLVQSMFREAEWLRTKTVPTIGDYMENAYISFALGPIVLPALYLVGPKLSDEVTENHELNYLYKLMSTCGRLLNDIHSFKRESEEGKLNVLALRIAHGNGVITAEDATEEMKGIAEEKRRELLRLILQEKGSVVPRECKDLFWKMIKVLHLFYMKDDGFTSHEMHSSVNAVLKKPVILNELLVHSQQNLSPVKATNDLML

SEQ ID NO: 39499 - protein, 274 aa, Zymomonas mobilis
MSRIANTFAKTKKENRAALIAFLTAGDPSIEATPALLDSLVENGVDIIELGMPFSDPMADGPAIQKANLRALAAKTGYNDIFRIATEFRKRHPETPLILMGYANPMTFKGSDSFAASAKEAGVDGIICVDIPPEEDATLGVAVREKGMDMIRLATPTSDEARLKIILDGASGFLYYVSVAGVTGLQQATEASIDAALDRIKAVTDLPVAVGFGIRSPEQAAAIAKKADAVVVGSAFVSCIEKAVTNRQDPNAALEKLAKELSTAISDARKEAAL

SEQ ID NO: 39500 - protein, 401 aa, Zea mays
MSLSWWWTRSVGAVRERKDELAGVPEHSFQSVALVVGSTGIVGASLVDILPRSDTPGGPWKVYALSRRPPPPWSLPSSSSLTHIHVDLTDFAAVAEALTPLTDITHVFYVAWSPRATEAENQEANSAMLRNVLSVVVPNCPALAHVSLQTGTKHYLGPFELIGKIPTPDPPYTEDVPRLDCPNFYYDQEDVLFAAVSRRGGAVSWSVHRPNLILGFSPRSFFNVVCSLCVYAAICRKEGVALRWPGCLGSWESFSNASDADLIAEQHIWAAVDPMAKNQAFNSNNGDLYNWKTLWPVLAARFGLEWTGYDGEEKQFKVSEAMAGKEAVWAEIVRENGLVETRLRDVADWWLIDVVVYEHGANWKLLDSMNKSKEHGFLGFRDTVKSFNKWIDKMKACKIVP

SEQ ID NO: 39501 - protein, 428 aa, Lemna paucicostata
MSFRSILSDVRDSIGSFSRRRGAEVRISGVSDNHRGRNRVTAGDFPGEIGGEIPAIYQSRWAGLPPELLRDVIKRLEESESSWPARKHVVACAAVCTAWREMCKEIVSGPEFCGKLTFPVSLKQPGPREGTIQCFIKRDKSKSRYHLFLGLSPTLPAENGKFLLSQSASRALPARNTSSPWNADDISRSSSTYIGKLRSNFLGTKFIMFDTQPPTRHCRPAPSSGRVSRRFYSKVSPKVPSGNYAIAQVTYELNVLGKRGPRRMHCTMNSIPSSALDAGGRVPAAPERILSRSLEDSFRSVSLSKDLGSSRFSEFGGEMEREEEEEGDRKKSGPLVLKNKAPRWHEQLQCWCLNFRGRVTVASVKNFQLIADGQATAAQAGASEHDKIILQFGKVGKDTFTMDNRYPLSAFQAFAICLSSFDTKLACE

SEQ ID NO: 39502 - protein, 236 aa, Lepraria jackii
  misc_feature (6)..(6): Xaa can be any naturally occurring amino acid
  misc_feature (10)..(11): Xaa can be any naturally occurring amino acid
  misc_feature (20)..(21): Xaa can be any naturally occurring amino acid
  misc_feature (45)..(45): Xaa can be any naturally occurring amino acid
  misc_feature (47)..(47): Xaa can be any naturally occurring amino acid
  unsure (1)..(236): unsure at all Xaa locations
AYMLKXDSQXXQFKGTIEVXXSDLIVNGQKVKFYTEKDPANIPWXDXGAYYIVESTGVFTTTDKAKAHLKGGAKKVVISAPSADAPMYVMGVNQKTYKSDVDVISNASCTTNCLAPLAKVMHDNFTIIEGLMTTIHSYTATQKTVDGPSAKDWRGGRTAAQNIIPSSTGAAKAVGKVIPDLNGKLTGMSMRVPTSNVSVVDLTCRIEKAVTYEEIKEAMKKASNGELKGIMSYSED

SEQ ID NO: 39503 - protein, 52 aa, Crocosphaera watsonii WH 8501
MDAVRIICAIFLPPLGVFLQVGIGWPFWINILLTLFGYFPGVLHAVWVIAKK

SEQ ID NO: 39504 - protein, 397 aa, Zymomonas mobilis subsp. mobilis ZM4
MVADLTSDISESQEQETETNSANNNGAVFRPENCPRLVIKIGSSLLVDQRGQVRRDWLQTVAYDIAKLHQAGQQIIVVSSGAIALGARRLNLPRGGRASLEDAQASASVGQILLSQCWAELLGACSLDSSQILLTLDDLEDRRRYLNVSATLDRLLSLGVVPVINENDSIATAEIRFGDNDRLAARIGQASHASGVILFSDVDGLYTANPMKDPNAKRIDRVEHIDNSTEAMASSDSASGMGSGGMASKVEAARIATYSGVNLAITTGKRPSPLTMFLDDGAGTLFTADESASAHKTWLAGRLTAHGQVYIDQGAVEALHDGNSLLPAGVCSIEGKFNRGDVVDILDQEHNLIARGLIEYDSEDSAQITGKRSQEIADILGYEARTALIHRNHMVML

SEQ ID NO: 39505 - protein, 92 aa, Glycine max
MASIIMSFAPATGRVFAATAAKGAGGSKEEKGLLDWILGGLQKEDQLLETDPILKKVEEKNGGTTSNTGRNKNSVAVPQKKKGGFGGLFAKN

SEQ ID NO: 39506 - protein, 330 aa, Bartonella taylorii
STASCESKITYIDGNKGILLYRGYPIDQLAEKGDFLESCYLLLYGELPTKQEKHDFDRCIMQHTMVHEQFARFFHGFRRDSHPMAVMVACLGAMSAFYHDSIDITDPQQRMIASVRLISKVPTLAAMAYKYSIGQAFVYPRNDLSYAANFLRMCFCVPCEEYKINPVLTRAMDRIFILHADHEQNASTSTVRLAGSSGANPFACIAAGVACLWGPAHGGANEACLKMLQEIGSVERIPEFIARAKDKNDPFRLMGFGHRVYKNYDPRAKIMQKTCHEVLKELNIQGDPLLDIAMELEKIALNDEYFVEKKLYPNVDFYSGITLKALGFPT

SEQ ID NO: 39507 - protein, 329 aa, Chlorobium tepidum TLS
MRRRPATIKRSTLMGFLSKIFGKKEVELKRPQVREDAALIKTLVGHEDRVLGVRFSPDGKKLVSGSFDEKVKLWDVETGNAIHTMSGHTTWVKCVDYSPKGDKVASGSIDSTVRIWDVATGQCLHVCKGHDTEVRMIAFSPDGKTVASCSRDTTIKFWDTETGNEVKTLFGHKSYIECIAFSADGKKLVSCGEEPVVKIWDLETGKNIANYPTGDTLSHFVSFSPDGSQIALCGRDAKVKVLDAATGQMLKVLEGHEDGVRALCYNPAGTLIASAANDESVRLWDVAKGALVHTYRGHTHEVQSVAFSPDGKVIASGSDDFKIKLWGVV

SEQ ID NO: 39508 - protein, 330 aa, Bartonella taylorii
STASCESKITYIDGNKGILLYRGYPIDQLAERGDFLESCYLLLYGELPTQQEKHDFDRCIMQHTMVHEQFARFFHGFRRDSHPMAVMVACLGAMSAFYHDSIDITDPQQRMIASVRLISKVPTLAAMAYKYSIGQAFVYPRNDLSYAANFLRMCFCVPCEEYKINPVLTRAMDRIFILHADHEQNASTSTVRLAGSSGANPFACIAAGVACLWGPAHGGANEACLKMLQEIGSVERIPEFIARAKDKNDPFRLMGFGHRVYKNYDPRAKIMQKTCHEVLKELNIQGDPLLDIAMELEKIALNDEYFVEKKLYPNVDFYSGITLKALGFPT

SEQ ID NO: 39509 - protein, 190 aa, Magnetospirillum magnetotacticum MS-1
DRERDGFVMGEGAGIVVLEEYEHAKARGAKIYAEVIGYGLSGDAYHITSPAPDGDGGFRCMTAAVKRAGIDPSEIDYINAHGTSTPLGDELELKAVERLLGASASKVSMSSTKSAIGHLLGAAGAVEAIFSVLAIRDGVMPPTLNLDNPSVETQIDLVPHEAKRKRVDTVLSNSFGFGGTNASLLMRRVA

SEQ ID NO: 39510 - protein, 443 aa, Glycine max
MAQEQEFRTSTPLPKCDAYFETIQSRKKLPLSLQETLTDAFAKIPVSSFPAVPSGKVIEILADTPVGEAVKILSESNILAAPVKDPDASNSSDWRSRYLGIIDYSAIILWVLEGAELAQAALLAGTATAAGVGAGAAGALGALALGLTGPAAIAGLTTAAAGAALAGGVAADKVMAKDAPQAADNLGEDFYKIILEEEPFKSTTVRSIIKSYRWAPFVPVARNSAMLTVLLLLSKYRLRNVPVIEPGRPDIVNFITQSAVVQGLEGCKGRDWFDCIAEKCISDLGLPFMSTDEVISIQSNELILEAFKQMKDNRIGGLPVIEGPKKRIVGNLSIRDIRHLLLRPELFTNFRKLTVMDFMKKIVSSSLQTGKVTQPITCKPDSTLQGVIHTLASQSIHRIYVVDGHDEVVGVITLRDVISCFVTEPPYNFDDYYGFAVKEMLNQ

SEQ ID NO: 39511 - protein, 468 aa, Mesorhizobium loti MAFF303099
MAYDVVIIGSGPGGYVCAIKAAQLDLKVAVVEKNATFGGTCLNIGCIPSKALLHASEMFAEAGHSFDTLGVEIPAPKLNLTKMMAHKDATVASNVNGVAFLFKKNKIDSFRGTGKVVAAGKVSVTGEDGKVEEIETKNIVIATGSDVAGIPGVKVDFDEKIIVSSTGALSLDKVPGHLVVVGGGVIGLELGSVWARLGAKVTVVEFLDTILGGMDGEVSKQFQRMLSKQGFEFKLGAKVTGVAKAKKGATVTFEPVKGGAAETIAADVVLIATGRRAYADSLGLKEAGVEVDERGRVKTDGHLKTNVPGIYAIGDVIAGPMLAHKAEDEGVAVAETIAGQAGHVNYEVIPSVVYTSPEIASVGKTEEELKKAGIDYKVGKFPFSANGRARAMLHTDGFVKILADKASDRVLGVHIVGFGAGEMIHEAAVLMEFGGSSEDLARTCHAHPTMSEAVKEAALATFFKPIHI

SEQ ID NO: 39512 - protein, 330 aa, Bartonella grahamii
STASCESKITYIDGDKGILLYRGYPIDQLAEKGDFLESCYLLLYGELPTQQEKNEFDRCIMQHTMVHEQFARFFHGFRRDSHPMAVMVACLGAMSAFYHDSIDITDPHQRMIASVRLISKVPTLAAMAYKYSIGQAFVYPRNDLSYAANFLHMCFAVPCEEYKTNPVLARAMDQIFTLHADHEQNASTSTVRLAGSSGANPFACIAAGVACLWGPAHGGANEACLKMLQEIGSIKRIPEFIARAKDKNDSFRLMGFGHRVYKNYDPRAKIMQKTCHKVLKELNIQDDPLLDIAIELERIALSDEYFIEKKLYPNVDFYSGITLKALGFPT

SEQ ID NO: 39513 - protein, 330 aa, Bartonella grahamii
STASCESKITYIDGDKGILLYRGYPIDQLAEKGDFLESCYLLLYGELPTQQEKNEFDRCIMQHTMVHEQFARFFHGFRRDSHPMAVMVACLGAMSAFYHDSIDITDPHQRMIASVRLISKVPTLAAMAYKYSIGQAFVYPRNDLSYAANFLHMCFAVPCEEYKTNPVLARAMDQIFTLHADHEQNASTSTVRLAGSSGANPFACIAAGVACLWGPAHGGANEACLKMLQEIGSIKRIPEFIARAKDKNDPFRLMGFGHRVYKNYDPRAKIMQKTCHEVLKELNIQDDPLLDIAIELEKIALSDEYFIEKKLYPNVDFYSGITLKALGFPT

SEQ ID NO: 39514 - protein, 330 aa, Bartonella grahamii
STASCESKITYIDGDKGILLYRGYPIDQLAEKGDFLESCYLLLYGELPTQQEKNEFDRCIMQHTMVHEQFARFFHGFRRDSHPMAVMVACLGAMSAFYHDSIDITDPHQRMIASVRLISKVPTLAAMSYKYSIGQAFVYPRNDLSYAANFLHMCFAVPCEEYKTNPVLARAMDQIFTLHADHEQNASTSTVRLAGSSGANPFACIAAGVACLWGPAHGGANEACLKMLQEIGSIKRIPEFIARAKDKNDPFRLMGFGHRVYKNYDPRAKIMQKTCHEVLKELNIQDDPLLDIAIELEKIALSDEYFIEKKLYPNVDFYSGITLKALGFPT

SEQ ID NO: 39515 - protein, 248 aa, Neurospora crassa
MSEQVDLTTIPISPEGGNTNGDAAAAKDDKTVTVFHDKEHFNVKHPLSNRWTLWFTKPSSGKGDNWNDLLKEVITFETVEEFWGVYNNIAPVSELALKSDYHLFKEGVRPEWEDPQNKHGGKWSYQFKEKRNVNIDEIWLHTMLAAIGETLEDEEDGEVMGVVVNVRKAFFRVGVWTRTIGKHIPGRGDGDISGGKGRSPEKGKEILMAIGRRFKEVLQLPPNEALEFSGHTESAHSGSSRARAKMTV

SEQ ID NO: 39516 - protein, 757 aa, Actinobacillus pleuropneumoniae serovar 1 str. 4074
MTTLHILGFPRVGAKRELKFAQERYWRKELAEQDLLDLAKALREKNWLHQAQADADFVTVGDFTFYDHILDLQVATGAIPARFGFDSQTLSLDQYFQLARGNKEQFAIEMTKWFDTNYHYLVPEFQKNTTFKANPTHYVNQIREAKAAGHQVKPVIVGPLTFLWLGKEKGEAFNRFDLLKQLVPIYFEILTALAAEGVEWIQIDEPALALDLPQEWLAAYQDVYAQLAKVNAKLLLATYFGSVAEHADLLKALPVDGLHLDLVRAPEQLSAFEDYPKVLSAGVIDGRNIWRANLNRVLDVLEPLKAKFNQRLWIAPSCSLLHTPYDLAVETQLQQNNPELYRWLAFTLQKVAELQVLKQALNAGRDAVTEQLNDSQTAADARANSNVIHKAEVAQRLANLPANADKRQSPFAERIKLQNKWLNLPLLPTTNIGSFPQTLEIRHARAAFKKGELSLADYEAAMKKEIEFVVRKQEELDLDVLVHGEGERNDMVEYFGELLDGFAFTKFGWVQSYGSRCVKPPVIYGDVTRPEPMTVRWSQYAQSLTDKVMKGMLTGPVTILQWSFVRNDIPRSTVCKQIGVALSDEVLDLEKAGIKVIQIDEPAIREGLPLKRADWDAYLQWAGEAFRLSYMGVKDDTQIHTHMCYSEFNDILPAIAGLDADVITIETSRSDMELLTAFADFKYPNDIGPGVYDIHSPRVPTAGEIEHLLRKALKVIPKERLWVNPDCGLKTRGWKETIEQLQVMVEVTKKLRAELAE

SEQ ID NO: 39517 - protein, 380 aa, Desulfovibrio vulgaris subsp. vulgaris str. Hildenborough
MEWTEERAAALREARCVVVKVGSAVLTTETGVNLAVIDSLAAQLSALQESGKRVVLVSSGAVAAGRSALRDCCEIAGMPHKQAASAVGQSRLMHHYDEAFARYGHLSAQVLLTRDDLRNRERFLNARNTFQALLDWGVIPVVNENDTVAVQELKFGDNDCLASLLLNVVEGDLYVNLTSASGVYADNPQTNPEAGILPCIEDVHTLDLDVMCGGKTSVGTGGMYSKLLAASRAAQLGVPTLILPGREPRILERAFSGEPVGTWVRPEARVVSRRKYWLAYQSEPSGTVTVDEGAARALLQQGGSLLPGGVCDVSGAFEPGALVRIAGPDGTVIAVGLSNYGDRDLVRIKGHRRHEVAAILGDAHFPEVVHRDNMLLDAVV

SEQ ID NO: 39518 - protein, 206 aa, Pyrococcus horikoshii OT3
MMLMPAKVVGEDKVKKQPSFVKPWLGLKYLFKKPVTIKIPDEKIEPAPKYRGFHTLDWKKCIGCNFCGQICPARAIEMTWIEVNGKLEKRPHPKIDYGRCTFCQFCVDVCPTGALGFIESYILTTTGKEEELQLFDWVPLPPDKFKELQDEYGDWRFPIERIEFNKETKEVTYYLRNGETFKFKIVGYGLKPPKPPSKPQQEKKEG

SEQ ID NO: 39519 - protein, 250 aa, Saccharomyces cerevisiae
MTTDNAKAQLTSSSGGNIIVVSNRLPVTITKKQQYGTVRVTQCRPEAGHGVGRVEEDVHFQWFGWPGLEIPDDEKDQVRKDLLEKFNAVPIFLSDEIETYTTTGSVILFYGRYSITILVRSISTRMRGSDNAKAQHQTFTNEIAKTMNHNDLIWVHDYHLMLVPEMLRVKIHEKQLQNVKVGWFLHTPFPSSEIYRILPVRQEILKGVLSCDLVGFHTYDYARHFLSSVQRVLNVNTLPNGVEYRADSLT

SEQ ID NO: 39520 - protein, 130 aa, Saccharomyces cerevisiae
MHKSIPFEELISLYAVSDVCLVSSTRDGMNLVSYEYIACQEEKKGSLILSEFTGAAQSLNGAIIVNPWNTDDLSDAINEALTLPDVKKEVNWEKLYKYISKYTSAFWGENFVHELYSTSSSSTSSSATKN

SEQ ID NO: 39521 - protein, 416 aa, Neisseria meningitidis MC58
MLNTRRVAVTGIGGITAFGRDWQSIQAAFKAEKNAVKYMDWHERFPELEAQLGAPIENYAPPKHWTRKQLRSMGRVSYLCVDAAEQALADAGLLGDESITDGRMGVACGSSSGSTKDIGDVGELLLTGTSRNFSANTYVRMMPHTTAANIGIFFGLKGRIIPTSSACSSGSQGIGYAYEAIKYGLTDMMLAGGGEEFFPSEVYVFDSLYAASRRNGEPEKTPRPYDANRDGLVIGEGAGIFVLEELEHAKRRGAIIYAELVGYGANSDAYHISTPRPDAQGAILAFQTALQHANLAPEDIGWINLHGTGTHHNDNMESRAVAAVFGNNTPCTSTKPQTGHTLGAADAIEAAFAWGIADRQSNPEGKLPPRLWDGQNDPNLPAINLTGSGSRWETEKRITASSSFAFGGSNCVLIIG

SEQ ID NO: 39522 - protein, 757 aa, Ustilago maydis 521
MTSTHRPSPLRLSDTTWTTNGIVDPSFSSSTASTSSLDLVPAPRASDLQMVLRTRDHAAYYDAASNELSLQKRSHPLQDDAGSNSTSHDQAPLVPRQAPQSSLQRLRRAEPLQSTRGEAVCPTCARSWPIGDPETLEARFDQRFPSSSAEHEPPCFIAPNYFRLLAQASTTPDTNSFPERPATPRNRFSSASGTSTPLPSGASTPPEPISNSCSAQGYYSRFFIELKPLGRGARGQVFLCQHVLNGNKLGKYAIKKIPVGDHAQSLLQSLNEVHLMESLHHENLIGYQHAWIESCQLTRWGPEVPTLFVLMMAANGGSLADWISRRAGEEVEGEADTGTSEDDKLNAGARGEQEKSKHEQGAVSPAERAKIERLKAALRQRRANRTSCSTTAQPRAPTLGRAPRSAPLSSGTAIHLLRTDEIYSLLKDIVSGLSFLHSRGILHLDIKPGNILLHWDDDALIPRAMLSDFGSSLLLHDNWTRVRSGHTGTMEYMSPEAVMVNPSTGKLDELGSKSDIWSVGMILHLLVFFRLPWGNMDDLGALRVEIARYQGFRRKEGVVESEKGNKGDEVLLGLLEQMLQVDAVKRPSCKDVLHVLAGAAQKASRDEASNKIHRRNRDEKSGSLALYRASALPPLPHALSSSDEREFATAARTIPPLGTLTLRSHRLPAETLNVVIAFFKIVSPHSAAVLFASSSAPAGSHAFKMDALALLILALALVDLATAGTRPHHIRRRINVVCGVAHLVLLFACVVKRVYRR

SEQ ID NO: 39523 - protein, 420 aa, Arabidopsis thaliana
MGENGAKRWNFGANEVVERSNSLTIRDYLNTLINCLDGGDVRPVIPLGHGDPSPFPSFRTDQAAVEAICDAVRSTKFNNYSSSSGVPVARKAVAEYLSSDLSYQISPNDVHITAGCVQAIEILISALAIPGANILLPRPTYPMYDSRAAFCQLEVRYFDLLPENGWDVDLDGVEALADDKTVAILVINPCNPCGNVFSRQHLQKIAETACKLGILVIADEVYDHFAFGDKPFVSMAEFAELVPVIVLGAISKRWFVPGWRLGWMVTLDPHGIMKDSGFVQTLINVVNMSTDPATFIQGAMPDIIGNTKEEFFSSKLEMVKKCAEICYEELMKIPCITCPCKPEGSMFTMVKLNFSLLEDISDDLDFCSKLAKEESMIILPGQAVGLKNWLRITFAVELELLIEGFSRLKNFTERHSKNQP

SEQ ID NO: 39524 - protein, 78 aa, Capsicum annuum
MAHSMRFFAIVLLLAMLVMATEMGPMRIVEARTCESQSHRFKGVCASETNCASVCQTEGFSGGDCRGFRRRCFCTRPC

SEQ ID NO: 39525 - protein, 458 aa, Oryza sativa (japonica cultivar-group)
MALHLLHLLAFSLLFAVATPIRDITDVCSSQIKDFQYLNSTGLHLELHHPRSPCSPAPVPADLPFTAVLTHDDARISSLAARLAKTPSARATSLDADADAGLAGSLASVPLSPGASVGVGNYVTRMGLGTPATQYVMVVDTGSSLTWLQCSPCLVSCHRQSGPVFNPKSSSTYASVGCSAQQCSDLPSATLNPSACSSSNVCIYQASYGDSSFSVGYLSKDTVSFGSTSLPNFYYGCGQDNEGLFGRSAGLIGLARNKLSLLYQLAPSLGYSFTYCLPSSSSSGYLSLGSYNPGQYSYTPMVSSSLDDSLYFIKLSGMTVAGNPLSVSSSAYSSLPTIIDSGTVITRLPTSVYSALSKAVAAAMKGTSRASAYSILDTCFKGQASRVSAPAVTMSFAGGAALKLSAQNLLVDVDDSTTCLAFAPARSAAIIGNTQQQTFSVVYDVKSSRIGFAAGGCS

SEQ ID NO: 39526 - protein, 435 aa, Glycine max
MLSIKRVPTVVSNYQKEETGEAAAGGCGRNCLKSCCIQGARLPLYAFKKVDKVCGNELPLLGCKEQHPVAFLDSLVLGEWEDRMQRGLFRYDVTACETKVIPGEYGFIAQLNEGRHLKKRPTEFRVDKVLQPFDENKFNFTKVGQEEVLFQLEASNDGEAQFFPNAPIDVENSPSFVAINVSPIEYGHVLLIPRIFKCLPQRIDHASFLLALQMAVEARNPYFRLGYNSLGAFATINHLHFQAYYLALPFPIEKAPTKKIAKLSGGVIISKLLNYPVRGLVFEGGHTLEDLANAVSEACICLQHNNIPYNVLISDCGRQIFLLPQCYAEKQALGEVSPELLETQVNPAVWEISGHMVLKRKKDYEEASEANAWRLLAEVSLSEERLLEVTALVFQAITSSVEMNVKPQRLEEVDAVSPNAQHAMVAGSHECLVLQ

SEQ ID NO: 39527 - protein, 552 aa, Oceanobacillus iheyensis HTE831
MNKIWWKEAVTYQIYPRSFMDSNGDGIGDIQGIISKLDYIKGLGIDVIWVSPIYESPNDDNGYDISDYQDIMDEFGTMEDFDELLEQVHHRGMRLIMDLVINHTSDEHPWFIESRSSKDNPYRDYYIWRSSENNLEPNNWASIFGGSAWKYDKKTDEYFMHIFSKKQPDLNWENPKVREELYDMVNWWLDKGIDGFRVDAISHIKKTADFPNLPNPENKKYVPSFEGHMNRDGIQIFLQEFKEKTLDNYDIMTVGEANGVSISQADEWVGEDNGVFNMIFQFEHLDLWGKNTDNGLDLKALKETLTKWQKGLESVGWNALFLENHDQPRSISSWGDPKTYHIESAKALATLYFLMQGTPFIYQGQEIGMTNVHYPSIEDYDDIDAKNLYEEMMQEGASSKEVLEIIWKTGRDNSRTPMQWNNSKNAGFTSGNPWLKVNDNYTSINVEQQLNDLDSIYHYYRKLIELRKQHETLIYGGYDLILENHSQIYAYTRTLDEKQFVVFINLFPEKCSFELPSSLAKMERSLLLSNYEAAVNGELQPYEARVYQITKK

SEQ ID NO: 39528 - protein, 444 aa, Neisseria meningitidis MC58
MTDLNTLFANLKQRNPNQEPFHQAVEEVFMSLDPFLAKNPKYTQQSLLERIVEPERVVMFRVTWQDDKGQVQVNRGYRVQMSSAIGPYKGGLRFHPTVDLGVLKFLAFEQVFKNALTTLPMGGGKGGSDFDPKGKSDAEVMRFCQAFMTELYRHIGADTDVPAGDIGVGGREIGYLFGQYKKIRNEFSSVLTGKGLEWGGSLIRPEATGYGCVYFAQAMLQTRNDSFEGKRVLISGSGNVAQYAAEKAIQLGAKVLTVSDSNGFVLFPDSGMTEAQLAALIELKEVRRERVATYAKEQGLQYFEKQKPWGVAAEIALPCATQNELDEEAAKTLLANGCYVVAEGANMPSTLGAVEQFIKAGILYAPGKASNAGGVATSGLEMSQNAIRLSWTREEVDQRLFGIMQSIHESCLKYGKVGDTVNYVNGANIAGFVKVADAMLAQGF

SEQ ID NO: 39529 - protein, 362 aa, Arabidopsis thaliana
MDRPAVSGPMDLPIMHDSDRYELVKDIGSGNFGVARLMRDKQSNELVAVKYIERGEKIDENVKREIINHRSLRHPNIVRFKEVILTPTHLAIVMEYASGGELFERICNAGRFSEDEARFFFQQLISGVSYCHAMQVCHRDLKLENTLLDGSPAPRLKICDFGYSKSSVLHSQPKSTVGTPAYIAPEVLLKKEYDGKVADVWSCGVTLYVMLVGAYPFEDPEEPKNFRKTIHRILNVQYAIPDYVHISPECRHLISRIFVADPAKRISIPEIRNHEWFLKNLPADLMNDNTMTTQFDESDQPGQSIEEIMQIIAEATVPPAGTQNLNHYLTGSLDIDDDMEEDLESDLDDLDIDSSGEIVYAM

SEQ ID NO: 39530 - protein, 219 aa, Photorhabdus luminescens subsp. laumondii TTO1
MQDIIEGFLQFQREVFPKRCELFKRLATSQNPRTLFITCSDSRVVPELLTQSEPGDLFVIRNAGNIVPSYGAESGGVSATVEYAVAVLGVTDIVICGHSDCGAMTTIASCKCMNHLPAITSWLRYADCAKAISQARVHVNETAQIDSMVRENVIAQIANIKTHPSVALGLEQRHLNLHGWIYDIEAGSIDALDGLAGQFVSLADYPHVSATQSVFHHGI

SEQ ID NO: 39531 - protein, 450 aa, Glycine max
MASSYPGSVSAAQVGSYFVGQYYQILRQQPNLVHQFYSDSSSMIRVDGDSVETAHDVLQIHSIVSLLNFTTIEIKTINSLDSWDGGVLVMASGFVKIKDIGGKRKFVQTFFLAPQEKGYFVMNDMFHFIDDGVMYPNLVPVASETIDTQPHLSASLAEPPVSDYGLEEEAREYANSVHIDDDPVDKYSLPEHQQQLQEELETEIVVEETSVQEASPPIHTVAHTIQEPPVALVEESFEEPPKKTYASILRVSKGLPVLSAAPKHAPHSFKSAPPPPELNHVAQPAVQQSSSASMYAPESGTEAAEEGYALEEDEVTSVYVRNLPANVTEVEIDQEFKNFGRIKPDGIFIRVRKEIGVCYAFVEFEDIIGVQNALQSSPLQLAGRQVYIEERRPNSVGAARGGRRGRGRGSYQADAPRGRFGGRSMGRGGYQDGSDYTRLRGDGYLQRGSR

SEQ ID NO: 39532 - protein, 583 aa, Oceanobacillus iheyensis HTE831
MLKEAVFHRPKNNYAYLYKENTLHIRLQTKKDDVVKATLIYADPYNWDDSGWIYNKADMRLIASDQLFDYWQIEIYCKTRRIRYGFQLSDTKETLIYTEKGFYKEIPNDDTAYYFCFPFLNPIDQFQAPEWVKETVWYQIFPERFANGNETINPPGTLPWGSTTPTPTDFFGGDFQGIINHLDYLVDLGISGIYFTPIFKAFSNHKYDTIDYMEIDPQFGDKQTFRKLVKACHQRGIRIMLDAVFNHSGYFFEPFQDVLKNQEKSIYKEWFHIESFPLRTDPAPNYDTFAYVGSMPKLNTEHPEVKSYLLKVASYWIEEFDIDGWRLDVANEVDHQFWRDFRRQVKSIKPDVYILGEIWHDSMPWLQGDQFDAVMNYPLTSAALDFIAKEKIDVKEFVQQISNVLLSYPQNVNEVAFNLLGSHDTPRVLTHCNNQVEKAKLLYILLLTMPGSPCIYYGDEIGMTGEGDPGCRECMVWDENEQNVELKSFLKKLIHVRKTEKAVANQGEFSFVKTSDNYFIYKLFQQHMEIYIIINPSNQALEVSLPVTKWNSAFDLWEEDDFNINTPIKCEENSFKIIKVNYS

SEQ ID NO: 39533 - protein, 233 aa, Arabidopsis thaliana
MDILYVQPVNQECIIALEKVAESLELPCKYYNLGCLGIFPYYSKLKHESQCNFRPYSCPYAGSECAAVGDITFLVAHLRDDHKVDMHTGCTFNHRYVKSNPREVENATWMLTVFQCFGQYFCLHFEAFQLGMAPVYMAFLRFMGDEDDARNYTYSLEVGGSGRKQTWEGTPRSVRDSHRKVRDSHDGLIIQRNMALFFSGGDKKELKLRVTGRIWKEQQNPDSGVCITSMCSS

SEQ ID NO: 39534 - protein, 156 aa, Zea mays
  misc_feature (17)..(17): Xaa can be any naturally occurring amino acid
  misc_feature (49)..(49): Xaa can be any naturally occurring amino acid
  misc_feature (66)..(66): Xaa can be any naturally occurring amino acid
  misc_feature (96)..(96): Xaa can be any naturally occurring amino acid
  misc_feature (101)..(101): Xaa can be any naturally occurring amino acid
  unsure (1)..(156): unsure at all Xaa locations
ADTNATTTNAGAPVWNXNEALTGGPHGPILLEDYHLIDKWLHFSRERIXPERVVLRARGLRQGFFXCTHYVTTVTCADLLRAPGVREPVIVLFSRXIHYEXLGDKRTRAFQQKFTARANCDLLDNNFPVFFMRDSIKIRHVIHAIKPNLRTNLTRI

SEQ ID NO: 39535 - protein, 344 aa, Oceanobacillus iheyensis HTE831
MTRLKMGIIGVGGIAESRHIPAYLYLNEIVEVTAVCDVNPVRAKEVANKFEIAQVYDDYHAMFSNVDAVTICTPNKFHAEIAISALDAGLHVLCEKPMAMNAKEAKLMLEASKRNGKKLSIAYHYRFVESVQLSKKTMDEVGDPLVTRVQAMRRRKVPGWGVFTNKDLQGGGSLIDWGCHLLDAALWMLDKRKPIEVNGQIYNQLSKTPNQINEWGAFDHDTFDVDDHVTAYIRFDDHSTMLFECSWAANIKDDITQISISGVDGGLQVFPFEFYTSKNGAFTTSSAYVQNDQHQAGILQAKNFIESCLGHAELISTPKESLQVTQLIDAIYESSTSGRSVNIQ

SEQ ID NO: 39536 - protein, 526 aa, Crocosphaera watsonii WH 8501
MLNICFVSTEVAPYSKTGGLGDVTEGLPEELAKMGHTVCTVAPRFDQYKDAWDTGILEQVKYGKEATKVRYFHSYKKGVDRIWVDHHVYLSKTPLVNKKLYGPKAAVDYIDNSERFSMLAQAALAVPLVVPLGPDGIKGKMGENTIFVCNDWHTALLPLYLKEYYQSSGTFLKAKTVLLLHNIAFQGRFPMSKFEALNLPEKYLPDLSFNTQFAPPPLDEKTTKPITAPEPMQMLNWLKAGFLNCDQALTVSPNFAKEVTSDPAGGVELDAIAKSVGLVGITNGTKAESWNPKKDKFIPANYDAETMDSGKKLCKAALQEECGLEVDPDIPILGFIGRLENQKGPDVIMAAMPELAKLNCQVVILGTGAPKLEEKLEALENTYPFAKGVAKFDPELARLITAGADYCLMPSRFEPCGLNQLYAMMYGTIPVVAPVGGLVDTVLPQFGFLMGKIPLPDKPGVAVSEAMLEEGVEAMIVGIKKALQEYGTPKFEQMRLACMANDVSWQHPAAKYVDVFEALMSSDIEA

SEQ ID NO: 39537 - protein, 582 aa, Glycine max
MLEKVGEFNMDKVIQEFELLTRDAERVQRETLKRILEDNASAEYLQSLGLNGRTDPESFKACVPLVTHKELEPYIYRIIDGDASPILTGKPITTMSLSSGTTQGKPKYVPWNDELYETTMQIYLTSFVFRNREFPIKNGKALSFIYGSKQLTTKGGLAARTATSNVFCSAGYKCAMRALQSQCCSPDEVIFGPDFFQSLYCHLLCGLIFREEVQFVSSTFAHSIVHAFRTFEQVWEELCNDIREGVLTRNVTIPSIRMAMSKLLKPNPELANTIHQKCRGLSNWYGLIPELFPNAKYIYGIMTGSMEPYLKKMRHYAGELPLLTADYGSSEGWIAANVNPQLPPEYATPAVLPHIGYFEFIPLSEFENTKGEPDFLCVDPKPMGLTEVKVGEEYEIVMTNPAGLYRYRLGDVVKVMGFHNSTPELKFIRRSSLLLNINIDKNTEKDLQLAVEAAGKLLAEEKLEVVDFSSQVDLSKEPGHYVIFWEISGEASQELLLECCNCLDKSFVDAGYTSSRKVNCIGALELRLVRRGTFQKILDHYLGLGTAVSQYKTPRCVGPTNTRVLQILSENVVNNYLSTAFN

SEQ ID NO: 39538 - protein, 197 aa, Triticum aestivum
TSSHSETTSTKQHLHRITAIMQIFVKTLTGKTITLEVESSDTIDNVKSKIQDKEGIPPDQQRLIFAGKQLEDGRTLSDYNIQKESTLHLVLRLRGGMQIFVKTLTGKTITLEVESSDTIDNVKSKIQDKEGIPPDQQRLIFAGKQLEDGRTLSDYNIQKESTLHLVLRLRGGMQIFVKTLTGKTITLEVESSDTIDN

SEQ ID NO: 39539 - protein, 396 aa, Carthamus tinctorius
MALRITPVTLQSERYRSFSFPKKANLRSPKFAMASTLGSSTPKVDNAKKPFQPPREVHVQVTHSMPPQKIEIFKSIEGWAEQNILVHLKPVEKCWQAQDFLPDPASEGFDEQVKELRARAKEIPDDYFVVLVGDMITEEALPTYQTMLNTLDGVRDETGASLTPWAVWTRAWTAEENRHGDLLHTYLYLSGRVDMRQIQKTIQYLIGSGMDPRTENSPYLGFIYTSFQERATFVSHGNTARHAKDHGDVKLAQICGTIASDEKRHETAYTKIVEKLFEIDPDGTVLAFADMMRKKISMPAHLMYDGRDDNLFEHFSAVAQRLGVYTAKDYADILEFLVGRWKVADLTGLSGEGRKAQDYVCGLPPRIRRLEERAQGRAKEGPVVPFSWIFDRQVKL

SEQ ID NO: 39540 - protein, 454 aa, Pediococcus pentosaceus ATCC 25745
MEENGNNELARNLKSRHVQLIAIGGTIGTGLFLGAGSSIHLAGPSILLAYIVTGLVCFWLMRALGELLLSDLESTSFVTFVTKYLGKKVGFVTGWTYWVCWITIAMAEITATGMYVRYWFPSVPQWIPGFIILILLIGLNLITVEAFGETEFWFSIIKIIAIVALIAIGFIMVLLHSKTNVGHADLTNLIHFGGIFPQGLKGFILSFQMVLFAFVGIEMVGMTAAETRDPKSVIPKAINEIPVRIGIFYVGALFFLMAIYPWNEINPNGSPFVQVFKNIGIPGAGGIINFVVLTAAASACNSSLFTTGRMLFSLTYGSSNKLGKRLGTLSKSQVPKNAILLSSLVIAVAVILNILMPEGVFTLISSIATTCFLFIWGTIVLAHLKYKKGQKQAKKEFSMPFFPISNYIVLTFLSFVGVVLLLQKETAIALIGSLIWFGVMFTVAKIKGKGELMD

SEQ ID NO: 39541 - protein, 364 aa, Medicago sativa
MKMEMHQIWSRIALASFAFAILFVSVSADDVVVLTEENFEKEVGHDKGALVEFYAPWCGHCKKLAPEYEKLPNSFKKAKSVLIAKVDCDEHKSVCSKYGVSGYPTIQWFPKGSLEPKKFEGPRTAESLAEFVNTEGGTNVKIATAPSHVVVLTPETFNEVVLDGTKDVLVEFYAPWCGHCKSLAPIYEKVAAVFKSEDDVVIANLDADKYRDLAEKYDVSGFPTLKFFPKGNKAGEDYGGGRDLDDFVAFINEKSGTSRDAKGQLTSEAGIVEDLDELVKEFVAANDEEKKAVFARIEEEVKKLEGSASRYGKIYLKVSKKYLEKGSDYAKNEIQRLERLLEKSISPAKADELTLKKNILSTYA

SEQ ID NO: 39542 - protein, 133 aa, Pyrobaculum aerophilum str. IM2
MSSEQQKLRWGIAWIYSSSNNTIITITDLTGAETVARVSGGQVVRADKDKPSPWAAMQAAYKAAQLALARGINAVHIKVRGPGGYGMKVPGPGASAAIRALARSGLVIGRIEDVTPIPHDIIRPPSGRKGRRV

SEQ ID NO: 39543 - protein, 394 aa, Bordetella parapertussis 12822
MREAVIVSTARTPIGKAYRGAFNQTHGAELGGHSLRHAIARSKVDPAEIEDVIIGCGMPQGATGYNIGRQIAICGGLPIETGGTTVNRLCASGLQAIAIAAQRIMVDRVPVMAAGGLECISIVQDEHHNGVKKSPWIEAHKPHTYDAMLRTAEVVAQRYGVSRDAQDDYAFQSQMRTAAAQRDGRFDDEIVPMTTVKLSKNKETGATYEEEVTLLRDEGNRPDTTREGLATLQPVMEPDTSITAGNASQLSDGSSACILMEAKEAERRNLEPLGTFRGFVATGCEPDEMGIGPILAVRTLFQRFGLRMEDIDLWELNEAFASQTVYCRDQLGIPNELLNVNGGAISVGHPYGMSGARMVGHALIEGRRRGARLVVVSMCVGGGMGAAGLFEVYR

SEQ ID NO: 39544 - protein, 454 aa, Ustilago maydis 521
MHPRRLSSLSGPMPVDNTEHIRLRQPSVSTKTSTHHDSTAVARNRIQQVTRHITHKLPSTLQKDMSTQEFKQAPHKLLVIPGPIEVADDVLLANAHPAMSHVSPDFIPVFGDCIRMLREVLFAPNSQPVLTAGSGTLGWDHVAANVIQPGEEALVLNSGYFGDSFADCLETYGAKVDQIKAPIGSKPSLTEVEEALKKKQYKVLTFTHVDTSTGVLSDAKGLGELVKRVSPETILVLDGVCSVGSEEIRMEEWGIDVVLTATQKGLGCPPGLMVLAASKKAIAAFEKRTVPPNSYFASWSRWLPVMKAYEAGTGAYFATPPTNLIYALHASLTTITKGSPSLEDRFQQHVAASDRVKDFVSQLGLKQLAADGKKDGAHGMTAVRYPEGLKATDLLPKLVAKNIVVAAGLHKQVKDEYFRIGHMGITVVNDKERGDIEYLLTSIKEALAEAGYKP

SEQ ID NO: 39545 - protein, 312 aa, Glycine max
  misc_feature (106)..(106): Xaa can be any naturally occurring amino acid
  unsure (1)..(312): unsure at all Xaa locations
MAAPFSAASLFAIREEDQNQMKQQQHSSTPSSSTTPAAPPQKKRRNQPGTPYPDAEVIALSPKTLMATNRFLCEVCNKGFQREQNLQLHRRGHNLPWKLKQKNQQXPKRKVYLCPEPTCVHHDPSRALGDLTGIKKHYYRKHGEKKGKCEKCSKKYAVQSDWKAHSKTCGTREYRCDCGTLFSRRDSFITHRAFCDALAQESARFPGGLNPLGTHLFGTNHTTSLSLSQVGNQLSQVQKQNQTATNYNSILRLGNNNVGAAATKFEHLIPPLNHSSFGHSPQSMPSSAFFMNDNTNQALFEEHQSQLQGLMQ

SEQ ID NO: 39546 - protein, 164 aa, Brassica napus
MMLRQAAKKALGLTSRQSTPCSVGISRSYHENVIDHYDNPRNVGSFDKNDPSIGTGLVGAPACGDVMKLQIKVDEKTGQIVDARFKTFGCGSAIASSSVATEWVKGKAMEEVLTIKNTEIAKHLSLPPVKLHCSMLAEDAIKAAVKDYKEKRLKTNGAGETSQA

SEQ ID NO: 39547 - protein, 579 aa, Glycine max
MCGILAVLGCSDSSQAKRVRVLELSRRLKHRGPDWSGLHQYGDNYLAHQRLAIVDPASGDQPLFNEDKTVVVTVNGEIYNHEELRKQLPNHTFRTGSDCDVIAHLYEEHGENFMDMLDGIFSFVLLDTRDNSFIVARDAIGVTSLYIGWGLDGSVWISSELKGLNDDCEHFESFPPGHLYSSKERAFRRWYNPPWFSEAIPSAPYDPLALRHAFEKAVVKRLMTDVPFGVLLSGGLDSSLVAAVTARYLAGTKAAKQWGTKLHSFCVGLEGAPDLKAAKEVAEYIGTVHHEFHYTVQDGIDAIEDVIYHIETYDVTTIRASIPMFLMSRKIKSLGVKMVISGEGSDEIFGGYLYFHKAPNKEEFHQETCRKIKALHKYDCLRANKSTFAWGLEARVPFLDKEFIRVAMNIDPECKMIKKEEGRIEKWALRRAFDDEEHPYLPKHILYRQKEQFSDGVGYGWIDGLKAHAEKHVTDRMMLNAANIFPFNTPTTKEAYHYRMIFERFFPQNSARLTVPGGPSVACSTAKAVEWDAAWSNNLDPSGRAALGVHASAYGNQVKAVEPEKIIPKMEVSPLGVAI

SEQ ID NO: 39548 - protein, 609 aa, Ustilago maydis 521
MVSHARSHSGSGELPRRRAWSARQLGVSLALAILTSLTLLLLSGSTTSVTAAVSGARPALFRSPASDNSRGADFLQHVLTKPRTQPRSAAAPSLDTEPICRPTGQIEDASCDYETVETINSQFFDRLDALRKTDFFKFYKVNLFKECPFWNENGFCMNRACSVETEDESNVPEEFRVNRLSSVTTASPNDVVMTGSDASCSCSSTEFCHLDDESSDQGVYVDLLKNPERFTGYAGPSANRVWKSIYEENCFNGVKFVEPARPTWSGGTGFVDKSLLHSSSPALGGLPSGFSGLVSSLQAPLDSGDSEQCLEKRVFYRIISGLHASISIHICHDFLDTKTGEWAPNLECFITRIAEHPERLQNVYFDYVLLLRALSRLDDSKQNFSLRAGDSIEDALAVAQLDELIQDARACPTTFDEAQMFNGQNRDSLELKQEFRQHFRNISTIMDCVGCDKCRLWGKLQVNGIGTALKLLFNRNDERDGVGEVKLQKSELVALVNAAHRIAESLRAVERFRDMYQEQRLASDKAEQTKTLEHSSHTKRVAQANATSAKSFDQAQESAQDETLFKHWLCWLEKQVAACQRSLVHCLQAVGIGVAGRSHNSGSGKHSEL

SEQ ID NO: 39549 - protein, 427 aa, Bacillus cereus G9241
MKTFLSALQWALFILAGSLIVPISVATSYGLDGAEAIAFVQRTLFVLGFAGLLQAIFGHKLPIQEGPAGLWWGIFSLYASLGVVLFGSSNETLKVLQYAFLLSGIICIILSVFGLIDKIVRYFTPTVIGTYLFLLVAQLSGSFLKGMFGLDGQHTEVQADVFILSLIVILLSFFIMKLPIIGQYSVLFSIVCGWILFACFGLSNPITPVTDIIRFPSLFVFGMPRIEWNMAITVIFVTLLLLTNMLASIRVVQKVVSKYEENATPDRFKQAGIITGINQLLGGLFSAIGPVAISGSAGFIATTNIYKRLPFMLGSIFIISVSIFPKITSFFAAIPVAVGYAAIYPVFASMIGLAFREYDTVQNKEQLFKVAGLSIFTGIGVMFVPAGAFSTLPPFLASFLSNGLVLGSVMAILLEILFSRSTEKQPS

SEQ ID NO: 39550 - protein, 602 aa, Oryza sativa (indica cultivar-group)
MELALVGNPSNGVAKPSCNSVGSLPVVSSNAVIHPPVTSAARATLGRHLARRLVQIGATDVFAVPGDFNLTLLDYLIAEPGLKLIACCNELNAGYAADGYARALVGAFVTFTVGGLSVLNAIAGAYSENLPVICIVGGPNSNDYGTNRILHHTIGLPDFSQELRCFQTITCYQAVINNLDDAHEQIDTAIATALRESKPVYISVGCNLAGLSHPTFSREPVPLFISPRLSNKANLEYAVEAAADFLNKAVKPVMVGGPKIRVAKAKKAFAIAESSGYPFAVMPSAKGLVPEHHPRFIGTYWGAVSTTFCAEIVESADAYLFAGPIFNDYSSVGYSLLLKREKAVIVQPDRVVVGNGPAFGCILMTEFLDALAKRLDRNTTAYDNYRRIFIPDREPPNGQPDEPLRVNILFKHIKEMLSGDTAVIAETGDSWFNCQKLRLPEGCGYEFQMQYGSIGWSVGATLGYAQAAKDKRVISCIGDGSFQMTAQDVSTMLRCGQKSIIFLINNGGYTIEVEIHDGPYNVIKNWDYTGLIDAIHNSDGNCWTKKVRTEEELIEAIATATGAKKDCLCFIEIIVHKDDTSKELLEWGSRVSAANSRPPNPQ

SEQ ID NO: 39551 - protein, 314 aa, Arabidopsis thaliana
  misc_feature (176)..(176): Xaa can be any naturally occurring amino acid
  unsure (1)..(314): unsure at all Xaa locations
MNSNIFPPSKQQNELNNIQQSFSNLQSQCSNLLLNVSQTLNPLFNANTNNNKPNIFSALNSFRDQAKQALDSRISRFNSGKAPVWARISDDGGGARAQVTVPIRGSGKGLSADAIEERLAGVPVYALSNSNEEFVLVSGTSSGKSLGLLFCKEEDAETLLKEMKSMDPRMRKEGSXKVVALALSKVFQLKVNGVAFRLIPESTQVKNALKERKTAGIDDDDFHGVPVFQSKSLILRSENMSYRPVFFRKEDLEKSLIRASSQQNRLNPALKPGDIQVAVFEDIVKGMRESTTSNWDDIVFIPPGFEVSTEQTQE

SEQ ID NO: 39552 - protein, 1031 aa, Arabidopsis thaliana
MEGGRGGGDGNFLPNSNFGVFSDSAMDMDFMDELLFDGCWLETTDGKSLKQTMGQQVSDSTTMNDNNNNSYLYGYQYAENLSQDHISNEETGRKFPPIPPGFLKIEDLSNQVPFDQSAVMSSAQAEKFLLEESEGGRRYWIAPRTSQGPSSSVKERLVQAIEGLNEEVQDKDFLIQIWLPIQQEGKNFLTTSEQPHFFNPKYSSLKRYRDVSVAYNFLADEDSKESVGLPGRVFLKKLPEWTPDVRFFRSEEYPRIKEAEQCDVRGSLALPVFERGSGTCLGVVEIVTTTQKMNYRPELDNICKALESVNLRSSRSLNPPSREVCKNGLLNQTLTSSIHRNNEFWLLNVICPFCFSFCRVYDLPLALTWAPCARQGKVGSRHSDENFSECVSTVDDACIVPDHQSRHFLEACSEHHLLQGEGIVGKAFNATKLFFVPEVTTFSKTNYPLAHHAKISGLHAALAVPLKNKFNSSVEFVLEFFFPKACLDTEAQQDMLKSLSATLQQDFRSLNLFIDKELELEVVFPVREEVVFAENPLINAGTGEDMKPLPLEEISQEDSSWISHMIKANEKGKGVSLSWEYQKEEPKEEFMLTSGWDNNQIGSGHNNFLSEAEQFQKVTNSGLRIDMDPSFESASFGVGQTLLGSRRPGEKRRTKTEKTIGLEVLRQYFAGSLKDAAKSIGESDDSFTQFHFHVAVCPTTLKRICRQHGITRWPSRKIKKVGHSLKKLQLVIDSVQGVQGSIQLDSFYTSFPELSSPHMSGTGTSFKNPNAQTENGVSAQGTAAAPKSPPSSSCSHSSGSSTCCSTGANQSTNTGTTSNTVTTLMAENASAILKRARSEVRLHTMNQDETKSLSRTLSHKTFSEHPLFENPPRLPENSSRKLKAGGASKVKATFGEAKHEIARRFNIDNIAPFDLKYLDDDKEWVLLTCEADLEECIDIYRSSQSRTIKISVHEASQVKLGGICVQEREPPSGVIFQVPNQSISVKSSNQYLLKKQVSLQTKGSRFGLFLFLSDSVSDTKEDIDPEPIIAT

SEQ ID NO: 39553 - protein, 310 aa, Pyrococcus horikoshii OT3
MNLVFGMIASIGELLIDLISVEEGDLKDVRLFEKHPGGAPANVAVGVSRLGVKSSLISKVGNDPFGEYLIEELSKENVDTRGIVKDEKKHTGIVFVQLKGASPSFLLYDDVAYFNMTLNDINWDIVEEAKIVNFGSVILARNPSRETVMKVIKKIKGSSLIAFDVNLRLDLWRGQEEEMIKVLEESIKLADIVKASEEEVLYLENQGVEVKGSMLTAITLGPKGCRLIKNETVVDVPSYNVNPLDTTGAGDAFMAALLVGILKLKGLDLLKLGKFANLVAALSTQKRGAWSTPRKDELLKYKEAREVLAP

SEQ ID NO: 39554 - protein, 447 aa, Oryza sativa
MAAALCSASPAISAAAAAALGAAARRLRVRVRAASRPYCAAPAPPRAAAAVGAQSWRARRRFAASAASTTTEEEEEGAGAEVMIPPDNRIPATIITGFLGSGKTTLLNHILTAHHGKRIAVIENEYGEVDIDGSLVAAQTAGAEDIMMLNNGCLCCTVRGDLVRMIGELVDKKKGKFDHIIIETTGLANPAPIIQTFYAEDTVFNDVKLDGVVTLVDAKHARLHLDEVKPKGIVNEAVQQIAYADRIIVNKIDLVSEPEVSSLVERIRSMNRMAHLKRAEYGKVDLDYVLGIGGFDLERIESAVTEESHDHHTGHEHKHDHEHHHHDHHHHDHEHKHDHHAHDHTHDPGVSSVSIVCEGEMDLEKADMWLGNLLLERSDDIYRMKGLLSVSGMPQRFVFQGVHDIFQGSPERMWEPNEPRINKIVFIGKNLNGEELEKGFKDCLLKK

SEQ ID NO: 39555 - protein, 343 aa, Oceanobacillus iheyensis HTE831
MVKVRVAVIGCGSIAKNRHLKEYSANHQVDIVAVCDIVEGRARQAAELHNAKAYTDYKQLLKEEEVDAVSVCLPNYLHAPVSIAALEAGCHVLCEKPMATSKEEAEEMIQAAEKNNRKLMIGHNQRFVASHQKAKQLIESGELGKIYSFRTTFGHGGPEGWSADGADSWFFKKEKAFVGAMGDLGVHKADLMRYLLNEEFVEVAAFVETSAKQTATVDDNATLVMKSESGIIGTLAASWAYNAAEDNSTVIFAENAIVRLEDDPNYSMIVQYTNGEVVKYELGGIQSNEEGGQTTTHVIDHFIESVTTNQQPLIDGYEGMKSLNVILAALSSVETKQIFQMEK

SEQ ID NO: 39556 - protein, 428 aa, Nocardioides sp. JS614
MLRARSAVRRATTGWYGTWNRTSAPDQTTGSVRHMPACQGPATVVFDPSLTAYDFGPTHPMSPLRVDLTIRLAEELGVLAGLRRVDAPVATDEVIATVHRPALIEAVRRAGTMPGILDEAHGLGTDDNPTFPDMHHAAAHIVGATVEAARQVWSGESLHAVNISGGLHHAMPERASGFCIYNDVAVGIQHLLDSGAKRVAYVDVDVHHGDGVEKVFWDDPRVLTISLHETGQMLFPGTGFPTDAGGPAARGTAVNVALPPGTGDGGWLRAYHAVVPPLVREFAPDVLVTQHGCDSHIEDPLAHLMLSVDGQRAAYLALHELAHEVCGGRWVATGGGGYALVEVVPRAWTHLLAIVAGRPLDPATETPEGWRRHVQTTLDQVAPHRMTDGRTPAYRDWIDGYDPEIWLDRAIHSTRMEVFPLHGLDPFP

SEQ ID NO: 39557 - protein, 368 aa, Haemophilus influenzae Rd KW20
MNKKTIVVKFGTSTLTQGSPKLNSPHMMEIVRQIAQLHNDGFRIVIVTSGAIAAGRHYLNHPQLPPTIASKQLLAAVGQSQLIQAWEKLFAIYDIHIGQLLLTRADIEDRERFLNARDTLYALLDNHIIPVINENDAVATAEIKVGDNDNLSALVAILVQAEQLYLLTDQQGLFDSDPRKNPEAKLIPVVEQITDHIRSIAGGSGTNLGTGGMMTKIIAADVATRSGIETIIAPGNRPNVIADLAYEQNIGTKFIAHQSDRLESRKQWLFAAPSAGIITIDNGAQNAILEQNKSLLPAGIINVEGRFSRGEVVKIRTQSGKDIALGMPRYNSDALQLIKGRKSADIENVLGYEYGAVAMHRDDMIILS

SEQ ID NO: 39558 - protein, 508 aa, Pirellula sp. 1
MRECGDCMRWFLKHSPTRHGVSAHRSPSMGVLLSMGLLAGLTVGTGGDESVRADDLQSVTATSFRSSEASVRDTRSTGRSSRSLRETPTVTAIRRASPSVVNLHGQKTIRTTAASMAGGAPDSFRQVNGMGTGVVIDPRGYVITNYHVVEDVSELNVTLHNGEATRADLIASDPQSDLALVKLRGQGPFPTIPRGHSDDLMIGETVIAIGNAFGYVHTSTEGIISALHRDVPVNETQQYRDLIQTSAGINPGNSGGPLLNIDGEMIGVNVAVRVGAQQIAFAIPIDQVLETVTEMINRHNNRRMVIGMDGSAVSRGGVQVTRLSEGGSAHQAGLQTGDRLVRINQQNIADPLNYELSVLELGPGDPMQVEFERDGEFFQTQLATAVTSQEFGDPAAALAWQVVGVSVRPAGESFVRRMNSRLRTNYRGGLIVTDVRAGSAASEQGITAGDVLLGIHVWQTAGLEDLAEILDQPNIRRGSKAKFYLVRKDQTLYGHLQLASQGNQLTRR

SEQ ID NO: 39559 - protein, 329 aa, Chromobacterium violaceum ATCC 12472
MPDEGAPHAATWMAFGPSLSVWGARLLPEVRRDLARVASAIAAFEPVRMLARENELDLAGRLCGSGVELVAQPLDDLWIRDSGPVFVKTGAGGMAAVDFNFNGWGGKQAHGRDARVAGFVAGRAGALPLRSGLVLEGGGIEVDGEGTAIITESCVLNANRNPGWSKAQCEGELRRVLGVEKVIWLPGVAGRDITDGHTDFYARFARPGVVVAGLETDPASYDYQVTRRHLAMLRQARDARGRKLEVVAIPGPDRVRPEYEDDEMAAGYINFYVCNGAVIALEFGDARADRNARSALRELFPEREVVQLNIDAIAAGGGGIHCATQQQPA

SEQ ID NO: 39560 - protein, 447 aa, Photorhabdus luminescens subsp. laumondii TTO1
MSCLLSLSSFLGSIQRRDEYQPEYLQAVREVFTSLWPFLEQNPKYREYSLLERMVEPERVIQFRVCWVDDQGKVQVNRAWRVQFSSAIGPYKGGMRFHPSVNLSILKFLGFEQTLKNALTTLPMGGGKGGSDFDPKGKSQGEVMRFCQALMTELYRHLGPDTDVPAGDIGVGGREVAFMSGMMKKLSNNTACVFTGKGLSFGGSLIRPEATGYGLVYFVNAMLKRHGMGFEGMRVSVSGAGNVAQYTIEKCMALGAKVVTASDSGGTLVDEDGFTPEKLTHLEEIKNQRYGRVEEYARERGLTFLKGLQPWSVPVDIALPCATQNELDLDAAKVLIKNGVKAVAEGANMPATISATEAFIEAGVLFAPGKAANAGGVATSGLEMAQNAARLGWKAEKVDARLHHIMLDIHHACVEYGGEGKQINYVQGANIAGFVKVADAMLAQGIL

SEQ ID NO: 39561 - protein, 352 aa, Schizosaccharomyces pombe
FHYPFLKALPNHFEVYAAWERRATSTESKARADFPNVKVYTKLDELLADSNIELVVISLPPNVHYEVVSQALNVGKHVLCEKPFTPTYGEAKELFDLAKSKNLMLTLYQNRRFDGDFLTAKECIENGRLGEVVQFESHIDRFRLFRKGNWKDVPNPGCGLVYDLGSHLIDQAITLFGTPHSVTAKLESQRQIPPLEVEDCFRIVLHYLPQEGRLPLDVIVCSSSISCGLDMRYIIKGTRGSFLKFGIDPQESQLNEGMSPMDPGYGVDSSHHYATLWTLPPDIDVRHPPKPTKSTLMTIAGDYRRFYLEVHEALVTKTFETSVKPHQVLLVEKIIEAAYKSSQSSTSIPLSE

SEQ ID NO: 39562 - protein, 384 aa, Thermotoga maritima MSB8
MGKFLKKHYIMAPGPTPVPNDILTEGAKETIHHRTPQFVSIMEETLESAKYIFQTKHNVYAFASTGTGAMEAAVANLVSPGDKVIVVVAGKFGERWRELCQAYGADIVEIALEWGDAVTPEQIEEALNKNPDAKVVFTTYSETSTGTVIDLEGIARVTKEKDVVLVTDAVSALGAEPLKMDEWGVDLVVTGSQKGLMLPPGLALISLNDKAWGLVEKSRSPRYYFDLRAYRKSYPDNPYTPAVNMIYMLRKALQMIKEEGIENVWERHRILGDATRAAVKALGLELLSKRPGNVVTAVKVPEGIDGKQIPKIMRDKYGVTIAGGQAKLKGKIFRIAHLGYMSPFDTITAISALELTLKELGYEFELGVGVKAAEAVFAKEFIGE

SEQ ID NO: 39563 - protein, 303 aa, Pediococcus pentosaceus ATCC 25745
MSNKVVVLGSLNVDTILQVGRFPEPGETLALKDKQMAGGGKGANQAIAAARSGAETSFIGKVGTDANGQFMLKQLLDSGVSTEYVATSKVADTGQAFVMLENTGENRILIYGGSNAELNEDDVNKAAEKIQQADFIVAQLETPLETTKYAFEIAKQAGIKTILNPAPAVKNLPKELIQLTDVITPNETEAEILTGVTVVDDASMKEAAQRLHKMGVQTVIITLGSKGVYYDDGDVSGIVPAFKVHAIDTTAAGDTFLGSFSSELKPDLSNLKEAIMYGNKASSLAVQKMGAQPSIPTRKEVLK

SEQ ID NO: 39564 - protein, 422 aa, Streptomyces coelicolor A3(2)
MTGARPDVAVTGIGLVTPAGTGREATWDGVCAGRPTARHVPELKGLPVDFACLVPDFSPRDHVPGSRPWQYDRFTQFALHAALEAVSDAGLDPADWDGDRVAVVFGSSAGGTGTMLDQHRKLLELGTARVSPLLLPMFLPNMATGQLTIHLRARGPALCTVTACASGATAIGTALQLLRSGACDIAVAGASDAVVQPLWVTGFDRMGALSRRGDDPRAASRPFDTARDGFVMAEGGAALVLEPASAARARGRPGYALLAGYGASSDAHHPVAPDPESKGAALAVRRALDDAGARPADVQHINAHGTSTPLNDAAEARLIRRLFPHQPSVTSVKGTLGHLLGAAGAVEAAITALSVAHGRVPPVANLEKQEGDAEINAVTGTSRAQPVDLALSHSFGFGGHNAVLAFRSCPTEPAREPAAPSP

SEQ ID NO: 39565 - protein, 347 aa, Triticum aestivum
RKGVALLAVVATLKLATMAAAGGKPAVLLLRPVDAPFAAALRDRFRVLDLYAPGQALPALAFVAAAAAVPEPPRATVIWGGVRVDASFLDAAPSLRCVVSTAAGLDHIDLAECARRGVAVANSGEVYSADVADYAVGLLLDVLRRVSASERYVRRGSWPAQGDYPLGSKLGGKRVGIIGLGNIGSRVAKRLEAFGCVIHYNSRKPKDSVSYKYFPNVHDLAAESNVLVVACALNKATLHIVNKDVLEALGKDGVVVNIGRGANTDEAELVIALREGKIAGAGLDVFEHEPKVPAELFTMENVVLSRHVAVLTEESRSDLCLHTIGNLEAFFSGQPLLTPVHADSLAQ

SEQ ID NO: 39566 - protein, 347 aa, Actinobacillus pleuropneumoniae serovar 1 str. 4074
MMKILNVAIAGSGYSSRLFHIPFLKNDKRFHIQKVYERTTERAKEWLPDVNIVHEYQALLTPEIDLVIITTPNQTHYEMVKSALLAGKHVLVEKPLVASSAEALELERLAKQQNVVLYVYQNRRWDSHIATAKEVLAKNLVGEVVDCEIRFDRYAKGKNAKAWKEAGDRGTGLVYDLGVHLIDQSIYLFGKPQAVFADIRYQHDGALVDDNFDIHLYYANGLTVALQASKYAREPSPTFVLHGKNGSYVKKSLDSQEAHLNSGVMPIGDWNVEPESEWGVLHTEIDGAVIRKPYPNAQASYQNLLDDLYQTITAGIEPIVKLAEVILVLQIIEAAFESASNGQKIKL

SEQ ID NO: 39567 - protein, 305 aa, Vibrio parahaemolyticus RIMD 2210633
MNKLVVLGSVNADHVLQVPSFPRPGETLHGRNYQVIPGGKGANQAVAAARLNADIGFIACVGDDSFGINIRENFKMDGIDIAGVKMQPNCPTGIAMIQVSDSGENSICISAEANAKLTSEAIEPDLERIRQADYLLMQLETPMCGIEKAARVAKDAKTNVILNPAPARELSDELLACIDVITPNETEAEVLTGVTVTDNESAQEAANVLHGKGIEIVMITLGAKGVWLSQNGRGEIIPGFRVEATDTTAAGDTFNGAFVTGLLEDLPLESAIKFAHAAAAISVTRFGAQTSIPTREEVDAFLAEQ

SEQ ID NO: 39568 - protein, 64 aa, Protea revoluta
MPGQWEYQVGPSVGIEAGDHIWCSRYLLERITEQAGVVLTLDPKPIEGDWNGAGCHTNYSTKSM

SEQ ID NO: 39569 - protein, 679 aa, Candida glabrata CBS138
MSFGEIDKLAVSTIRLLSVDQVSKANSGHPGAPLGMAPAAHVVWSQMRTNPKNPDWIARDRFVLSNGHACALLYSMLHLTGFDFSIDDLKNFRQLNSRCPGHPEFELPGVEVTTGPLGQGISNAVGMAIAQANFAATYNKPDFTLSDSYVYTFLGDGCLQEGVSSEACSLAGHLKLGNIIAIYDDNKITIDGNTTVSFDEDVCKRYEAYGWEVLHVENGNEDLNAIAQAVNKAKQSKDKPTLIKMTTTIGYGSLNAGSHSVHGSPLKEDDLKQLRKKFGFDPEKSFVVPQEVYDYYQAKIATPGAKANQEWDAKFAKYQQKYPEQGKELARRLAGELPAGWCSKLPTYTPADSAVATRKLSEIVFQSIYDELPEMIGGSADLTPSNLTRWKEAVDFQPPSSGLGDYSGRYIRYGIREHGMAAIMNGISAFGANYKAYGGTFLNFVSYAAGAVRLSALSGHPVIYVATHDSIGVGEDGPTHQPIETLAHFRALPNLHVWRPADGNETSAAYKVALESKHTPSVIALSRQNLPQLEGSSVEKALKGGYVLKEANNADITLVSTGSEVYLTVDAVKVLAAKGITARVVSLPDFLAFDQQPEDYKLSVLPDGAPVMSVEVLSTKSWGKYAHESFGIDRFGASGKAPEVYDYFGFTPEGIAERAEKVVKFYHGQKLSSPLKKAL

SEQ ID NO: 39570 - protein, 299 aa, Bacteroides fragilis
GRMVFRAAVKNFGNDIQIVGINDLLDAEYLAYMLKYDSVHGRFEGEVAVEDGALIVNGNKIRLTAEMDPANLKWNEVDADVVVESTGFFLTNETARKHIQAGAKKVIMSAPSKDSTPMFVYGVNHTSYAGQDIISNASCTTNCLAPIAKVLNDKFGIVKGLMTTVHAATATQKTVDGPSKKDWRGGRGILENIIPSSTGAAKAVGKVLPVLNGKLTGMAFRVPTSDVSVVDLTVVLEKAATMAEINAAMKEASEGELKGILGYTEDAVVSTDFRGCANTSIYDSKAGISLDSNFAKVVS

SEQ ID NO: 39571 - protein, 482 aa, Zea mays
MAASVTVENLNPKVLKCEYAVRGEIVIHAQRLQQQLQTQPGSLPFDEILYCNIGNPQSLGQQPVTFFREVLALCDYPCLLEKEETKSLFSADAISRAKQILATIPGRATGAYSHSQGIKGLRDAIAAGIMSRDGFPANADDIFITDGASPGVHMMMQLLIRNEKDGILCPIPQYPLYSASIALHGGALVPYYLNEKTGWGLEISDLKMQLENARSKGIDVRALVVINPGNPTGQVLAEDNQYDIVKFCKNEGLVLLADEVYQENIYVDNKKFNSFKKIVRSMGYGEDDLPLVSLQSVSKGYYGECGKRGGYMEITGFSTPVREQIYKIASVNLCSNITGQILASLVMNPPKVGDESYASYKAEKDGILESLARRAKALEDAFNKLEGFSCNKAEGAMYLFPQIHLPQKAIEAAKAAKKAPDAFYALRLLESTGIVVVPGSGFRQVPGTWHIRCTILPQEDKIPAVISRFRAFHEAFLAEYRD

SEQ ID NO: 39572 - protein, 1007 aa, Synechococcus elongatus PCC 7942
MSAALQSSDDAFRTVSSPLATDLDLSSPLEFFLRHRLTVVEELWEVVLRQECGQELVDILTQLRDLTSPEGQAPEVGGEALVQVIETLELSDAIRAARAFALYFQLINIVEQHYEQTQYQLAYERSRLEPLPGPDESPEGLHTIEIPQHQLDPFAAVIPLNQDPATFQTLFPRLRQLNVPPQMIQELTDRLDIRLVFTAHPTEIVRHTIRDKQRRIAYLLRQLDELETGKNRGFRELEAQNIRQQLTEEIRLWWRTDELHQFKPTVLDEVDYALHYFQEVLFEAIPLLYQRFRLALQGTFPDLQPPRYNFCQFGSWVGSDRDGNPSVTSAVTWQTACYQRSLVLDRYITAVEHLRNVLSLSMHWSEVLPELLSSLEQESMLFPETYEQLAVRYRQEPYRLKLSYILERLHNTRDRNTRLQQQQEKDPTTPLPEYRDGTLYQAGTAFLEDLKLIQHNLKQTGLSCYELEKLICQVEIFGFNLVHLDIRQESSRHSDAINEICEYLQILPQPYNELSEAERTAWLVQELKTRRPLVPARMPFSESTREIIETLRMVKQLQEEFGEAACQTYIISMSRELSDLLEVLLLAKEVGLYDPVTGKSSLQVIPLFETVEDLQNAPRVMTALFELPFYTQLNPTQSEPLQEVMLGYSDSNKDSGFLSSNWEIHKAQKALGTVARDHRVKLRIFHGRGGSVGRGGGPAYEAILAQPGRTTDGRIKITEQGEVLASKYALPELALYNLETITTAVIQSSLLGSGFDDIEPWNQIMEELAARSRRHYRALVYEQPDLVDFFNQVTPIEEISKLQISSRPARRKTGKRDLGSLRAIPWVFSWTQSRFLLPSWYGVGTALQEFLQERPEQNLNLLRYFYEKWPFFRMVISKVEMTLAKVDLQIAHHYVHELANPEDQERFERVFSQIAAEFQLTCHLVLTITNHGRLLDGDPELQRSVQLRNGTIVPLGFLQVALLKRLRQYRQQTETTGLMRSRYSKGELLRGALLTINGIAAGMRNTG

SEQ ID NO: 39573 - protein, 290 aa, Oceanobacillus iheyensis HTE831
MVNITVVGSSSIDLVVTAPTRPKAGETIIGDDFQTVPGGKGANQAVAASRLGANVSMIGRVGKDTFGEEILSNLQENKVSVEYVEPVTDVASGTAHITLAEDDNSIIFVKGANDYVTPDYIKKSLDKLINADIVLIQQEIPEETVEFVIETCHTYEVPILLNPAPAREVSNQVIERTTYLTPNEHEFSIMFGNENRSDVLKRYPNKLLITEGKNGVRYFDGEAEIVIPSYEVVPVDTTGAGDTFNASFAIAIAEGRSLEDAIRFANKAASISITKFGAQGGMPTRTEMEE

SEQ ID NO: 39574 - protein, 237 aa, Zea mays
LTRTNQDWKITANDCKCSMDGWMDEPCVCVRVFYKLRIPYSAAWSWLRGCGSRRRRMFASLSADQVVPSGSDEGQATEPKPSGSLFRLSNLGRIVCLGRRDFAPVAQLTRRRSDPDGVIGVGGVGVGHDPVDGRRLLLAVVPEAGRAGHRRQRGGPLLRRLLGLRRHLAPSPPAPGRRLRRLLRRRRRRRQTRGGRLAVPPHPRPRPPPPPGPGPVGGRRRAPHCGCGQRGGGAGRR

SEQ ID NO: 39575 - protein, 144 aa, Brassica napus
MDKYEVVKDLGTGNFGVARLLRHKETKELVAMKYIERGRKIDENVAREIINHRSLKHPNIIRFKEVILTPTHLAIVMEYASGGELFERICELSDRICTAGRFSGAAARFVFQQLICGVDYCHSLQGSPADLKLENTLLDGSPAP

SEQ ID NO: 39576 - protein, 206 aa, Paracoccidioides brasiliensis
RRLPRQLLPLFRPSILPNHAVRTFACSCSRMGSPLPPVTPPVSTAHASDSFQLLSSAEKTGPAEDALFNEQVKAVTEWWNTPRYEGIRRPYSAEAVVSKRGSLQQTYPSSIMARKLFNLLNERAKTGKPVHTLGAIDPVQMTQQAPNQEVLYISGWACSSLLTTTNEVSPDFGDYPYNTVPNQVQRLFKAQQMHDSKQWDSRRKLS

SEQ ID NO: 39577 - protein, 225 aa, Paracoccidioides brasiliensis
YWAEVQAVKEWWQDSRWRYTKRPFTAEQIVAKRGNLKIEYPSNVQSKKLWGILEERFKNKTASFTYGCLEPTMLTQMVKYLDTVYVSGWQSSSTASSTDEPSPDLADYPMNTVPNKVNQLWMAQLFHDRKQREERLRAPKSQRASLPNIDYLRPIIADADTGHGGLTAVMKLTKLFIERGAAGIHIEDQAPGTKKCGHMAGKVLVPISEHINRLVAIRAQADIMG

SEQ ID NO: 39578 - protein, 436 aa, Oceanobacillus iheyensis HTE831
MSEFIHNLTQQLAQWRRMFHSYPELGFTEYLTTYRIGKMLEEWNYSLFVGKEALDSDARVGIPNTTLLTHFEQKAKEHGVEDSWLCKMTGGNTGLVATFDTGRPGKHIALRFDIDALPINESTHQSHIPASEAFNSINSRVMHACGHDGHITIGLGVAKYIYEHQSQLVGKFTFLFQPAEEGGRGALAMTKKGWLAGVDRFYAGHIGIKEMPVGTVAATVKGFLASTKLNVRYHGNASHAGINPEAGKNALLSASSAAIHLYGIPRHSAGTTRVNVGKLEAGIGRNIIPDEAFMEIEVRGETKELNNYMADHAKRIINAAAEMHDTKCEITTVGSTEKMSCSSSIINDIKNACEKSKYVKNVISETSVSGSEDASFMMNEVQKHGGQATYMLFGTKLDYPHHHPSFDFQEEVLPVAVDTFTRIIEQENTYVLNRGR

SEQ ID NO: 39579 - protein, 788 aa, Arabidopsis thaliana
MEFDLNTEIAEVEEEENDDVGVGVGGGTRIDKGRLGISPSSSSSCSSGSSSSSSSTGSASSIYSELWHACAGPLTCLPKKGNVVVYFPQGHLEQDAMVSYSSPLEIPKFDLNPQIVCRVVNVQLLANKDTDEVYTQVTLLPLQEFSMLNGEGKEVKELGGEEERNGSSSVKRTPHMFCKTLTASDTSTHGGFSVPRRAAEDCFAPLDYKQQRPSQELIAKDLHGVEWKFRHIYRGQPRRHLLTTGWSIFVSQKNLVSGDAVLFLRDEGGELRLGIRRAARPRNGLPDSIIEKNSCSNILSLVANAVSTKSMFHVFYSPRATHAEFVIPYEKYITSIRSPVCIGTRFRMRFEMDDSPERRCAGVVTGVCDLDPYRWPNSKWRCLLVRWDESFVSDHQERVSPWEIDPSVSLPHLSIQSSPRPKRPWAGLLDTTPPGNPITKRGGFLDFEESVRPSKVLQGQENIGSASPSQGFDVMNRRILDFAMQSHANPVLVSSRVKDRFGEFVDATGVNPACSGVMDLDRFPRVLQGQEICSLKSFPQFAGFSPAAAPNPFAYQANKSSYYPLALHGIRSTHVPYQNPYNAGNQSSGPPSRAINFGEETRKFDAQNEGGLPNNVTADLPFKIDMMGKQKGSELNMNASSGCKLFGFSLPVETPASKPQSSSKRICTKVHKQGSQVGRAIDLSRLNGYDDLLMELERLFNMEGLLRDPEKGWRILYTDSENDMMVVGDDPWHDFCNVVWKIHLYTKEEVENANDDNKSCLEQAALMMEASKSSSVSQPDSSPTITRV

SEQ ID NO: 39580 - protein, 401 aa, Oceanobacillus iheyensis HTE831
MIDINQQLSDLTDEIISNRRFLHENPELSHNEKETSAFVQRKLHEYGINFEADFSGYAVLGIIKGNKPGKTVALRADMDALPIQEETDVSFKSKKADIMHACGHDAHTAMLLGAGYILKQMQKDLEGTILLVFQPAEEDAPIGGSQAMIDSGVFSTYEPDVIFAQHVWPFLKPGLVGVHDKEVMGASDRFKITLEGKGGHASMPHQTSDAVIAAGHLITSLQTIVSRNLDPMEASVVTISMLEAGSVPNIIPKTVTLQGSIRTFQPHIQKRLKERFFAITNQIAEAFGTKAEIDYQEGYPATINTPKWAEIARRSAQTVYGESATPDLNPALAGEDFGRFLQKYPGAFIWLGTQIENENEQAPLHDSKFQIDERALPKGTKLLVQLALDALKELKQEEDYV

SEQ ID NO: 39581 - protein, 317 aa, Pseudomonas resinovorans
MQSSGLVERWHHSHVFDEGNPLAERNTRWAVFLTAAMMLVEIVGGWLYNSMALLADGWHMSSHALALGLSVLAYSAARRFAHDARFAFGTWKIEVLGGYTSAIFLIGVAGLMLYQSVERLISPTPIHYDQTIAIAGVGLLVNLACAWLLKDGHAHHHEHGHHHEHGGHDHHHDLNLRSAYLHVVADAATSVLAILALIGGKFWGASWLDPVMGIVGAGLVAIWASGLLRDTGRVLLDAEMDVPVIAEIREVIEASPIRATITDLHVWRVGKGKYACILSLAVMDAAEPDYFRQQLSIHEELVHITVEVNQRRWQVSA

SEQ ID NO: 39582 - protein, 624 aa, Glycine max
IRLEEFMLKKKTWDLGREVDHIMRQKEAAMHVRMLTQEIRKSLDRHTILYTTLVELSKTLGLQNCAVWMPNVDKTEMNLTHELNGRNFNLTIRITDPDVVRIKGSDGVNILSSDSALAVGSRGVSGEAGPVAAIRMPMLRVCNFKGGTPELRQACYAILVLILPSGDNQEPRSWSNQELEIIKVVADQVAVALSHAAILEESQLMREKLEEQNRALQQAKRNALMASQARNAFQKVMSDGMRRPMHSILGLLSMIQDDKLKSEQKLIVDAMLRTSNVLSNLINDAMDNSTKDEGRFPLEIRSFGLHSMLKEAACLSKCMCVYKGFGFMVEVEKCLPDNVMGDERRVFQVILHMVGNLLEHNHGGGILVYRVFAETGSQGRSDKGWTTWRPSSSSGDVNIRFEIGINSSDSEVGSSISSGFGGRKYSSDRVGGRLSFSICKRVVQLMQGNIWLVPCNHGFPQSMTLLLRFQLRPSISIAISDPGEGSERTDSNSMLRNLQVLLVENDDVNRAVTQRLLQKLGCVVTPVASGFECLTVIGPAGCSIQVILLDLHMPDLDGFEVATRIRKFRSGNQPMIVALTASAEEDLWERCMQVGINGVIRKPVLLHGIASELRRILMQGNNVL

SEQ ID NO: 39583 - protein, 183 aa, Erwinia carotovora subsp. atroseptica SCRI1043
MMLKLFKTIWQAGDVTVKYPFAPLEVCPGFRGKPEYDAQQCIACGACTIACPANALTMETDIETGARTWQLFLGRCIFCGRCEEVCPTRAIQLSADFELAVTHKPDLYTRATFTLLKCRVCRQPFAAEKSVEYAMALLAHSGIDAESIEEMRPQFETCPACKREQSLNHHGRTNLSYHIGEAK

SEQ ID NO: 39584 - protein, 389 aa, Zea mays
  misc_feature (225)..(225): Xaa can be any naturally occurring amino acid
  unsure (1)..(389): unsure at all Xaa locations
SLHSSALCPCLEPSPLCLRFPWHDDCWYCCNHCLLDHPLLFSSVRIIVCLITTLFATDFFEVKAVKEIEPALKKQLIISTTLMTVGIAVISWLALLAKFTIFNFGTQKDVSNWGLFFCVAIGPWAGLIIGFVTEYYTSNAYNPVQDVADSCRTGAVTNVILGLALGYKSVIIPIFAIAVIIYVSFSIAAMYDIAVAALGMLSTIATGLAIDAYAPISDNAGGIAXRTDAVDAAGNTTAAIGKGFAIGSAALVSLALFGAFVSRAGVKVVDVLSPKVFIGLIVGAMLPYWFSAMTVKSVGSAALKMVEEVRRQFNTIPGLMEGTAKPDYATYWKISTDASIKEMIPPGALVMLTPLIVGTLFGVETLYGVLAGALVSGVQPSFSLNRKEL

SEQ ID NO: 39585 - protein, 589 aa, Glycine max
MESATQVGAAAQPSSASASVIPSAFDGTLGRHLARRLAETGVRDVFSVPGDFNLTLLDHLIAEPSLNLVGCCNELNAGYAADGYARAKGVGACVVTFTVGGLSVLNAIAGAYSENLPVICIVGGPNSNDYGTNRILHHTIGLPDFTQELRCFQAITCFQAVVNNLDDAHELIDTAISTALKESKPVYISISCNLPGIPHPTFARDPVPFFLAPKVSNQEGLEAAVEATAALLNNAVKPVIVGGPKLRVAKAQKAFLEFAEASGYPIAVMPSGKGLVPEHHPHFIGTYWGAVSSSFCGEIVESADAYVFVGPIFNDYSSVGYSLLIKKEKAIIVQPNRVTIGNGPSLGWVFMADFLTALAKKVKTNTAAVENYRRIYVPPGIPLRREKDEPLRVNVLFKHIQELLSGDTAVIAETGDSWFNCQKLHLPENCGYEFQMQYGSIGWSVGATLGYAQAATDKRVIACIGDGSFQVTAQDISTMIRCGQKTIIFLINNGGYTIEVEIHDGPYNVIKNWDYTRFVDAIHNGQGKCWTAKVRTEDDLTEAIAKATGPQKDSLCFIEVFVHKDDTSKELLEWGSRVAAANSRPPNPQ

SEQ ID NO: 39586 - protein, 243 aa, Pediococcus pentosaceus ATCC 25745
MEYSFFAKLAAEFLGTAILVLLGNGSVANVELKGTKGNGSDWLVIAVGYGCGVMVPALMFGTISGAQINPAFTIGLAVSGMFSWSQVLPFIIAQMLGAIFGQLVVYFAYKPHYDLTTNTESILGTFSTIDASHSSWNGFANEFIGSFVLFFGATAFTHAPYFEANKGSVFIALGFLVGTLVASLGGATGPALNPARDLGPRLVHAMLPIKHKGSSQWGYASVPVVAPILAGICAVALYKGLFL

SEQ ID NO: 39587 - protein, 1462 aa, Candida albicans SC5314
MSTVVNRRSSHQFDSPSNHLDHSSSMNVDKVVQSVTNATKRLSQISTNTNNSNKKRKTQNKIGPWKLGRTLGRGSTGRVRLAKNTTTGQLAAVKIVPKSNFKKLENPKYKRSKEDATRLPYGIEREIIIMKLISHPNIMGLYDVWENKNDLYLILEYIEGGELFDYLIKRGKLQEYEAINYFKQIINGINYLHQFNICHRDLKPENLLLDFNKNIKIADFGMAALEVKEKLLETSCGSPHYASPEIVAGKNYHGAPSDIWSCGIILFALLTGHLPFDDENIRKLLLKVQSGKFNMPPELSFEAKDLITKMLKVNPRERITIDAILTHPLLAKYPEPTVSYSSTTTLDINSINIKQIESVDKIDKEILKNLSVLFHNCDEKTIISRLLSPNRCPEKMFYYLLMKYRNEHLSNSNSFNSSNDVDSARSLPRSTSYVKTTVTDHATGEKHTTVKKIQQSSSIYSNRSLLKKSTSAKGNVLSNITNRPNTPKQFSASSSFNKKKALHSKTQIYASRSRNASSRSLKSNSSTGRNGNNASVTSVNKIPEITGATVLQPIPSMAMNRGDEQQNKTKKNLTGTFGNKSLLNFQLICEEVFENDKENSKPVSKTPVSQLPPPPPPPIETPTSRTNSVKRGKTWSLARRERELAEQVRQRNEARENKLKAEELARKELEQEKKRIAEEKKRLEQQERELDEKQKLQEKQKAALEKLQKHQSAHDFEGLFASNRRSVTDMAPSSGMSSLDPRAHMVSRANTIGSPNLSSSSVNIDENASKVLHKFGIDVAPSPKRFSRASKTSTSKNLSSFLAPTVSRNLSSQLKTSSSKNLAGYLHGTTDTNGSAIAAKKKDDSTNEALTIEEFNAKERTSMSPSISKASVNKRNSNQSSYYRSMFSDNGNDDNVTKVRTGESHLSVQEEEEMDMENAIDEDISLIPNPRFSRFSFGGLLGSNTVANEEGDWTIMNSTLNHSNTVVRGTHNKSSTMLGLGIKMRDTTTIKEDEEFEDEKPFISVPSSEDDEGNTHKNKRGGLRDSGNYDFDEEHSVASTANTEYSDVASQGQQMPGSHTIHQLETELSNFDLLSYRVADIGKVNKHKPSIVDSKETLLKNHSSDEATIEVKEDNNEHDFNDKIKQHYDDNGDSEEDDEDEDEEEEDDDDDDDARSSFEARPHSHNYSLAEITSESPVGGGYESPSIANDFKKSRHSTGIFSTTQFPRSPYVVNNNGDSNKDENSQQQTKHMLNDGHKGLITSPVQDTFGSKKPVESNSLFRRLSLNPNRAAPKAPAPPPPSAPISSAAKANISQPLSSPTKGHNRFSRISIGSKNMLQKEDKSTKSNWFKKFFHSLTTPSAKDQSGNSSSKVASKDIKIIDTSLTAAQLIRVIKYQLELKKIEGSISKVDIDEEFGLISGVIPSKFANGRKLKFKIEVIDLINSSSLHVIKMKGNDKGFQSLVNIVTFIIKKEEQDKISRR

SEQ ID NO: 39588 - protein, 340 aa, Bordetella parapertussis 12822
MSEATRKVPVTVLTGHLGAGKTTLLNRILTGQHGRKYAVIVNEFGEIGIDNDLIVESDEEIYEMNNGCICCTVRGDLIGILHKLLRRPGRFDAIVVETTGVADPAPVVQTFMMDEEVREKTELDAVITMVDAKHFPLRLADSQEAEDQIVYADVVLINKVDLVSAGEADQVQRRVAAINPYAACHRVQRAEIDLARILSIGAFDLQRCVELEARAAPAGCGHEHEHDAHCQGGTDHHHHHHEISVMSVSLQAGALDGRRFFPWIHSLVEKQGPDILRMKGILALDDDARRYIIQGVHMIVEGEHQRAWRDDEPRASKLVFIGRGLDAQALRAGFEACRSQ

SEQ ID NO: 39589 - protein, 525 aa, Streptomyces coelicolor A3(2)
MTSVVGDRLRLVVRVLGSLVADEVGQATRLRRRTKRDTRSPAEGLVGSAGSAAEATAGAEQRRAKAVRHALESLGPFYVKLGQVLSTRPDMVPQSIRDELQNLHDEVDVQPFSEFEPVLARDLGADWKLRFDDIETVAPLGAASLAQVYRVTLPGGRAAVVKIQRPGIREGVLADMALMRRASKIVARVAPRFNEVIDIEAMLGSVFDAMEPELDFTGEARNMDEARGQVRSFRSLEVPRVLHASPRVLVQSLADGKSVRHVDRAHFTDDERVEIGKDLLRFMYHGYFVHRFFHADPHAGNVFAAPGGPATLIDWGMVGRLDRRTSLQLLPLFMTLAQNDGAGLAQHWAEMGRVTPWANMPAFAADMAAFVPKVSHLSLEDMNFGVALTTVLAKATKRGIGSPPAVSLLGKSFANLDGSVRCLAPEITLPEVFQGEVPKILFALGREFLGRNQFARNSMELLLAAVTSPEQVRGVLSDVANRQFALNIHEPRTPDAMGGQRPTRPSASLLALGAAAFLLGRRRSG

SEQ ID NO: 39590 - protein, 475 aa, Xanthomonas axonopodis pv. citri str. 306
MSSVSIDGAPDAGENTRFIILISCVATIGGFLFGFDSGVINGTVDGLKQTFQSTAAETGFEVASMLLGCAIGAFFAGRLADRWGRRAVLIISAALFLLSAIGAGASHSSAFFIFARVMGGFAVGAASVISPAYIAEVASARYRGRLATMQQIAIISGLFCAFLSNYLLANAAGASTEPLWAGQAAWRWMFWMQAVPSILFLLLLLVIPESPRYLVVKGRREQALVVLKRLYGNAAAQTKLGEISASMAADQHKPKFSDLINKATGKIRPIVWIGIGLAVFQQLVGINVVFYYGAVLWQAVGFSEQDALLINVLSGGLSIGACLVTVMLVDKIGRKPLLWIGSAGMAVSLALVTYAFATASLDPNGKLAMSDAMGMLALVAANVYVVFFNASWGPVMWVMLGEMFPNQIRGSGLAIAGAAQWTSNFAITVSFPILLGSIGLAGAYGIYTVAAFISVFFVLKYVYETKGKELEQMEG

SEQ ID NO: 39591 - protein, 172 aa, Arabidopsis thaliana
MSFTGTQQKCKACEKTVYAVELLSADGVGYHKSCFKCTHCKSRLQLSSYSSMEGVLYCKPHFEQLFKESGSFNKNFQSPAKSADKSTPELTRTPSRVAGRFSGTQEKCATCSKTVYPIEKVTVESQTYHKSCFKCSHGGCPISPSNYAALEGILYCKHHFAQLLRRREVTTT

SEQ ID NO: 39592 - protein, 194 aa, Brassica napus
  misc_feature (142)..(142): Xaa can be any naturally occurring amino acid
  unsure (1)..(194): unsure at all Xaa locations
NISGVRQRHWGSGVADIRRPHWKRRIWLGTFETAEEAARAYDEAAVLMSGRNAKTNFSLNNNNNTGDTSEGKTDISSSSSSSSSLSTILSAKLRKCCKSPSPSLTCLRLDTGSSHIRSLAEIVPGCRSASSRVLTGELRPAXSQEPTSTTASKDDVVGPATEVGGGGEEGLMDEEEKVALQMIEELLIYSYFYC

SEQ ID NO: 39593 - protein, 359 aa, Capsicum annuum
MDSTNQNLTQTEDEAFLFAMQLASASVLPMVLKSALELDLLEIMAKAGPGAAISPSELAAQLPTKNPEAPVMLDRMLRLLATYSVLNCTLRTLPDGRVERLYSLAPVCKLLTKNADGVSVAPLLLMNQDKVLMESWYHLTDAVLDGGVPFNKAYGMTAFEYHGTDPRFNKVFNRGMSDHSTMTMKKILEDYKGFEGLNSIVDVGGGTGATVNMIVSKYPSIKGINFDLSHVIEDAPAYPGVEHVGRDMFVSVPKADAIFMKWICHDWSDEHCLKFLKNCYEALPANGKVLVAECILPETPDTSAATKNAVHVDIVMLAHNPGGKERTEKEFEALAKGAGFTGFRRACCAYQTWVMEFHK

SEQ ID NO: 39594 - protein, 147 aa, Candida glabrata CBS138
MSSNLTEEQIAEFKEAFALFDKDNNGSISSSELATVMRSLGLSPSEAEVTDLMNEIDVDGNHQIEFSEFLALMSRQLKSNDSEQELLEAFKVFDKNGDGLISAAELKHVLTSIGEKLTDAEVDEMLREVSDGSGEINIQQFAALLSK

SEQ ID NO: 39595 - protein, 328 aa, Kluyveromyces lactis
MPASSDKLQPKDQQTIELEQKLAVQSIRVFLQSKTSYDVLPVSYRLIVLDTSLLVKKSLNILLQNNVVSAPLWDAQTSKFAGLLTSSDFINVIQYYFHNPDKFELVDKLQLNGLKDIERAIGIQPYDTRSIHPFRPLYEACVKMIESRSRRIPLIDQDEETQREIVVSVLTQYRILKFVALNCKEIRYLKRPLRELDIISTNNIMSCQMSTPVIDVIQLLTLAGGVSSVPIVDEQGKLVNVYEAVDVLGLIKGGIYNDLSLSVGEALMRRSDDFEGVFTCTEKHKLSSILDTVRKSRVHRFFVVDSNGFLTGVLTLSDILKYILFAES

SEQ ID NO: 39596 - protein, 502 aa, Taxus wallichiana var. chinensis
MDALYKSTVAKFNEVTQLDCSTESFSIALSSIAGILLLLLLFRSKRHSSLKLPPGKLGIPFIGESFIFLRALRSNSLEQFFDERVKKFGLVFKTSLIGHPTVVLCGPAGNRLILSNEEKLVQMSWPAQFMKLMGENSVATRRGEDHIVMRSALAGFFGPGALQSYIGKMNTEIQNHINEKWKGKDEVNVLPLVRELVFNISAILFFNIYDKQEQDRLHKLLETILVGSFALPIDLPGFGFHRALQGRATLNKIMLSLIKKRKEDLQSGSATATQDLLSVLLTFRDDKGTPLTNDEILDNFSSLLHASYDTTTSPMALIFKLLSSNPECYQKVVQEQLEILSNKEEGEEITWKDLKAMKYTWQVAQETLRMFPPVFGTFRKAITDIQYDGYTIPKGWKLLWTTYSTHPKDLYFSEPEKFMPSRFDQEGKHVAPYTFLPFGGGQRSCVGWEFSKMEILLFVHHFVKTFSSYTPVDPDEKISGDPLPPLPSKGFSIKLFPETIVN

SEQ ID NO: 39597 - protein, 380 aa, Nocardioides sp. JS614
MSPLGDSITWEDWLTGRAADREEAGLVRRLHPRRPHETVLDLASNDYLGLSHHPQVRRAAAAAALRWGAGATASRLVTGTLTLHTDLEAELADWLGQPAALVLSTGYHANLAAVTALADRDAHIISDAHIHASLIDAVRLSSARLTVVPHNDVTAVRAALTAHPGRRTLVLAESVYSVLGDRAPLVDLADACAGHGAWLLVDEAHALGVHGPGLVKACGLADRPDVIVTATLSKSLGSQGGAILGTTALIEHLINTARPFIFDTGLNPAATAAALTATRITRIHPQLAATVHARVTALAGLLDVPAPAGAVLSVPMPSPSDALAAQAELLTGGVRVGCFRPPSVPDGISRLRITASAGMAPEDWQRATQALHSVTRRARS

SEQ ID NO: 39598 - protein, 483 aa, Zea mays
MDGPKRHLRVRLRVTARRRGAYGDGAGGALGPRRRKCRMETPVLNSAAKLQRREIGGRQLAARGGGPAAAVPERFRNMQLQEEFDTYDDNANLFVKLQFLKRRSKINEIVAAKDIIFALANSGLCAAFNRVTNKRIGFLNLSPDEVIRSLFYNKNNDSLITVSVYASDNFSTLKCRTTPVEYIRRNQLDAGFPLFESESLKWPGFVEFDDVNGKVLTYSAQDGIYKVFDLKNYYFLYSIPDENVQEIKISPGIMLLIYDRTPSYVPLKILSIEDGKQLKFFKHLLHRNKKIDFIEQFNEKLLVKQEDENFQILDVRSSELIEVNVSKFMTPSAFIFLYENNLFLTFRNRTVAVWNFRGDLVTSFEDHLLWHHDCSTNNIYITSDQDLIISYCKSEAVAEDGTVVPVGSINMSEIMTGKCIAKITANDPALSAPPRRNGRSKRRSSVWSTVPEALEDVTALFYDEDRNEIYTGNSHGLVHVWSN

SEQ ID NO: 39599 - protein, 470 aa, Xanthomonas campestris pv. vesicatoria
MTSRRDFFKFAGIAGGAVAASSVSRVAMAALPEPVIQTSASTMAPLVPNSGRPYNPVVTLNGWTLPWRMNQGVKEFHLVAEPVVREMAPGMKAHLWGYNGQSPGPTIEVVEGDRVRIFVTNKLPEHTSIHWHGQRLPNGMDGVTGLTQPAIESGKTFVYEFVARRPGTFMYHPHADEMVQMAMGMMGFWVTHPKDKHPLIDVVQRDFCFLLSAYDIEPGAATPKVAEMTDFNLWTWNSRVFPGIDSLNVRLNDKVRVRIGNLTMTNHPMHLHGHEFVVTGTDGGPTPKSTRWHEVTADVAVGQMRQIEFVADEEGDWAFHCHKSHHTMNAMGHDVPTLIGVDHTGLARKVNKLIPDYMVMGERGMADMAEMEMPIPDNTVPMMTGQGPFGSVEMGGMFSVLKVRRDQQPGDYKDPGWFKHPAGTVAHEYTGPLAEPARFSAEGGQSMPRERKPATPTEVKVRKPTSHGAH

SEQ ID NO: 39600 - protein, 649 aa, Nostoc punctiforme PCC 73102
MCGITGFWDISKQFSGEHLDETIQKMSKTLLHRGPDDGGIWTDVEVGVALGHRRLSIVDLSPLGHQPMMSANGRYMVVFNGEIYNFLELRRELTQLGHNFRGHSDTEIMLAGFSEWGLDKAIRRFNGMFAFALWDRQKRILHLGRDRLGEKPLYYGWQGSTFLFTSELKALKAHPNFRAEINRDALTQFFRYSYLPAPYSIYQGIYKLPPGTLLSWNGIDAHPDPVTYWSAREVTELGIAEPFMGSESEAVIQLEALLREAVGLRMVADVPLGAFISGGIDSSTIVALMQAQSSQPVKTFTIGFNEEAYNEAKHAKAVAKHLGTDHTELYVNPKEALEVIPKLPFLYDEPFSDVSQIPTFLVSQLAKQQVTVSLSGDGGDELFAGYNRYLFGRKIWQAIGWIPTTVRKNSARALTSVSPQNWNRGFANVNALLPSRIKQPEFGNKLHTFSEIMALPNPTAIYTKLVSHWEDPKALVIDGLEPPTILSNSQNWPHLLDFTQCMMYFDTVTYLPDDILVKVDRASMGVSLEGRIPFLDHRLVEFAWRLPLSMKIRNGQGKWLLRQVLYKYVPPTLVERPKVGFGVPINSWLRGPLRDWAEELLNENRLKNEGFFNPKPIREKWEEHLSGAASWEYRLWDVLMFQAWLEANH

SEQ ID NO: 39601 - protein, 459 aa, Phaseolus vulgaris
MGVVKGLLALALVLNVVVVSNGGKSSNFVRKTNKNRDMPLDSDVFRVPPGYNAPQQVHITQGDLVGRAMIISWVTMDEPGSSAVRYWSEKNGRKRIAKGKMSTYRFFNYSSGFIHHTTIRKLKYNTKYYYEVGLRNTTRRFSFITPPQTGLDVPYTFGLIGDLGQSFDSNTTLSHYELSPKKGQTVLFVGDLSYADRYPNHDNVRWDTWGRFTERSVAYQPWIWTAGNHEIEFAPEINETEPFKPFSYRYHVPYEASQSTSPFWYSIKRASAHIIVLSSYSAYGRGTPQYTWLKKELRKVKRSETPWLIVLMHSPLYNSYNHHFMEGEAMRTKFEAWFVKYKVDVVFAGHVHAYERSERVSNIAYKITNGLCTPVKDQSAPVYITIGDAGNYGVIDSNMIQPQPEYSAFREASFGHGMFDIKNRTHAHFSWNRNQDGVAVEADSVWFFNRHWYPVDDST

SEQ ID NO: 39602 - protein, 486 aa, Arabidopsis thaliana
MDYERIGKTQVTSSGGGFSPGKLRSMLLLGVDRKKNEEEESTPTMRSGSNQIDDPRVYVASGLDDCKDVDVVSEITDCSTSGIARSISLGLQEYSDYDNVNEIKSVSASSVFEFQKTEKEKVNQRMPIRSFSKPAPSKWDDAQKWIASPTANRPKTGQVQVPGSKKGPSFGRQSSMKIVEVAEHRVVEEPDTKRIDVSQVKKDMGNKFGSWEVDSYTTVDSYVKPVLMVENSIVESATEVNLSRHDSSVATAFAQPPSTARSVSMRDMGTEMTPIASQEPSRNGTPIRATTPIRSPISSEPSSPGRQASASPMSNKELSEKELQMKTRREIMVLGTQLGKFNIAAWASKEDEDKDASTSLKTKASLQTSKSVSEARATAWEEAEKAKHMARFRREEMKIQAWENHQKAKSEAEMKKTEVKVERIKGRAQDRLMKKLATIERKAEEKRAAAEAKKDHQAAKTEKQAEQIRRTGKVPSLLFSCFSFCS

SEQ ID NO: 39603 - protein, 341 aa, Candida albicans SC5314
MSSSTTVFVSGASGFIAQTLVKQLIEKGYKVVGTVRSNEKGDSLKENLKAAKLQSENFTYEIVKDIAVKGAFDDALKKHPEVTVFLHTASPFHFNVTDIEKELLTPAVEGTNNALQAIKTHGPQIKRVVVTSSYAAVGRFADLADPSIPATEESWNPITWEQSLSNPLAGYVGSKKFAEKAAWDFVEKEKPNFTLSVINPVYVFGPQAFEIKNKSQLNTSSEIINGLLNSKPDSKFDNLTGYFIDVRDVAKAHIVAFEKDSIQGQRLILAESPFSTQSILDLIRKDFPQLDSQLPKGDPSQADAWKKAESKIENEKTRELLGFKFIDFKKSIDDSVAQIIG

SEQ ID NO: 39604 - protein, 345 aa, Cryptococcus neoformans var. neoformans JEC21
MPKILVTRNLGEHAMTILRQSGYDLIVNPDDAPPSREWVLNHLADPQVYAACIMHSQPSDKVDKELIATANDNLRCISSFSVGYDHIDVKAANARGIKIGHTPGVLSDAVADIAVILVLSTLRRIGEGINLVKSGNWKQQPWAPFVNCGLSIGHPSLTIGFLGFGRISQATVQRLLAFTNKEQPPRILYTSSYRRDNQDEIDAGFSKTFGVEVRREERETLASQADILIVLCDLNPSTKDLVNKNFLQKMKKSAILVNVARGPIVNSEDLHEALVSGQIFGAGLDVLTGEPDIPADHPLLTLDNCLVLPHLGSADYDTRNAMAERCVRNAIAAANGEPLVAEVKV

SEQ ID NO: 39605 - protein, 151 aa, Candida albicans SC5314
MSDERTFIAIKPDGVQRGLISSILGRFEQRGFKLVGIKLVQPTESLLRTHYEDLQSKPFFPSLLSYMLSGPVLATVWEGKDVVKQGRAILGATNPLQSAPGTIRGDFAIDMGRNVCHGSDSVESANKEIDLWFKKEELVEYKPALFGWIYE

SEQ ID NO: 39606 - protein, 461 aa, Streptomyces coelicolor A3(2)
MTVSPPSTASTASTGSTGSTGSTATTGPSAGLAAPPSEPSAPRAGTAAPTGRPDIVDLYLKHIGSGRAVMGRVMGGMAEVRSEGVWIHADDGRRFLDFGGYGVFIMGHRHPAVVEAVHRQIDTHPLASRVLLEPVAARAAQALAAHTPPGLDYVHFVNSGAEATEAALKLARAHGLTSVITTRSGFHGKTLGALSVTANTTYQTPFQPLLPDVTQVAYDDPADLEQALAAHRDRACVIVEPVQGEGGVRIPRPGYLGQVRALCRTYGALLVVDEIQTGMGRLGTWWGVDAEDVRPDVLLVGKGLSGGVVPVAAMVATAEAYAPFSRDPYLHTSTFGASPIACAAALATVRAMEEEDTVARAAALGPRILTAVRDVCAPYQGGLVREVRGRGLLIGIEFAEEQAVGELMLELISRGVLVNNSLNSTRVLRLTPPAVVEDSALDLFLTTLGAALRGTADRMTG

SEQ ID NO: 39607 - protein, 245 aa, Glycine max
MAKEQQKHDPAAITNSFQNQNQTQELQGKGEVEKEEEAEAPLALSVTYKVLHMLGDITAGPASMFAQWLQLVRKRTSNCRTSGFPHRSSSMPSSPGESIEDTKNDQQTEISLWERLGKAEMLDIESSSFSWERLSSLHHTEHTSSNEHSEDEMNRVLEVTVNSGGVVFFAFFNGLGNDDASSKEAAAVIKISSSRMATQSERLGYEFAKWLGVQTPPARVIHNTSLEWTQIKEATEKARDAASST

SEQ ID NO: 39608 - protein, 128 aa, Arabidopsis thaliana
  misc_feature (17)..(17): Xaa can be any naturally occurring amino acid
  misc_feature (101)..(101): Xaa can be any naturally occurring amino acid
  misc_feature (124)..(124): Xaa can be any naturally occurring amino acid
  unsure (1)..(128): unsure at all Xaa locations
KNIDNFFAENEQLAFCXAIIVPGIHYSDDKLLQTRVFSYADTQRHRLGPNYLQLPVNAPKCAHHNNHHEGFMNFMHRDEEVNYFPSRYDQVRHAEKYPTPXAVCSGKRERCIIEKEEQLQRKPXGDNR

SEQ ID NO: 39609 - protein, 785 aa, Vibrio parahaemolyticus RIMD 2210633
MNKFRLVNSCLFIAMLVACTFAYMAHINSKSTQQLHSALSEVGHQLIEERDVIVNQYAIKERKNFELTKSLVDIEVEAEKLADTFDNAVWFPISPNRQKIQQTLAKFEQRVIQTTSQLDMLIGVQVENQYALLMLLDIYEEEFSTHIGETQLDKHYVEFFSRDLVNQSGEQSESGANFLGRLHESDKKIELLTNELLDHNYFVFVEEAEHSLLDLAQNEARFTWLFVFVAVMLLVGSFLYQLQYRMHNLKQLNSELEAETDKAERAAKAKSSFLAAMSHELRTPMNGVLGISQLIAEETKEPVTKEHIKVILDSGQHLMTILNDILDFSKVEENKLELEKAPFHLEQVLTPVCSAIQPLIDEKSIDLIVENDVPNNTEFTGDCARLRQILFNLAGNAVKFTNEGHVLIRTELNSEDKHLLIIVSDTGIGIAPDKQGRVFNSFEQADSSTTRRFGGTGLGLAIVKKLTELMGGSITLKSVEGVGTQFIVTLPIPWNESEKPSPQHTPVQTRSTQNLRILLAEDNRVNALVAKGFCEKLGHAVDVAENGLVAVEKARDNDYDLILMDNHMPEMNGVEATRFIREKLGVKTLLFAYTADVFREAHDHFIAAGADHVLTKPLQRESFADALKQFSARLKVKQTEEVSPVSNVLQLQRKPIENLRLTEEELSNSEMLASLKEHPNELLDLLNSIITDFELAVDDLIENFMQSDFDALKLTMHTTKGMALNLGLKILASQALELETQLKMNQVPAIEQLQMLINRLQVNIHQGHRLRDELVKAQQNSEQVF

SEQ ID NO: 39610 - protein, 420 aa, Sinorhizobium meliloti
MVEKRTQPLARDAMAYVLAGGRGSRLKELTDRRAKPAVYFGGKARIIDFALSNALNSGIRRIGVATQYKAHSLIRHLQRGWNFFRPERNESFDILPASQRVSETQWYEGTADAVYQNIDIIEDHGVEYMVILAGDHVYKMDYELMLQQHVDSGADVTVGCLEVPRMEATGFGVMHVDNADRIIAFVEKPADPPGIPGNPDMALASMGIYVFHTKFLMDMLRRDAADPKSSRDFGKDIIPYIVEHGKAVAHRFTHSCVRSDFEREAYWRDVGTIDAYWQANIDLTHITPELDIYDSTWPIWTFSEIKPPAKFVHDDENRRGSATSSLVSGDCIISGAALNRSLLFTGVRVNSYSRLENAVVLPDVTIGRHSILRNVVIDSRVVIPEGLVVGDDPELDAKRFRRTESGVCLITQTMIDKLGM

SEQ ID NO: 39611 - protein, 480 aa, Sinorhizobium meliloti
MNILSVASEVYPLVKTGGLADVVGALPSALLPHGVRTRTLVPGYPSVLKKLKKKKPVGRFDNLFGHPATVLAAEVNGVDLLVLDQPALYARDGGPYLDSTGRDYPDNFRRFAALSLAAAEIAGNGIIPNWKPDIVHVHDWQTALTPVYMRFGPAPDLPTVMTIHNIAFQGQFGASVFPELALPPDAFSTQFVEYYGDVGFLKGGLQTASAITTVSPSYAQEILTPEFGMGLDGLLSSRVADLTGIVNGIDGETWDPQTDPHIPAHYGPGTLKRRAGNRKALEERFGLEKGPGPIFCVISRLTWQKGMDLVAEAADDIVALGGKLVVLGSGDPALESALMAAASRNRGHIGMVTGYDEPLSHLMQAGADAILIPSRFEPCGLTQLYGLRYGCVPVVARTGGLTDTIIDANEAALSAKCATGFHFLPVTTDGLRLAIRRVLRAYNEPKLWARLQYQGMKSDVSWAKSAERYVSLYSALLAKG

SEQ ID NO: 39612 - protein, 339 aa, Ralstonia metallidurans CH34
MAETLLLTGATGYIASHTWVALHEAGYNVIGLDNLCNSSAEVVNRLAKITGTTPHFVEGDVRDRALLDRLLAEHKINGAIHFAALKAVGESVSKPLEYYGNNLEGLITLCSAMQSAGVRQLVFSSSATVYGNPHAMPILENFPLSATNPYGQTKLMGEQILRDLEISDPEWKIAFLRYFNPVGAHESGTIGEDPGGIPNNLMPYVAQVAAGRREKLSVYGGDYPTPDGTGVRDYIHVSDLADGHVAALAYLGKNSRGMTVNLGTGRGYSVLEVVKAYERASGRPIPYEIVARRPGDIAECYADPGIARTLLGWSARHDLDRMCEDSWRWQSLNPVGFTA

SEQ ID NO: 39613 - protein, 584 aa, Zea mays
QKKKKKKKKKKKKKKKKKKKKKKTLIFSPFARNAHTARSPISDPRSPRRSKMQIFVKTLTGKTITLEVESSDTIDNVKAKIQDKEGIPPDQQRLIFAGKQLEDGRTLADYNIQKESTLHLVLRLRGGMQIFVKTLTGKTITLEVESSDTIDNVKAKIQDKEGIPPDQQRLIFAGKQLEDGRTLADYNIQKESTLHLVLRLRGGMQIFVKTLTGKTITLEVESSDTIDNVKAKIQDKEGIPPDQQRLIFAGKQLEDGRTLADYNIQKESTLHLVLRLRGGMQIFVKTLTGKTITLEVESSDTIDNVKAKIQDKEGIPPDQQRLIFAGKQLEDGRTLADYNIQKESTLHLVLRLRGGMQIFVKTLTGKTITLEVESSDTIDNVKAKIQDKEGIPPDQQRLIFAGKQLEDGRTLADYNIQKESTLHLVLRLRGGMQIFVKTLTGKTITLEVESSDTIDNVKAKIQDKEGIPPDQQRLIFAGKQLEDGRTLADYNIQKESTLHLVLRLRGGMQIFVKTLTGKTITLEVESSDTIDNVKAKIQDKEGIPPDQQRLIFAGKQLEDGRTLADYNIQKESTLHLVLRLRGGQ

SEQ ID NO: 39614 - protein, 816 aa, Zea mays
MGEGAGDRVLSRLHSVRERIGDSLSAHPNELVAVFTRLKNLGKGMLQPHQIIAEYNNAIPEAEREKLKDGAFEDVLRAAQEAIVIPPWVALAIRPRPGVWEYVRVNVSELAVEELRVPEYLQFKEQLVEEGPNNNFVLELDFEPFNASFPRPSLSKSIGNGVQFLNRHLSSKLFHDKESMYPLLNFLRAHNYKGMTMMLNDRIRSLSALQGALRKAEEHLSTLQADTPYSEFHHRFQELGLEKGWGDCAKRAQETIHLLLDLLEAPDPSTLEKFLGTIPMVFNVVILSPHGYFAQANVLGYPDTGGQVVYILDQVRAMENEMLLRIKQCGLDITPKILIVTRLLSDATGTTCGQRLEKVLGTEHCHILRVPFRTENGIVRKWISRFEVWPYLETYTDDVAHEIAGELQANPDLIIGNYSDGNLVACLLAHKMGVTHCTIAHALEKTKYPNSDLYWKKFEDHYHFSCQFTTDLIAMNHADFIITSTFQEIAGNKDTVGQYESHMAFTMPGLYRVVHGIDVFDPKFNIVSPGADLSIYFPYTESHKRLTSLHPEIEELLYSQTENTEHKFVLNDRNKPIIFSMARLDRVKNLTGLVELYGRNKRLQELVNLVVVCGDHGNPSKDKEEQAEFKKMFDLIEQYNLNGHIRWISAQMNRVRNGELYRYICDTKGAFVQPAFYEAFGLTVVEAMTCGLPTFATAYGGPAEIIVHGVSGYHIDPYQGDKASALLVDFFDKCQADPSHWSKISQGGLQRIEEKYTWKLYSERLMTLTGVYGFWKYVSNLERRETRRYLEMLYALKYRTMASTVPLAVEGEPSSK

SEQ ID NO: 39615 - protein, 464 aa, Archaeoglobus fulgidus DSM 4304
MEFISSRDMQILDTNCEYFGLSRMLLMENAGKGVAEEVMKRFYEGKVQIFAGSGNNGGDGFVAARHLKGFDVEIFLLSKPKTELAIKNLEICRKAGFPVKEGLPEEIDADIVIDAMLGTGVRGRLREPYSTAVKMINESDAFKVAVDVPTGLDPDSGSYEEAVKADLTVTFHKAKPGLAKAREVCGEVAVKDIGIPESFENLCGPGDVAFSYKRYEDAHKGVHGKVLVVGGGDYTGAPALASLAALYAGADIVTTAVPMAIRKVVASFSPNLIVRGVGEERIEMKNLEELEELVKRHDVVVAGMGVGENPEFKEVVEELLKSCKKAVLDAQGIVDSVPENCECILTPHRGEFGRVFGDTEVQKAALKAKAVILLKGREDVITDGSRVKVNRSGNAGMTVGGTGDVLAGIAAAFLCNDDAFHSACAAAFLNGLAGDVCFEKFGYNYTATDLVKAIPEAILRCKSF

SEQ ID NO: 39616 - protein, 508 aa, Haemophilus influenzae Rd KW20
MSSQCPFSHLAATNLTMGNGAPVADNQNSLTAGPRGPLLAQDLWLNEKLADFVREVIPERRMHAKGSGAFGTFTVTHDITKYTRAKIFSEVGKKTEMFARFTTVAGERGAADAERDIRGFALKFYTEEGNWDLVGNNTPVFFLRDPRKFPDLNKAVKRDPRTNMRSATNNWDFWTLLPEALHQVTVVMSDRGIPASYRHMHGFGSHTYSFWNEAGERFWVKFHFRTQQGIKNLTDAEAAEIIANDRESHQRDLYEAIERGDFPKWTLFVQIMPEADAEKVPYHPFDLTKVWSKKDYPLIEVGEFELNRNPENFFADVEQSAFAPSNLVPGIGASPDRMLQARLFNYADAQRYRLGVNYRQIPVNRPRCPVHSNQRDGQGRVDGNYGSLPHYEPNSFSQWQQQPDFAEPPLRINGDAAHWDYRNDDNDYFSQPRALFNLMNAEQKQSLFNNTAAAMGDAPDFIKYRHIRNCHWCDAAYGEGVAKALGLTVEDALKARDTDPALGQGGLL

SEQ ID NO: 39617 - protein, 482 aa, Shewanella sp. ANA-3
MTPASASSQHEPLPTSVFLAIFSAVFLPMFLAAVDQTLLATATPAIVEDLGGLRQASWITIGYMLAMAASVPIYGWLGDNFGRAKILMIALVVFALGSIVSASASTMDHMIAGRILQGLGGGGLMSLSQSLVGELVPIRQRARFQGYFAAMFTLASVGGPVIGGFVVHAYSWHWLFWANIPLVMLAVWRLNRLHKQSVKPVRQGRFDLLGVLLFPTIITALLYWLSVAGQDFAWLSATSLGFMGFICVGALVLLWWERRRESPFLPLDLLANKAIYMPLFTAALFAACLFAMIFFLPIYLQVGLHTNPAKTGLLLMPMTFGIVTGSTIAGRLLSRDVAPKWLPTFGMGLAFIGLLLIGLVPPNANLIGALGVLVGIGLGTVMPSVQLVVQSVSGKARLSQITAMVSLSRSMGAAIGTALFSLLLYGLLPLDGAQVGIAAIKQLPIEVVHHAFQWGFIAAALVALSSAIVGYLSPATALRDHE

SEQ ID NO: 39618 - protein, 403 aa, Photorhabdus luminescens subsp. laumondii TTO1
MMREVFICDAIRTPIGRYGGVLSKIRADDLGAVPLKYFLQKYQDLDWSAVDEVIYGCANQAGEDNRNVARMSALLAGLPVTVAATTVNRLCGSGMDAISIGARAIKAGEADLIIAGGVESMSRAPFVMGKAETPFSREANGLHDTTIGWRFINPQMAELYGVDSMPETAENVAETFGISRQDQDLFAFRSQQKAKAAQLSGRFSLEIVSVSVPQKRGEFLVVDQDEHLRPETTLEGLAKLRAPFRAGGSVTAGNASGVNDGACALILASAEAVQRHGLTPRGKVIAAATAGVEPRIMGFGPAPATQKLLLKTGISLDEVDLLELNEAFASQALATLRALGVRDDDERVNPNGGAIALGHPLGMSGARLVTTALLELSLRQKRYAICTMCIGVGQGIAILIERV

SEQ ID NO: 39619 - protein, 603 aa, Hordeum vulgare subsp. vulgare
MAALATSQLATSGTVLGVTDRFRRPGFQGLRPRNPADAALGMRTIGASAAPKQSRKAHRGSRRCLSVVVRATGSGMNLVFVGAEMAPWSKTGGLGDVLGGLPPAMAANGHRVMVVSPRYDQYKDAWDTSVISEIKVADEYERVRFFHCYKRGVDRVFIDHPWFLEKVRGKTKEKIYGPDAGTDYEDNQQRFSLLCQAALEAPRILNLNNNPYFSGPYGEDVVFVCNDWHTGLLACYLKSNYQSNGIYRTAKVAFCIHNISYQGRFSFDDFAQLNLPDRFKSSFDFIDGYDKPVEGRKINWMKAGILQADKVLTVSPYYAEELISGEARGCELDNIMRLTGITGIVNGMDVSEWDPTKDKFLAVNYDITTALEAKALNKEALQAEVGLPVDRKVPLVAFIGRLEEQKGPDVMIAAIPEILKEEDVQIILLGTGKKKFEKLLKSMEEKFPGKVRAVVRFNAPLAHQMMAGADLLAVTSRFEPCGLIQLQGMRYGTPCVCASTGGLVDTIVEGKTGFHMGRLSVDCNVVEPADVKKVATTLKRAVKVVGTPAYQEMVKNCMIQDLSWKGPAKNWEDVLLELGVEGSEPGIVGEEIAPLAMENVAAP

SEQ ID NO: 39620 - protein, 397 aa, Triticum aestivum
  misc_feature (382)..(382): Xaa can be any naturally occurring amino acid
  unsure (1)..(397): unsure at all Xaa locations
HYITSLYKKAGWYRSGIPGISSTHASARALATPQIYRKTLLPVLLLLAAAALYPAAADGDEVLALTESTFEKEVGQDRGALVEFYAPWCGHCKKLAPEYEKLAASFKKAKSVLIAKVDCDEHKSVCSKYGVSGYPTIQWFPKGSLEPKKYEGQRTAEALTEYVNSEAATNVKIAAVPSSVVVLTEETFDSVVLDETKDVLVEFYAPWCGHCKSLAPIYEKVASVFKQDEGVVIANLDADKYTSLAEKYGVSGFPTLKFFPKGNKAGEEYESGRELDDFVKFINEKSGTSRDSKGQLTSEAGLVASLDALVKEFHSAADDKRKEILSKIEEEAAKLSGPAVKHGKIYVNVAKKILQKGSDYTKKETERLHRLLEKSISPSKAXDEFAIKKNILSAFSS

SEQ ID NO: 39621 - protein, 102 aa, Brassica napus
  misc_feature (21)..(21): Xaa can be any naturally occurring amino acid
  unsure (1)..(102): unsure at all Xaa locations
SPSSSSSDDVAAPLLPKSHGXDEVAYDEFNGASFSGAVFNLATTIIGAGIMALPATMKILGLVLGIAMIVVMAFLTDASIEFLLRFSKIKRSRSYGGLMGDS

SEQ ID NO: 39622 - protein, 179 aa, Pisum sativum
MAREGLGLEITELRLGLSCGEPKKNEKKRMFSEIDGGVEENGGSGDRKSVDKKNQVVGWPPVCSYRKKNMNEGSKMYMKVSMDGAPYLRKIDLCLHKGYLELALALEKLFDCCGIEEALKDAENCEHVPIYEDKDGDWMLVGDVPWEMFIESCKRLRIMKRSDAKGFDLQPKGSLKRFI

SEQ ID NO: 39623 - protein, 450 aa, Oryza sativa
MDRPDETVKFPSCDAYFDTIQSKKKLPLSLQESLTAAFAQIPVSSFPDVPNGRVIEIPGDTSVLDAVRILSKHNIRAAPVLNPECGAPADWKGRYLGIIDYSAIILWVLENAEIAAVALSAGSATAAGVGMGAVGAVGVAALGATGPAAVAGLTAAAVGAAVAGGLTAEKGVAKDGLTAADHLGEDFYKVLLQQEPFKSTTVRSIVESYRWSPFVPITLDTSMLTVLLLLSKYRLRNVPVIEPDKPIIKNFITQTGVVKGLQQCKGRDWFDYISALPLSDLGLPFMSLDEVITVNSGDLILEAFKCMKDNKIGGVPVVEGPNKKLVGSVSIRDIRFLLLRPDLFSNFRQLTVMEFMKTIGSTVSDSGNGLVKPPLTCSPDASLGSVIDSIASRITHRIYVVDGDFEVVGVVTLRDVISCFIYEPPGYCDNYLASAMDKLEEKGAGSVDTS

SEQ ID NO: 39624 - protein, 234 aa, Arabidopsis thaliana
MATNEPEHEHRDEEEAGANEDEDTGAQVAPIVRLEEVAVTTGEEDEDAVLDLKSKLYRFDKDANQWKERGAGTVNFLKHKNTGKIPLVMRQSKTLKICANHFLKSGMSVQEHVGNEKSCVWHARDFADGELQDELFYIRFASIENCKTFMQKFKEVAESEEEKEESKDAADTAGLLEKLTVEETKTEEKTEAKAVETAKTEVKAEEKKESEAEKSGEAKKTEESGSLNIRSVFI

SEQ ID NO: 39625 - protein, 335 aa, Cryptococcus neoformans var. neoformans JEC21
MSKPQVLIAANPKTGIVWSKEEQSSKLGAVAEVLELASASRSEFFQDLAPNGKYANIVAIYRHNDSVSAIGLFDEELINKLPASVKYICHNGAGYDQIDVAACTARGIQVSHTPQAVDDATATVGAFLAISAMRQFWRAEVNVRSGKWKAGLSPARDPEGKTLGIIGMGGIGSALARRLLAFDMKVIYYNRRPIQPPPNFPCTYVSSIEELLKQADVVSLNLPLNEKTKGSFGRQEFGLMKDGSVLINTARGAVIDEEAFIEALESGKLYSAGIDVYPDEPNVNPKLLAMDNITLLPHMGTETRDSQKKMELLVLDNMISALAGKGLLNQVPEQK

SEQ ID NO: 39626 - protein, 877 aa, Vibrio vulnificus YJ016
MNEKYAALKSNVSMLGHLLGNTIQEAHGDEILEKVETIRKLSKSARAGNQADRNNLIEEIKSLPDEQLTPVARAFNQFLNLTNIAEQYHTISRHCDAHVCEPDAINTLFAKLGQNGINKLDTAQAIRELNIELVLTAHPTEITRRTMINKLVKINECLSKLELSDLSYKERHKTEKRLEQLIAQSWHSDVIRKQRPTPLDEAKWGFAVVENSLWEAVPDFLRELDEKLKDYLDQGLPIDARPVHFSSWMGGDRDGNPFVTHTVTREVLLLSRWKAADLYLKDINELISELSMTKCNDTVRQLAGEDEHEPYRAILKQLRTLLSDTKEILDAKINGQKLAVKAPLQSVEQLWDPLFACYQSLRECGMSMIAEGSLLDTLRRVKAFGVHLVRLDIRQESTRHADVLSELTRYLGIGDYNHWSEQDKIAFLTNELASKRPLLPRDWQPSEPVKEVLDTCKIIAAQSREAFGAYVISMAKTASDVLAVHLLLQESGCPYRMDVCPLFETLDDLNNAEAVIKQLMSIDLYRGFIQNHQMVMIGYSDSAKDAGVMAAGWAQYHAMEALVNVAEQEGIELTLFHGRGGTIGRGGAPAHAALLSQPPKSLKGGLRVTEQGEMIRFKLGLPDVAVNSFNMYASAILEANLLPPPEPKQEWRDLMEVLSQVSCEAYRSVVRGEPDFVPYFRQATPELELGKLPLGSRPAKRNPNGGVESLRAIPWIFSWSQNRLLLPAWLGAGEAIQYSIDKGHQALLEEMCREWPFFSTRLGMLEMVYLKCNSEISRYYDERLADKSLLPLGDRLRDQLQSDIKAVLNVENNENLMQSDPWGQESIRLRNIYIEPLNMLQAELLYRTRQAGVVSEELEEALMVTIAGIAAGMRNTG

SEQ ID NO: 39627 - protein, 488 aa, Chromobacterium violaceum ATCC 12472
MAGALLAASLLSGCDRIEQFVKGSNQPAPVAIPAQQDGRVAMLLPDFTQLVSRDGPAVVNIQATREGGGAAPQQSGNMPFPVPEDDPLYDFFRRFMPNQPPQQEQGPEESVSYGSGFIISSDGFILTNAHVVADGGQIRVTLTDKRELRAKLVGLDKRSDVALLKVAAADLPVAKIGNPADLKVGEWVAAIGAPFGFDNTVTAGIVSAKGRSLPDETLVPFIQTDVAINPGNSGGPLFNLRGEVVGINSQIYSRSGGFMGISFAIPIDLAMQVADQLKTKGKVSRGQLGVNIQEVTQELAQSFGLQRPSGALVVRVDPKGPAARAGLQAGDIILKLNNQSIDSSKDLPMLVGSLGPGTKIKLVVWRKGFEKTMEATLVEQAQEPGSNTKPASDNSPQGYQFGKLGLTLSELTAEQRGDLGIRGGLLIQKSQGPAARSGLMPGDIILGLNQNDITSISAFEKALASAGGHAALLVRRGEAVLYIALRTD

SEQ ID NO: 39628 - protein, 429 aa, Erwinia carotovora subsp. atroseptica SCRI1043
MTRRAIGVSERPPLLQTIPLSFQHLFAMFGATVLVPILFKINPATVLLFNGVGTLLYLFICKGKIPAYLGSSFAFISPVLLLLPLGYEVALGGFIMCGVLFCLVALIVQKAGTGWLNVLFPPAAMGAIVAVIGLELAGVAAGMAGLLPADGASVDSTAVTISLATLAITILGSVLFRGFLAIIPILIGVLAGYVLSFALGVVDLTPIREAHWFAMPTFYTPRFEWFAILAILPAALVVIAEHVGHLVVTANIVKKDLMRDPGLHRSLFANGISTVLSGFFGSTPNTTYGENIGVLAITKVYSTWVIGGAAILAILLSCVGKLAAAIQAVPVPVMGGVSLLLYGVIGASGIRVLIESKVDYNKAQNLILTSVILIIGVSGAKVHLGSTELKGMALATVVGIGMSLVFKVISLFRKEEEILDAPEENDARS

SEQ ID NO: 39629 - protein, 608 aa, Manihot esculenta
MATVIAAHFVSRSSHLSIHALETKANNLSHTGPWTQTITPNGLRSLNTMDKLQMKTQSKAVKKVSATGNGRPAAKIICGHGMNLIFVGAEVGPWSKTGGLGDVLGGLPPAMAARGHRVMTVSPRYDQYKDAWDTSVSVEIKIGDRIETVRFFHSYKRGVDRVFVDHPMFLEKVWGKTGSKIYGPRAGLDYQDNQLRFSLLCLAALEAPRVLNLNSSKNFSGPYGEEVAFIANDWHTALLPCYLKAIYQPMGIYKHAKVAFCIHNIAYQGRFAFSDFPRLNLPDKFKSSFDFIDGYEKPVKGRKINWMKAGILESDRVLTVSPYYAQEVISGVERGVELDNFIRKTGIAGIINGMDVQEWNPVTDKYIDIHYDATTVMDAKPLLKEALQAEVGLPVDRNVPLIGFIGRLEEQKGSDIFVAAISQLVEHNVQIVILGTGKKKFEKQIEHLEVLYPDKARGVAKFNVPLAHMITAGADFMLVPSRFEPCGLIQLHAMRYGTVPIVASTGGLVDTVKEGYTGFQMGALHVECDKIDSADVAAIVKTVARALGTYATAALREMILNCMAQDLSWKGPARMWEKMLLDLEVTGSEPGTEGEEIAPLAKENVPTP

SEQ ID NO: 39630 - protein, 234 aa, Thermotoga maritima MSB8
MSVYLAEFLGTMLLIILGDGVVANVVLKKSKGHNSGWIVITTGWGLAVAMSVYLVGRISGAHINPAVTIGLAFIGQFPWSKVPGYIFSQILGAFVGAILVYLTYLPHWKETDDPDAKLAVFCTGPAVRKYGANLLTEIIGTMVLLMGVLGIGANKLADGLNPLLVGFLVWSIGLSLGGPTGYAINPARDFGPRLAHAILPIPGKRDSDWSYSWVPIIGPIIGGILGASLYNWLF

SEQ ID NO: 39631 - protein, 513 aa, Arabidopsis thaliana
  misc_feature (500)..(500): Xaa can be any naturally occurring amino acid
  unsure (1)..(513): unsure at all Xaa locations
MDHSSNRFGNNGVESILPNYKLGKTLGIGSFGKVKIAEHVVTGHKVAIKILNRRKIKNMEMEEKVRREIKILRLFMHPHIIRQYEVIETTSDIYVVMEYVKSGELFDYIVEKGRLQEDEARNFFQQIISGVEYCHRNMVVHRDLKPENLLLDSRCNIKIADFGLSNVMRDGHFLKTSCGSPNYAAPEVISGKLYAGPEVDVWSCGVILYALLCGTLPFDDENIPNLFKKIKGGIYTLPSHLSSEARDLIPRMLIVDPVKRITIPEIRQHRWFQTHLPRYLAVSPPDTVEQAKKINEEIVQEVVNMGFDRNQVLESLRNRTQNDATVTYYLLLDNRFRVPSGYLESEFQETTDSGSNPMRTPEAGASPVGHWIPAHVDHYGLGARSQVPVDRKWALGLQSHAHPREIMNEVLKALQELNVCWKKIGHYNMKCRWVPGLADGQNTMVNNQLHFRDESSIIEDDCAMTSPTVIKFELQLYKAREEKYLLDIQRVNGPQFLFLXDLCAAFLTELRVI

SEQ ID NO: 39632 - protein, 371 aa, Candida albicans SC5314
MLIKSNYNCINIKRFLLNQTRVSVTASNSFSFYFYFKPYKFNCYKSYSTMSTTTPTIKLNSGYEMPIVGFGCWKVTNATAADQIYNAIKTGYRLFDGAEDYGNEKEVGEGINRAIKDGLVKREELFIVSKLWNNYHSPENVEKALNKTLTDLNLEYLDLFLIHFPIAFKFVPLEEKYPPGFYCGDGDKFHYENVPLLDTWKALEKLVNLGKIKSIGISNFNGGLIYDLIRGATIKPAVLQIEHHPYLQQPRLIEFVQNQGIAITAYSSFGPQSFLELQSKRALDTPTLFEHETIKSIADKHGKSPAQVLLRWATQRNIAVIPKSNNPDRLAQNLAVVDFDLTEEDLQAISKLDIGLRFNDPWDWDKIPIFV

SEQ ID NO: 39633 - protein, 960 aa, Zea mays
MPERHQSIDAQLRLLAPGKVSEDDKLVEYDALLVDRFLDILQDLHGPHLREFVQECYELSAEYENDRDEARLGELGSKLTSLPPGDSIVVASSFSHMLNLANLAEEVQIAHRRRIKLKRGDFADEASAPTESDIEETLKRLVSQLGKSREEVFDALKNQTVDLVFTAHPTQSVRRSLLQKHGRIRNCLRQLYAKDITADDKQELDEALQREIQAAFRTDEIRRTPPTPQDEMRAGMSYFHETIWKGVPKFLRRIDTALKNIGINERLPYNAPLIQFSSWMGGDRDGNPRVTPEVTRDVCLLARMMAANLYFSQIEDLMFELSMWRCSDELRIRADELHRSSRKAAKHYIEFWKQVPPNEPYRVILGDVRDKLYYTRERSRHLLTSGISEILEEATFTNVEQFLEPLELCYRSLCACGDKPIADGSLLDFLRQVSTFGLALVKLDIRQESDRHTDVLDSITTHLGIGSYAEWSEEKRQDWLLSELRGKRPLFGSDLPQTEETADVLGTFHVLAELPADCFGAYIISMATAPSDVLAVELLQRECHVKHPLRVVPLFEKLADLEAAPAAVARLFSIDWYMDRINGKQEVMIGYSDSGKDAGRLSAAWQMYKAQEELIKVAKHYGVKLTMFHGRGGTVGRGGGPTHLAILSQPPDTIHGSLRVTVQGEVIEHSFGEELLCFRTLQRYTAATLEHGMHPPISPKPEWRALMDEMAVVATKEYRSIVFQEPRFVEYFRSATPETEYGRMNIGSRPSKRKPSGGIESLRAIPWIFAWTQTRFHLPVWLGFGAAIKHIMQKDIRNIHILREMYNEWPFFRVTLDLLEMVFAKGDPGIAAVYDKLLVADDLQSFGEQLRKNYEETKELLLQVAGHKDVLEGDPYLKQRLRLRESYITTLNVCQAYTLKRIRDPSFQVSPQPPLSKEFTDESQPAELVQLNQQSEYAPGLEDTLILTMKGIAAGMQNTG

SEQ ID NO: 39634 - protein, 568 aa, Candida albicans SC5314
MVLSKHIDALRLESQILKKTPQAQLRKEAFIDAYDSHKNIPQFEIPQNSSNEQLIYKYLSQELALDGIPTLNLASFVNTYVDDTSARLIQDNLTKNLADNDEYPSLIDIQTRCISILSNLWHAPGKVDKVTGNRVTNSIGTATTGSSEAIMLAGLALKKRWQLKRKAEGKSTDNPNILMATCAQVALEKFACYFDVENRLIPVTEESGHLIDVSKIKENIDENTIGIFVIMGSTFTGAFEPVEEISKLLDEVEKERGLDIRIHVDGASGGFVAPFIFPHLKWDFAVPRVDSINTSGHKFGLTSVGLGWVIWKDADLLPKELRFSLDYLGGVEETFGLNFSRPGFPVITQYYNFLSLGRQGYAKIFDGCMTNARLLSRFLEESKYFDVVSVIHHKLSDSEKKAQFIREVDDKKLDSKLYTINEEFKPGLPVVAFRFSKEVRDKYPELPQELLSTLLRKRGYIIPNYHLPPSENDKEILRVVVRNSLSLNLLERLIQDITDATELLIKAADSIADYVSTSGEHTDVENRERIHKLLAAIASGGVAEVKEEKHKKDNHQGSKNKKSYRGTC

SEQ ID NO: 39635 - protein, 494 aa, Shewanella sp. ANA-3
MKNQVQLITYVDRITGAGLKQLKALLDNELDGLFGGVHLLPFYYPIDGSDAGFDPIDHVQVDSRLGDWDDVKSIGEAFDIMADLIVNHMSAESPEFKDVLKHGKQSVYWDLFLTKDKVFPEGLSEQDQKAIYRPRPGSCFSTYTLADGSTEEFWTTFTRNQIDIDVNSAAGKDYLNRVLARFNHSKVNLIRLDAAGYAIKKPGTSCFMIEESFEFVDKLAKQANELGMTTLAEIHSHHMTQIDIAKRVDMVYDFALPPLILHTLFSQDCSALSHWLDMAPRNCITVLDTHDGIGIIDVGPMDGLRGLLNEKQIDNLVETIHGNSQGESLQATGAAASNVDLYQINCTYYDALGQNDLDYLMARAIQFFAPGIPQVYYTGLLAIPNDMTLLNQTHVGRDINRPYLNREKVQQALQKPVVKALIQLIKLRNNSAAFNGRFSMAASGKTLTLTWSAQNASASLSLDFAHKQGLITLLDEQGIETQIALADLLTQAQA

SEQ ID NO: 39636 - protein, 429 aa, Vibrio sp. Ex25
MADKKATLHVEGQAPIELPIMDGTLGTPVIDVRKLGANGYFTFDPGFLATASCESSITYIDGGKGILLHRGFPIDQLANNADYLEVCYILLYGEAPTREQYEQFKTTVTRHTMVHEQIASFFHGFRRDAHPMAVMCGVVGALAAFYHDSLDINNDEHREIAAYRLLSKMPTLAAMCYKYSIGQPFIYPRNDLSYAENFLHMMFANPCEEYEVNPVVARAMDKIFTLHADHEQNASTSTVRLAGSSGANPFACIAAGIASLWGPAHGGANEACLRMLEEIGSVDNIPEYVDRAKDKDDPFRLMGFGHRVYKNYDPRATVMRETCHEVLKELNIQDPLLDVAMELERIALSDEYFVSKKLYPNVDFYSGIILKAIGIPVSMFTVIFAISRTIGWIAHWNEMHSDPLNRIGRPRQLYTGETQREFSPLHERE

SEQ ID NO: 39637 - protein, 372 aa, Annona cherimola
YETDPYHPITNPRGVIQMGLAENQLCSDLIEEWVRRNPSSSICTPEGASEFKEIAIFQDYHGLPAFRKAVANFMEKVRGGRAKFDPDRIVMSGGATGAHELIAFCLADPGDAFLVPTPYYPGFDRDLRWRTGVQLVPVECHSYNNFKVTRSALEAAYMKAQEENIRVKGLLITNPSNPLGTILDRETLESIISFINEKSIHLVCDEIYAATVFSSPPFVSIAEILTDVPHCNLDLVHIVYSLSKDLGLPGFRVGVVYSYNDHVVRIGRKMSSFGLVSTQTQHLIASLLSDDAFVNKFIVESARRLAERHSTFTRELARVRISCLKSNAGLFCWMDLRALLKEPTVEGEMELWHTIVNVIKLNVSPGASFHCS

SEQ ID NO: 39638 - protein, 438 aa, Pyrococcus horikoshii OT3
MLILNNMKANDIIKRYSKVIAQANKMHYFPLVPVKAENAKVWDINGKEYIDFLSDAAVQNVGHNNPRVVKAVKEQVDKLMHASYIYAYPIEPLLLAEKLAEIAPIDNPKVSFGLTGGDANDAAIKFARAYTKRQTILSYMKSFYGSTYGAMSLTGLDFRVRAIVGELSGVHYLPYPYCYRCPFGKEPGSCKMECVEYIKEKFEGEVYAEGVAALFAEPIQGDSGIVVPPKNYFKKVTKILREHGILLVVDEIQSGMGRTGKWFAIEHFGVKPDIITVGKALGGGLPISATIGKAEIMDSLPPLSHAFTLSGNPTTSRAALAVIEEIEEKNLLRRAEKLGNYAMKRLREMMDKHELIGDVRGIGLMIGVELVKDRETKERAIEETSKVIERAFDLGLIVTHFSGNVLRIEPPLTIERETLDEGLDVLEKAIEDVEEGRV

SEQ ID NO: 39639 - protein, 314 aa, Arabidopsis thaliana
  misc_feature (136)..(137): Xaa can be any naturally occurring amino acid
  misc_feature (142)..(142): Xaa can be any naturally occurring amino acid
  misc_feature (146)..(146): Xaa can be any naturally occurring amino acid
  misc_feature (148)..(150): Xaa can be any naturally occurring amino acid
  misc_feature (152)..(152): Xaa can be any naturally occurring amino acid
  misc_feature (156)..(156): Xaa can be any naturally occurring amino acid
  misc_feature (158)..(158): Xaa can be any naturally occurring amino acid
  misc_feature (162)..(162): Xaa can be any naturally occurring amino acid
  misc_feature (189)..(189): Xaa can be any naturally occurring amino acid
  misc_feature (204)..(204): Xaa can be any naturally occurring amino acid
  misc_feature (206)..(206): Xaa can be any naturally occurring amino acid
  misc_feature (210)..(210): Xaa can be any naturally occurring amino acid
  misc_feature (219)..(219): Xaa can be any naturally occurring amino acid
  misc_feature (234)..(234): Xaa can be any naturally occurring amino acid
  misc_feature (237)..(237): Xaa can be any naturally occurring amino acid
  misc_feature (241)..(241): Xaa can be any naturally occurring amino acid
  misc_feature (243)..(247): Xaa can be any naturally occurring amino acid
  misc_feature (249)..(249): Xaa can be any naturally occurring amino acid
  misc_feature (264)..(264): Xaa can be any naturally occurring amino acid
  unsure (1)..(314): unsure at all Xaa locations
MQIFVKTLTGKTITLEVESSDTIDNVKAKIQDKEGIPPDQQRLIFAGKQLEDGRTLADYNIQKESTLHLVLRLRGGMQIFVKTLTGKTITLEVESSDTIDNVKAKIQDKEGIPPDQQRLIFAGKQLEDGRTLADYXXQKESXLHLXLXXXRXGMQXFXKTLXGKTITLEVESSDTIDNVKAKIQDKEGXPPDQQRLIFAGKQLXDXRTLXDYNIQKESXLHLVLRLRGGMQIFXKTXTGKXIXXXXXSXDTIDNVKAKIQDKEXVFLRTSSVSSSLESSLRMDVLWPTTTSRRSLLFTWSCVFVVVSKSRLCYA

SEQ ID NO: 39640 - protein, 319 aa, Shewanella sp. ANA-3
MTVLLSFGEVLVDLLPTDISGKSHQAIAGGAPANVAVGYAKLGGKSYFAGGISTDDYGAMLKQALANEGVVTDYLTQVPEAPTATVVVNLDEHGERTFEFNRQGTADLCYSPRHFDAIPWQQMDIFHLCSNTFTEASIFNASLYGACCANSFNKIVSFDVNLRLSLWPDTALLAERVEQCFRYTQVLKMSREEAEYLALTRNKSFEDYLQFCLAHGVEVILITDGANPVQCITVNERFSVPVPQIKAVDTTAAGDSFMAGFLFALGFELAFDLEHLTLKHRLACQAQLRKAIEFAVRCGAVTCGQKGAFPALPTLSQVS

SEQ ID NO: 39641 - protein, 397 aa, Synechococcus elongatus PCC 7942
MAANLLEQLRGMTVVVADTGDIQSIATFTPRDATTNPSLITAAAQMPQYQSIIDDTLRQVRTELGAEAPVEAIVAEAIDELFVAFGLRILEIVPGRVSTEVDARLSYDTEATIAKARKLIGLYERAGIRRDRVLIKIASTWEGIRAAEVLEKEGIHCNLTLLFGFHQAVACAEAGVTLISPFVGRILDWYKKESGRDAFPGAEDPGVQSVTQIYNYYKKFGYATEVMGASFRNISEIIELAGCDLLTISPGLLEELRQTEALLERKLDPAIAESLELEQIHLDRDRFAELHQADRMANEKLDEGIRGFCKAIDTLEGLLKQRLAVLEGKAVFHHAAHEVFSVCDLDGDGFITREEWLGSDAVFDALDLNKDGKLNEEDLLAGLGATLQMAGRAVATV

SEQ ID NO: 39642 - protein, 281 aa, Vigna radiata
GSSTDQAPGDDSEVILYPQAIFKDPFRRGNNILVICDVYTPAGEPLQTNKRYDAAKIFSHPDVVAEVPWYGIEQEYTLLQKDVNWPLGWPLGGFPGPRDPYYCSAGADRSFGRDISDAHYKACLFAGINISGINGEVMPGQWEFQVGPAVGISAGDELWVARYILERITEIAGVVLSFDPKPIKGDWNGAGAHTNYSTKTMRNDGGYEVIKSAIEKLGKRHKEHIAAYGEGNERRLTGRHETADINTFLWGVANRGASIRVGRDTEKAGKGYFEDRRPASN

SEQ ID NO: 39643 - protein, 770 aa, Oryza sativa (japonica cultivar-group)
MAAAAILPELAAQVVIPVAAAVGIAFAVLQWALVSKVKLTAEPRRGEAGGAAGGKSGPSDYLIEEEEGLNDHNVVSKCAEIQTAISEGATSFLFTEYKYVGLFMSIFAVLIFLFLGSVEGFSTKSQPCHYSKDKTCKPALANAIFSTIAFVLGAVTSLVSGFLGMKIATYANARTTLEARKGVGKAFITAFRSGAVMGFLLAASGLLVLYIAINLFGIYYGDDWEGLFEAITGYGLGGSSMALFGRVGGGIYTKAADVGADLVGKVERNIPEDDPRNPAVIADNVGDNVGDIAGMGSDLFGSYAESSCAALVVASISSFGINHEFTPMVYPLLVSSVGIIACLITTLFATDFFEIKAVSEIEPALKKQLIISTAFMTVGIALVSWLGLPYTFTIFNFGAQKTVQSWQLFLCVAVGLWAGLIIGFVTEYYTSNAYSPVQDVADSCRTGAATNVIFGLALGYKSVIIPIFAIAFSIFLSFSLAAMYGVAVAALGMLSTIATGLAIDAYGPISDNAGGIAEMAGMSHRIRERTDALDAAGNTTAAIGKGFAIGSAALVSLALFGAFVSRAAISTVDVLTPKVFIGLIVGAMLPYWFSAMTMKSVGSAALKMVEEVRRQFNTIPGLMEGTTKPDYATCVKISTDASIKEMIPPGALVMLTPLIVGILFGVETLSGVLAGALVSGVQIAISASNTGGAWDNAKKYIEAGASEHARTLGPKGSDPHKAAVIGDTIGDPLKDTSGPSLNILIKLMAVESLVFAPFFATHGGILFKLF

SEQ ID NO: 39644 - protein, 324 aa, Oryza sativa
MSVSAAVAAASTSRTLVLARHRSPPASRVAATSRGRPFSSGPHPLAVSPATRAPAMATDGAAAAAAAGSKKKKEVLIFDAEEDLAVSLAKYTAELSAKLAAERGAFTVVLSGGSLIKNIRKLAEPPYLDSVDWSKWHVFWVDERVVPKDHEDSNYKLALDGFLSKVPIPTGQVYAINDALSAEGAADDYETCLKQLVKNGVIAMSQSTGFPRFDVMLLGMGPDGHIASLFPGHPLVNENKKWVTYIKDSPKPPPERITFTFPVINSSAYVAMVVTGAGKAGAVQKALSDKQTSSDLLPVEMAVLQDGEFTWFTDKPAVSMLQNK

SEQ ID NO: 39645 - protein, 281 aa, Vigna radiata
GSSTGQAPGEDSEVIIYPQAIFKDPFRRGNNILVICDAYTPAGEPIPTNKRHNAAKIFSHPDVVAEVPWYGIEQEYTLLQKDVNWPLGWPVGGFPGPQGPYYCGAGADKAFGRDIVDAHYKACLYAGINISGINGEVMPGQWEFQVGPAVGISAGDELWVARYILERITEIAGVVLSFDPKPIKGDWNGAGAHTNYSTKTMRNDGGYEVIKSAIEKLGKRHKEHIAAYGEGNERRLTGRHETADINTFLWGVANRGASIRVGRDTEKAGKGYFEDRRPASN

SEQ ID NO: 39646 - protein, 189 aa, Pisum sativum
MEFKATELRLGLPGITEEEEKKIIHGSSVVKNNNKRQLPQTSEESVSISKVTNDEHIVESSSAAPPAKAKIVGWPPIRSYRKNSLHEADVGGIFVKVSMDGAPYLRKIDLRVYGGYSELLKALETMFKLTIGEYSEREGYKGSEYAPTYEDKDGDWMLVGDVPWDMFVTSCKRLRIMKGTEAKGLGCGV

SEQ ID NO: 39647 - protein, 380 aa, Magnaporthe grisea 70-15
MGAPKQGLEKEDKKRDAEFNKALHGQSALAAGGIAAMFSKDKEAKKLAVDEYFKHFDNKTAANETPEERAARQKEYATLTRHYYNLATDIYEYGWGQSFHFCRFSHNESFYQAIARHEHYLAHQIGIKEGMTVLDVGCGVGGPAREIAKFTGCNVVGLNNNDYQIDRATHYAKQEKLDSQLQFVKGDFMQMSFPDESFDAVYAIEATVHAPKLEGVYSEIFRVLKPGGTFGVYEWLMTDDYDNDNLHHRDIRLKIELGNGISNMVPISEGEAAMRAAGFEIIKTDDLAQKGDELPWYWPLAGDLKYLQSYFDLFTVLRMTKWARTCLHGMAGVLEAVGVAPAGTKKTADALATGGDALVAGAKENIFTPMYLMVGRKPMN

SEQ ID NO: 39648 - protein, 477 aa, Acinetobacter sp. NCIMB9871
MNYPNIPLYINGEFLDHTNRDVKEVFNPVNHECIGLMACASQADLDYALESSQQAFLRWKKTSPITRSEILRTFAKLAREKAAEIGRNITLDQGKPLKEAIAEVTVCAEHAEWHAEECRRIYGRVIPPRNPNVQQLVVREPLGVCLAFSPWNFPFNQAIRKISAAIAAGCTIIVKGSGDTPSAVYAIAQLFHEAGLPNGVLNVIWGDSNFISDYMIKSPIIQKISFTGSTPVGKKLASQASLYMKPCTMELGGHAPVIVCDDADIDAAVEHLVGYKFRNAGQVCVSPTRFYVQEGIYKEFSEKVVLRAKQIKVGCGLDASSDMGPLAQARRMHAMQQIVEDAVHKGSKLLLGGNKISDKGNFFEPTVLGDLCNDTQFMNDEPFGPIIGLIPFDTIDHVLEEANRLPFGLASYAFTTSSKNAHQISYGLEAGMVSINHMGLALAETPFGGIKDSGFGSEGGIETFDGYLRTKFITQLN

SEQ ID NO: 39649 - protein, 589 aa, Saccharomyces cerevisiae
MTISSAHPETEPKWWKEATFYQIYPASFKDSNDDGWGDMKGIASKLEYIKELGADAIWISPFYDSPQDDMGYDIANYEKVWPTYGTNEDCFALIEKTHKLGMKFITDLVINHCSSEHEWFKESRSSKTNPKRDWFFWRPPKGYDAEGKPIPPNNWKSYFGGSAWTFDEKTQEFYLRLFCSTQPDLNWENEDCRKAIYESAVGYWLDHGVDGFRIDVGSLYSKVVGLPDAPVVDKNSTWQSSDPYTLNGPRIHEFHQEMNQFIRNRVKDGREIMTVGEMQHASDETKRLYTSASRHELSELFNFSHTDVGTSPLFRYNLVPFELKDWKIALAELFRYINGTDCWSTIYLENHDQPRSITRFGDDSPKNRVISGKLLSVLLSALTGTLYVYQGQELGQINFKNWPVEKYEDVEIRNNYNAIKEEHGENSEEMKKFLEAIALISRDHARTPMQWSREEPNAGFSGPSAKPWFYLNDSFREGINVEDEIKDPNSVLNFWKEALKFRKAHKDITVYGYDFEFIDLDNKKLFSFTKKYNNKTLFAALNFSSDATDFKIPNDDSSFKLEFGNYPKKEVDASSRTLKPWEGRIYISE

SEQ ID NO: 39650 - protein, 614 aa, Oceanobacillus iheyensis HTE831
MCGITGFVNWGKTADEQRSVLGKMTDTLSLRGPDDTQLWTKGHTGFGHKRLSVVDLEGGKQPMSKTVNGITYTVCYNGELYNTEDLRKELLKRGYTFSTTSDTEVLLTSYIEWKEACVDHFNGIFAFGIWDEEKEQLFMSRDRLGVKPLFYAEKAKGFIFGSELKAILAHPDISTKVDRTGLSEIFGLGPSRTPGHGLFKDIDELRAAHSLTFSKHGLKVWRYWNMVSNHHTDSEEETAEKVRELFVDAVQRQLVADVPVSTLLSGGLDSSAITAIAANYYKEKGYGPLTTFSIDYQGNEQHFQKSKFQPSSDRAWIEKMVEGFSTDHHDEIIAGQELAILLKEAVEVRDQPGQADIDSSLLWFCREIKQHTTVALSGECADEIFGGYPWFHDPAAAGNNFPWIRSLDSRIDLLHGDWKKKLDLESYVQEQYQSTIAETPRLDGEDKIDAKRRELFYLNMQWFMSQLLDRKDRMSMGASLEVRVPFADHRLVEYVWNIPWDIKMVNGHEKGILRKAMEGILPNEVLYRKKSPYPRTFQPEYTEQVSQWMNRILVDPNARLFEFMKKEKVEAIVKSKGKEFKDPWYGQLMRGPQLIAHLCQIDHWLRQYDVEVVD

SEQ ID NO: 39651 - protein, 964 aa, Setaria italica
MASKPVEKHHSIDAQLRLLAPGKVSEDDKLVEYDALLIDRFLDIFQDLHGPNIREFVQECYEVAAEYERDRDAAKLSELGSRLTKLSPNDAIVVASSFSNMLNLTNLAEEVQLAHLRRNKLKRGDFADEGFAATESDIEETLKRLVTELGKSKEEVFDALKNQTVDLVFTAHPTQSVRRSLLQKHARIRNCLTQLYAKDNTEDDKQELDEALQREIQACFRTDEIRRAQPTPQDEMRYGMSYFHETIWKGVPKFLRRVDTALKNIGIDERLPYNAPLIQFSSWMGGDRDGNPRVTPEVTRDVCLLARMMASNLYFSRIEELMFELSMWRCNDELRARAEELHASSQRISKHYIEFWRQLPANEPYRVVLGYVRDELYSTRERSRHLLTSGFSDIPEDSAFKNVEEFLEPLELCYKSLCDCGDKTIADGSLLDFMRQVSTFGLSMVKLDIRQESERHTDVIDAITTHLGIGSYREWSEEKRQEWLLSELRGKRPLLSKDMPQTEEIADVLGCFHVLAELPRDSFGPYIISMATAPSDVLAVELLQRECHVKQPLPVVPLFEKLADLQSAPASIERLFSLDWYMNRIGGKQQVMVGYSDSGKDAGRLSAAWHLYKAQEAMAKVAKRYGVKLTMFHGRGGTVGRGGGPTHLAILSQPPDTINGSLRVTVQGEVIETSFGEEHLCFRTLQRFTAATLEHGMHPPVSPKPEWRALMDEIAAVATDEYRSVVMREPRFVEYFRSATPETEYGRLNIGSRPAKRKPKGGIESLRAIPWIFSWTQTRFHLPVWLGFGAAFEHAMKKDIKNFRMLKEMYNEWPFFRVTLDLLEMVLAKGDPTIAGLYDQLLVADELKPFGEQLRNNYVETEKLILQVAGHKEILESDPGLKQQLRLRDPYITILNVWQAYTLKRIRDPNFKVTPQPPLSKEFADENQPRGIVKLNPASEYGPGLEDTLILTMKGIAAGMQNTG

SEQ ID NO: 39652 - protein, 227 aa, Pasteurella multocida subsp. multocida str. Pm70
MELVFIRHGFSEWNAKNLFTGWRDVNLTERGIEEAKSAGKKLLEAGFEFDIAFTSVLTRAIKTCNIVLEESNQLWIPQVKNWRLNERHYGALQGLDKKATAEQYGDEQVHIWRRSYDISPPDLDPQDPHSAHNDRRYAHLPSDVVPDAENLKITLERVLPFWEDQIAPALLAGKRVLVTAHGNSLRALAKHIEGISDADIMDLEIPTGQPLVYKLDDNLKVVEKYYL

SEQ ID NO: 39653 - protein, 143 aa, Hordeum vulgare subsp. vulgare
MAEEAPAPVVAPVEAPTPILGEPMDLMTALQLVMKKSSAHDGLVKGLREAAKSIEKHAAQLCVLAEDCDQPDYVKLVKALCAEHNVHLVTVPSAKTLGEWAGLCKIDTEGKARKVVGCSCIVVKDYGEESEGLNIVQQYVKSQ

SEQ ID NO: 39654 - protein, 549 aa, Chromobacterium violaceum ATCC 12472
MSKDMKRAVVYQIYPKSFSSHRNQATGDLLGVVDRLDYLAWLGVDYLWLTPFYRSPQRDNGYDVSDYYSIDPAYGEMEDFELLLAEAKRRGIGVMLDIVVNHTSTEHAWFQEARKGRDNPYRDFYIWRDAPNNWQSKFGGSAWEWDEASGQYYLHLFDKTQADLNWENPAVRAEVYKMMRFWRDKGVAGFRLDVINLISKDPAFSEDDSDGRHFYTDGPRVHQHLQEMHREVFDGHDLLTVGEMSSTSLEHCIAYSRPDRRELSMTFNFHHLKVDYPDGEKWRPGAVDFIALKRILSDWQTGMHAGGGWNALFWCNHDQPRALSRFGDDGRWRTESAKMLATALHGLQGTPYIYQGEEIAMANPGFADIGQLRDVESLNAYRQLLAEGFTAADAMAVIRQRSRDNARTPMQWDDGPNAGFSAAEPWIGVAADAGSVNVATAIGDPNSTAHHYRRLIQLRKQYRVFADGDYRCLTPDHPSLWIYTRRCADEMLLAISHFGADDSHYALPAGAMPEGWTMELLLSNYPPQPPGRLRPWHSLLYRATPPAAT

SEQ ID NO: 39655 - protein, 313 aa, Bacillus anthracis str. 'Ames Ancestor'
MRNVFCIGELLIDFVCRNTNVSLVNGSNFEKKAGGAPANVAAAITKLGGHATFMGQVGNDPFGEFLEQTLQHAHVDTSMLIKDKQTTLAFVSIDQNGERDFTFMRGADGEYHFNSIDLSKIKTNDLIHFGSATALLSSPLKDTYFQLLQHARESGQFISFDPNYRNALITNTEQFIQDCLTFIKHAHFVKVSQEEAIMLSKESDLQQSALKLLNHGAKAVAITLGKDGTLLATKDKQTIVPSISIQQVDTTGAGDAFVGAMLYQIAKSEQMFLHNFEGLTTFISFANKVGALTCTNYGAISSLPSLTDVKAYE

SEQ ID NO: 39656 - protein, 573 aa, Clostridium thermocellum ATCC 27405
MAKSVDDMVINKRVNIKRYKEIISVFAKHGFGLLFDQLGIFDYLKMGKKFSSDEGEDDSAKLSMGERIRLSCEELGPTFVKMGQILSTRPDVIPSDIIEELKKLQDSVHPFSFDEVRTVIESEFEDKIENIFMEFSEEPIAAASISQVHCARLKSGEKVAVKVQRPGIERNIALDLNILKDLVHFIENHTKYGKIYDLVGIVVDFENTIKNELDFTKEGENAETFRKNFAKDGIARVPEIKWTYTTRRVLTMEYVEGIQIDDLEGLEKAGIDKVELARNLATSICNQILTDGFYHADPHPGNIRVLADGTIVFLDLGMVGIINESRKKMISNFFIGVSTKNSKIVARSIVDLGEMSERRNLKRFEKDIDKMIDKYIAMPWSEIKVVDLFYEVFNIAFVNEIKIPREFAMLAKTLGTAQGVLEKLAPDLNTIEIAKPIAKKLMYRSFSIKNVTDSIKKNALNYRDAMDLLNEFPSIVLGILEKFEDRDYTLQLGIKDIDKIMKRLDRNFNRMSLSVVLLAVSIIITGVIIGSSQSASPGSEMYFVNVTALRIGLGIVVAIILGLVISMFRSNHF

SEQ ID NO: 39657 - protein, 562 aa, Vibrio cholerae O1 biovar eltor str. N16961
MSSSTQSMPWWKTAAIYQIYPKSFCDSGAKGVGDLQGIISKLDYLQKLGIEAIWLTPIYQSPMVDNGYDIADYYAINPDFGTMQDFEQLLKEAHRRGMRIIMDIVVNHTSTEHAWFQSALGDRNSPYRDYYIWRKPVNGGVPNNWQSKFGGSAWALDEATGEYYLHLFAKEQADLNWENPQVREEVKNIIGFWAEKGVDGFRLDVINLISKQQDFTNDDIGDGRRFYTDGPRVHEYLQEISRDVFQRYGSVTVGEMSSTTLEHCQQYSALDGRELSMVFNFHHLKVDYPNGEKWTKAPFDFLQLKQIFNHWQTGLNGKGWGALFWCNHDQPRIVSRLGDDQQYRVESAKMLAATIHLMQGTPYIYQGEEIGMTNPGFTSIKQYRDVESINIHQIMVQQQGVSESDMLAILAQKSRDNSRTPMQWDASLNAGFTRGEPWIEVAHNYPEINAQAALEDPHSVFYFYRRLLSLRKKVAVITDGDYTDLLPEHKEIFAYQRRNQKQVLICLNNYYGHEAECVLPELPLDDALYLLGNYPGIELQRVLAHQVLRPYETRIILIESPL

SEQ ID NO: 39658 - protein, 527 aa, Lycopersicon esculentum
MEPNSYGSGKAAVGDGVGAPMLQTAPAPAPIPSANAPPPFLVKTYDMVDDPSTDKIVSWSPTNNSFVVWDPPEFAKDLLPKYFKHNNFSSFVRQLNTYGFRKVDPDRWEFANEGFLRGQKHLLKSISRRKPAHGHAQQQQQPHGNAQQQMQPPGHSASVGACVEVGKFGLEEEVERLKRDKNVLMQELVRLRQQQQATDNQLQGMVQRLQGMELRQQQMMSFLAKAVNRPGFLAQFVQQQNESNKRIAEGSKKRRIKQDIESQDPSVTPADGQIVKYQPGINEAAKAMLRELSKLDSSPRLDNFSNSPESFLIGDGSPQSNASSGRVSGVTLQEVPPTSGKPLLNTASAIAGQSLLPATSEMQSSHLGTCSEIINNQLSNIIPLVGGEDLHPGSLSASDMIMPELSQLQGILPENNTDVIGCDSFMDTSAVEGKVGLDIIGSCLSPGADIDWQSGLLDEIEEFPSVGDPFWEKFLQSPCSPDAAMDDDISNTSETKPQINGWDKTQNMEHLTEQMGATNIKQQKHMI

SEQ ID NO: 39659 - protein, 131 aa, Glycine max
  misc_feature (23)..(23): Xaa can be any naturally occurring amino acid
  misc_feature (28)..(28): Xaa can be any naturally occurring amino acid
  unsure (1)..(131): unsure at all Xaa locations
PPPPHAGTEVALNDHSHLVLKEXDDVIXILETDDVKDMKPLNDRVLIKVAEAEDKTPGGLLLTETAKEKPSIGTVVAVGPGPLDEDGERLALSVSAGSTVLYSKYAGSEFKGADGTNYIVLRASDLMAVLS

SEQ ID NO: 39660 - protein, 591 aa, Magnaporthe grisea 70-15
MPESDNYEVLEKIGHGSFGVIRKVRRKSDGMVVCRKEISYLKMSQKEREQLHAEFQILSTLHHENIVGYFHREHLKSSQDLYLYMEYCGNGDLGRVIRDLQTKNQYAEESFVWSIFSQLVTALYRCHYGINPPEVGKSLFGPVKSTKPVIPPGTMTILHRDLKPENVFLGEGNLVKLGDFGLAKMIQSQDFASTYVGTPFYMSPEICAAEKYTLKSDIWSLGCIIYELCTREPPFNAKTHVQLVQRIREGKISPIPKHYSPDLMEVIKECLRVNPERRPDTATLLHLPHVKMMRKEKELVDCNRMLKQKQEAIRKELNASLHREWEVKARLEIDRILKEEIAGLEKRFEAEVQKRIEEDRQKRPEMDYQKRFEMDYQKRFEADYQKRFDLEFPKKLEEEMRRRYPDTPGSKMDLSWSVPKPKASKSQSSVEEVSADGDESSGPDQPDLSGTSPDSSFSNSNHNEPKRRPRTPYKRAQTMYAGGGRAAGTPMDIEMVSPSPIAIASLSLSPRRHAATTGSPTKNPFSKRNNVQGRTLVELSKARASGRPLFDKSNLISRSEPVATWNPEIDEMPSPFLVRRKGVMPPVSAGR

SEQ ID NO: 39661 - protein, 154 aa, Lycopersicon esculentum
MSLIPRIFGDRRSSSMFDPFSIDVFDPFRELGFPSTNSGESSAFANTRIDWKETPEPHVFKVDLPGLKKEEVKVEVEEDRVLQISGERNVEKEDKNDKWHRMERSSGKFMRRFRLPENAKMDQVKASMENGVLTVTVPKEEVKKPEVKSIEISG

SEQ ID NO: 39662 - protein, 707 aa, Candida glabrata CBS138
MSHQLKQTFANAKNEGRNALVTFMTAGYPRVAETIPIMKGFQEGGVDVIELGMPFSDPIADGPTIQVANTKALENGVTLVQTLDLLKKARDEGVTVPVILMGYYNPILNYGEEKFIQDAADAGANGFIIVDLPPEEAIKVRNMMKKHGLSLVPLVAPSTTDSRLELLAKIADSFVYVVSRMGTTGVQSSVASDLDTLVSRVRKYTKETPIAVGFGVSTREHFESVGSLSDGVVIGSKIVTLCGEAPEGKCGEVAKKYVEEILNGKKHKILSGEEYQLMKTATNELESDSDHHEFEEDHKHPIRFGDFGGQYVPEALHTCLKELEEGFEDAIADPTFWEEFKSLYSYIGRPSSLHKAERLTEHCGGAQIWLKREDLNHTGSHKINNALAQVLIARRLGKTEIIAETGAGQHGVATATACAKFGLKCTVFMGAEDVRRQALNVFRMRILGAKVVSVTNGTKTLRDATSEAFRFWVTNLKSTHYVVGSAIGPHPYPTLVRTFQSVIGNETKEQFAALNNGKLPDVVVACVGGGSNSTGMFSPFEHDTSVKLLGVEAGGDGIDTDYHSATLTAGRPGVFHGVKTYVLQDQDGQVHDTHSVSAGLDYPGVGPELAFWKATGRAEFIAATDAQALEGFKLISQLEGIIPALESSHAVYGACERAKTMKPDEHLIINISGRGDKDVQSVAEVLPKLGPQIGWDLRFEEDPSVGN

SEQ ID NO: 39663 - protein, 280 aa, Triticum aestivum
  misc_feature (246)..(246): Xaa can be any naturally occurring amino acid
  unsure (1)..(280): unsure at all Xaa locations
MDISVTKEAAEATVNDREKVGCGFSSEDGCPSPGNSARSSEPNGHQIHRRRHWLRPSNASGGKKEASTEDEDKSEPPDNSEGSSEPNGRQTHRRRRGSSNASKRKKKARTEDEVPGPITLEPKDDDRPGGGEFQPEGGALWHICRRGDVSKLHDYLIKHSEEFRHYKYEPVKKVIHPIHDQCFSLTNEHKRKLKEEYGVEPWTFEQKLGDAVFIPAGCPHQVRNLKSCIKVALDLVSPENIRECIXLTEEFGLLPNWHRVNEDKLELRKIAFHANQRSHL

SEQ ID NO: 39664 - protein, 238 aa, Magnaporthe grisea 70-15
MGESRLLQLNITKVEQCGTGAALCQVFDSIFLDVPMSRVKFNVNSEYAYIQNFKVLQNTFTKHQVDKPIPVAGLVKCKMQDNLEFLQWVKRFWDQYYPGGEYDAVARRKGAPLGAAGGGGGGAAVRAPVAGGAARRAGGTTPTTGAARAGLGVSKANPALAQENATLKETVVGLERERDFYFSKLRDIELLVQNAVEEDPEIEKQEDGLVKQIQAILYSTEEGFEIPAEGEVDDQETF

SEQ ID NO: 39665 - protein, 315 aa, Sinorhizobium meliloti
MPGKINPRVLERLPEMFETVRIERADAALVTADMRDVSGIAVSGKLPVPLMDAFPSLEIVANFGVGYDGVDVSRAAARGIVVTNTPDVLTEEVADTAIGLLLNTLRLLPQAEQWLRQGRWVREGAFPLSPLSLRGRTVGLFGLGRIGLAIARRLEAFGVSIAYHTRTPREGLGFTYHPTLVGMAEAVDTLIVIVPGTASTLKAVNADVLSALGPKGVLINVGRGSTVDEAALVTALQNGTIAGAGLDVFENEPNVPEALLSFPNVSLLPHVASASVVTRNAMSDLVVDNLKAWFSTGEALTPVAETPFRRRAIQN

SEQ ID NO: 39666 - protein, 368 aa, Sinorhizobium meliloti
MTETSAQKPIPVTVLTGYLGSGKTTLLNRILSENHGRKYAVIVNEFGEIGIDNDLIVESDEEIYEMNNGCVCCTVRGDLIRVVEGLMRRPGRFDAIIVETTGLADPVPVAQTFFMDDDVRAKTELDAVVALVDAKHLPLRLKDSREAEDQIAFADVVLLNKTDLVTPEELERVEATVRVINPSARIYRTQRSEIDLGKVLDRGAFNLDRALENDPHFLDQEDHDHVCGPDCDHDHHHHDHHHHDHDHDHDHDHDHHHHHHHDGPSPIHDVTVQSISLRGGEMNPDRFFPWIQKITQTDGPNILRLKGIIAFAGDAERYVVQGVHMIIEGDHQRPWKDGEKRESRLVFIGRDLDREKIERTFKACEVQA

SEQ ID NO: 39667 - protein, 443 aa, Vibrio parahaemolyticus RIMD 2210633
MSYVFHRHCHATLPIIDKGEGVYLFDKQGKQYLDACGGAAVSNLGHSHQAVKKAMLEQLERVPFAHTGFFTSDSSERLAELICQHMPEQFNHVYLVSGGSEAVESALKMARQYFVESGKPEKKQFIARQQSYHGNTLGALAVGGNEWRREPFKPILHPSHHIAPCYAYRYQQSHESELDYSLRAANELEAKILELGADNVMAFVAEPIVGATAGAVPATQGYFKRIREICDQYDVLLILDEVMCGVGRSGSFFAFEQEEAEPDLVCMAKGLGAGYQPIGAVVANDRVYQAIADGSGFFQHGHTFMAHPVACAAAVATIQTIFQDDLLTAVNRQSALLRNELASALAHLPYIGDIRGKGLFFGIELVADKESKSPLSKATLADKRIKQRAMENGLMCYPMGGTIDGVNGHHILLAPPFIIQSHHIDELVGKLSLTLKEVAEIWK

SEQ ID NO: 39668 - protein, 340 aa, Haemophilus influenzae Rd KW20
MLKKLFHSALWGLAAAGVILFAVPRLNNSNIFTSDDIISFKNAVRIASPAVVNVYNRSFSSASINDNDQLQVNNLGSGVIMSKDGYILTNKHLIQNADQIVVALQNGNIFEASLVGSDDLTDLAVLKIRADNLSTIPQNSARQAHVGDVVLAIGNPYNLGQSVSQGIISAIGRNAVGDSVGRQNFIQTDASINRGNSGGALINSAGELVGISTLSIGKTANEIAEGLNFAIPIDIANDVLRKIMRDGRVIRGYFGVQSDISSSSEEGIVITDVSPNSPAAKSGIQVGDVILKLNNQEGISAREMMQIIANTKPNSKVLVTILRLGKILQIPVVIEEFPVN

SEQ ID NO: 39669 - protein, 541 aa, Oryza sativa (japonica cultivar-group)
MTTVASLSLLPHLLIKPSFRCCSRKGVGRYGGIKVYAVLGDDGADYAKNNAWEALFHVDDPGPRVPIAKGKFLDVNQALEVVRFDIQYCDWRARQDLLTIMVLHNKVVEVLNPLAREFKSIGTLRKELAELQEELAKAHNQVHLSETRVSSALDKLAQMETLVNDRLLQDGGSSASTAECTSLAPSTSSASRVVNKKPPRRSLNVSGPVQPYNPSLKNFWYPVAFSSDLKDDTMVPIDCFEEQWVIFRGKDGRPGCVMNTCAHRACPLHLGSVNEGRIQCPYHGWEYSTDGKCEKMPSTKMLNVRIRSLPCFEQEGMVWIWPGNDPPKSTIPSLLPPSGFTIHAEIVMELPVEHGLLLDNLLDLAHAPFTHTSTFAKGWSVPSLVKFLTPSSGLQGYWDPYPIDMEFRPPCMVLSTIGISKPGKLEGKSTKQCSTHLHQLHICLPSSRNKTRLLYRMSLDFAPWIKHVPFMHILWSHFAEKVLNEDLRLVLGQQERMINGANVWNWPVSYDKLGIRYRLWRDAIERGVDRLPFSNQSESGS

SEQ ID NO: 39670 - protein, 428 aa, Staphylococcus aureus subsp. aureus MSSA476
MRYTKSEEAMKVAETLMPGGVNSPVRAFKSVDTPAIFMDHGKGSKIYDIDGNEYIDYVLSWGPLILGHRDPQVISHLHEAIDKGTSFGASTLLENKLAQLVIDRVPSIEKVRMVSSGTEATLDTLRLARGYTGRNKIVKFEGCYHGHSDSLLIKAGSGVATLGLPDSPGVPEGIAKNTITVPYNDLDALKIAFEKFGDDIAGVIVEPVAGNMGVVPPIEGFLQGLRNITTEYGALLIFDEVMTGFRVGYHCAQGYFGVTPDLTCLGKVIGGGLPVGAFGGKKEIMDHIAPLGNIYQAGTLSGNPLAMTSGYETLSQLTPETYEYFNMLGDILEDGLKRVFAKHNVPITVNRAGSMIGYFLNEGPVTNFEQANKSDLKLFAEMYREMAKEGVFLPPSQFEGTFLSTAHTKEDIEKTIQAFDTALSRIVK

SEQ ID NO: 39671 - protein, 454 aa, Haemophilus influenzae Rd KW20
MTMITPVQAILASNQHFLDRQDVMESNVRSYPRKLPFAYAKAQGCWVTDVEGNEYLDFLAGAGTLALGHNHPILMQAIKDVLDSGLPLHTLDLTTPLKDAFSEELLSFFPKDKYILQFTGPSGADANEAAIKLAKTYTGRGNIIAFSGGFHGMTQGALALTGNLGAKNAVENLMPGVQFMPYPHEYRCPFGIGGEAGAKAVEQYFENFIEDVESGVVKPAAVILEAIQGEGGVVSAPISFLQKVREVTQKHGILMIVDEVQAGFCRSGRMFAFEHAGIEPDIIVMSKAVGGSLPLAVLAIRKEFDAWQPAGHTGTFRGNQLAMATGYASLKIMRDENLAQNAQERGEYLTNALRELSKEYPCIGNVRGRGLMMGIDIVDERQSKDATGAYPRDCELAAAIQKACFKNKLLLERGGRGGNVVRVLCAVNINQSECEEFIKRFKQSVVDALKVVRS

SEQ ID NO: 39672 - protein, 584 aa, Saccharomyces cerevisiae
MTISDHPETEPKWWKEATIYQIYPASFKDSNNDGWGDLKGITSKLQYIKDLGVDAIWVCPFYDSPQQDMGYDISNYEKVWPTYGTNEDCFELIDKTHKLGMKFITDLVINHCSTEHEWFKESRSSKTNPKRDWFFWRPPKGYDAEGKPIPPNNWKSFFGGSAWTFDETTNEFYLRLFASRQVDLNWENEDCRRAIFESAVGFWLDHGVDGFRIDTAGLYSKRPGLPDSPIFDKTSKLQHPNWGSHNGPRIHEYHQELHRFMKNRVKDGREIMTVGEVAHGSDNALYTSAARYEVSEVFSFTHVEVGTSPFFRYNIVPFTLKQWKEAIASNFLFINGTDSWATTYIENHDQARSITRFADDSPKYRKISGKLLTLLECSLTGTLYVYQGQEIGQINFKEWPIEKYEDVDVKNNYEIIKKSFGKNSKEMKDFFKGIALLSRDHSRTPMPWTKDKPNAGFTGPDVKPWFLLNESFEQGINVEQESRDDDSVLNFWKRALQARKKYKELMIYGYDFQFIDLDSDQIFSFTKEYEDKTLFAALNFSGEEIEFSLPREGASLSFILGNYDDTDVSSRVLKPWEGRIYLVK

SEQ ID NO: 39673 - protein, 458 aa, Escherichia coli O157:H7 EDL933
MKNASNVSEDTASNQEPTLHRGLHNRHIQLIALGGAIGTGLFLGIGPAIQMAGPAVLLGYGVAGIIAFLIMRQLGEMVVEEPVSGSFAHFAYKYWGPFAGFLSGWNYWVMFVLVGMAELTAAGIYMQYWFPDVPTWIWAAAFFIIINAVNLVNVRLYGETEFWFALIKVLAIIGMIGFGLWLLFSGHGGEKASIDNLWRYGGFFATGWNGLILSLAVIMFSFGGLELIGITAAEARDPEKSIPKAVNQVVYRILLFYIGSLVVLLALYPWVEVKSNSSPFVMIFHNLDSNVVASALNFVILVASLSVYNSGVYSNSRMLFGLSVQGNAPKFLTRVSRRGVPINSLMLSGAITSLVVLINYLLPQKAFGLLMALVVATLLLNWIMICLAHLRFRAAMRRQGRETQFKALLYPFGNYLCIAFLAMILLLMCTMDDMRLSAILLPVWIVFLFVAFKTLRRK

SEQ ID NO: 39674 - protein, 265 aa, Cryptococcus neoformans var. neoformans B-3501A
MASSTNSKPVRLVLFDVFDTLCTPRLPIHEQYHEEAIRGGLSSASITPQSVRNAFKPAFKTVDAQYPLYGKHSTPPLTPEEWWTRIIYETLREAGASKRELDGKIDAIGPALMSRFESDLGYRNFPETIACLKELKELEIKTSVVSNADPRILKTLDSLQILPLLTCSPTLSWDVEAAKPSATIYEKACEISDEKVGEGIIMVGDELKADFHGATSAGIEARLIRRPGEWSDGAVRDAKEELGGVNVVSSLEDIVKEVKQRNVGG

SEQ ID NO: 39675 - protein, 205 aa, Triticum aestivum
  misc_feature (122)..(122): Xaa can be any naturally occurring amino acid
  misc_feature (167)..(167): Xaa can be any naturally occurring amino acid
  misc_feature (169)..(169): Xaa can be any naturally occurring amino acid
  misc_feature (171)..(171): Xaa can be any naturally occurring amino acid
  misc_feature (178)..(178): Xaa can be any naturally occurring amino acid
  misc_feature (184)..(184): Xaa can be any naturally occurring amino acid
  unsure (1)..(205): unsure at all Xaa locations
FERAWSPHATPPTRRTKKKEKGKKSHQTLFRILLLGGCRIRHEGSPAAAAAAMARKRKTDAAPRLDEADRTLYSSFCGAANSLSQLYSQAMAQQKLSFQAGERHALEKLHQWILRMHDEESXRLTVADIMSHIQHEIDYGGTDAHVSPRVHQHPMSVNPFTSYPTSXGXYXQATSGHXPRPTSXQSKNTIFSKCISTHPQDLQYT

SEQ ID NO: 39676 - protein, 501 aa, Sinapis alba
MSTNKKTIVWFRRDLRIEDNPALAAAAHEGSVFPVFIWCPEEEGQFYPGRASRWWMKQSLAHLRQSLKALGSELTLIKTHSTVSAILDCVRATGATKVVFNHLYDPVSLVRDHTVKEKLVERGISVQSYNGDLCMSPGRYTVKRANLLLVLILTGKKCLDMSVESVVLPPPWRLMPLSAAETVWACSVEELGLENEAEKPSNALLTRAWSPGWSNADKILNEFIEKQLIDYAKNSKKVVGNSTSLLSPYLHFGEISVRRVFQCARMKQIIWARDKNGEGEESADLFLRGIGLRDYSRIICFNFPFTHEQSLLSHLRFFPWDADVDKFKAWRQGRTGYPLVDAGMRELWATGWMHNRIRVIVSSFAVKFLLLPWKWGMKYFWDTLLDADLECDIIGWQYISGSLPDGHELDRLDNPAIQGAKYDPEGEYIRQWLPELARLPTEWIHHPWDAPLTVLKASGVELGTNYAKPIVVIDTARELLTKAISRTREAQIMIGACGDEM

SEQ ID NO: 39677 - protein, 344 aa, Oceanobacillus iheyensis HTE831
MAKVLYEKDIQDGVLKNKKIAVIGYGSQGHAHAMNLRDSGYDVVVGLRPGKSQEKAEEDGFNVLSVAEASSQADVVMVLLPDEMQPKVYEESIKDNLEQGNALVFAHGFNIHFTQVVPPANVDVFLVAPKGPGHLVRRTFEEGAGVPALYGVHQDYTGEAKDVALAYSKGIGAARAGVLETSFQEETETDLFGEQAVLCGGVTSLIKAGFETLTDAGYQPEVAYFECLHEMKLIVDLLYEGGLENMRYSISDTAQWGDFVSGQRVVDDQTKERMKSILDDIQTGSFAKGWILENQAGRPQFNAINRRENRHPIETVGRELRELMPFVKQPINAKKKDVNVHVPN

SEQ ID NO: 39678 - protein, 282 aa, Mycobacterium tuberculosis H37Rv
MTGESGAAAAPSITLNDEHTMPVLGLGVAELSDDETERAVSAALEIGCRLIDTAYAYGNEAAVGRAIAASGVAREELFVTTKLATPDQGFTRSQEACRASLDRLGLDYVDLYLIHWPAPPVGKYVDAWGGMIQSRGEGHARSIGVSNFTAENIENLIDLTFVTPAVNQIELHPLLNQDELRKANAQHTVVTQSYCPLALGRLLDNPTVTSIASEYVKTPAQVLLRWNLQLGNAVVVRSARPERIASNFDVFDFELAAEHMDALGGLNDGTRVREDPLTYAGT

SEQ ID NO: 39679 - protein, 268 aa, Vibrio vulnificus YJ016
MDRYQATFERLAAQKQGAFVPFVTVCDPNPELSLKIMDTLVQAGADALELGIPFSDPLADGPTIQGANIRALDSGATPDICFDLIGQIRAKYPDLPIGLLMYANLVYSRGIENFYQRCAQAGIDSVLIADVPTNESAEFVAAAEKFGVHPIFIAPPTASDETLKQVSQLGGGYTYLLSRAGVTGAETKANMPVGDMLAKLEQFNAPPALLGFGISEPEQVKQAIDAGAAGAISGSAVVKIIESHLNEPDAMLTALANFVSSMKSATQK

SEQ ID NO: 39680 - protein, 590 aa, Zea mays
ASRHLSTDGRHGEVEDMYTQDGTVDMKGNPAVKKGTGNWRACPYILANECCERLAYYGMSTNLVNYMKTRLGQVNSVASNNVTNWQGTCYITPLIGAFFADAYMGRFWTIAIFMIIYIFGLALLTMASSVKGLVPTSCGDKDVCHPTDAQAAVVFVALYLIALGTGGIKPCVSSFGADQFDENDEREKKSKSSFFNWFYFSINIGALVASTVLVYVQTHVGWGWGFGIPAVVMAIAVGSFFVGTPLYRHQKPGGSPLTRIAQVLVACARKWNVAVPADKSRLHETVDGESVIEGSRKLEHSEQLACLDRAAVVTAEDGAEASPWRLCSVTQVEELKSVIRLLPIWASGIVFAAVYSQMSTMFVLQGNTLDQSMGPRFKIPSATLSMVDTISVIVWVPVYDRAIVPLVRSYTGRPRGFTQLQRMGIGLVVSIFSMVAAGVLDIVRLRAIARHGLYGEDDIVPISIFWQIPQYFIIGCAEVFTFVGQLEFFYDQAPDAMRSMCSALSLTTVALGNYLSTVLVTIVTHITTRHGRIGWIPENLNRGHLDYFFWLLAVLSLLNFLAYLVIASWYKYKKTADDYPGAKGEHGTEH

SEQ ID NO: 39681 - protein, 420 aa, Glomerella cingulata
MTTNGSDKPQVQPCRYKVGKTLGAGSYSVVKECVHIDTGRYYAAKVINKRLMAGREHMVRNEIAVLKKVSMGHQNILTLVDYFETMNNLYLVTDLALGGELFDRICRKGSYYESDAADLIRATLSAVAYLHDHGIVHRDLKPENLLFRTPEDNADLLIADFGLSRIMDEEQFHVLTTTCGTPGYMAPEIFKKIGHGKPVDVWALGVITYFLLCGYTPFDRDSDFEEMQAILNADYSFTPFDYWRGVSEHAKDFIRKCLTIDPKKRMTAHEALQHPFVAGYLNGEGEGQNLLPTVKKNFNARRTLHAAIDTVRAINKLREGQQNLMDGAKSREPDRGLKSPPNAKKDDSAISMGNTNHKDSGYGTQPEADNQNDVCHDRCGTTPTSVPASLRVRAVSRTRSLRQAKDCGAVPQCDDSLEAV

SEQ ID NO: 39682 - protein, 209 aa, Brassica napus
  misc_feature (175)..(175): Xaa can be any naturally occurring amino acid
  unsure (1)..(209): unsure at all Xaa locations
MSSMNGGFQENTNWIFQEVKDAMWTVEENKLFEKALAVLGDKDDLESWSNIAALIPGKSVDDVIKRYKKLEDDISDIEAGLVPDPGYCSDASAGDYFFGLENSGYGYGYGYGYNYVVGGKRSSPATSDGFNLPMPEKERKKGVPWTEEEHRRFLMGLKKYGKGDWRNIARNFVTXTRTPTQVASHAQKYFIRQLTDCKDKRPSSIHDIT

SEQ ID NO: 39683 - protein, 84 aa, Oryza sativa
MSCCGGNCGCGSGCQCGGGCGGCKMFPDVEATATTKTFVLAAPSNKASSGGMEMAVESGENGGCGCNTCKCGTSCSGCSCCSCN

SEQ ID NO: 39684 - protein, 965 aa, Solanum tuberosum
MTTRNLEKLASIDAQLRQLVPAKVSEDDKLVEYDALLLDRFLDILQDLHGEDLKETVQECYELSAEYEAKHDPKKLEELGNVLTSLDPGDSIVIAKAFSHMLNLANLAEEVQIAYRRRQKLKKKGDFGDESNATTESDIEETFKKLVGDLKKSPQEVFDAIKNQTVDLVLTAHPTQSVRRSLLQKHGRIRDCLAQLYAKDITPDDKQELDEALQREIQAAFRTDEIRRTPPTPQDEMRAGMSYFHETIWKGVPKFLRRVDTALKNIGINERVPYNAPLIQFSSWMGGDRDGNPRVTPEVTRDVCLLARMMAANLYYSQIEDLMFELSMWRCNEELRVRADDLQRSSRRDEKHYIEFWKQVPPNEPYRVILGDVRDKLYQTRERARQLLGHGYSEIPEEATYTNIEQFLEPLELCYRSLCACGDLSIADGSLLDFLRQVSTFGLSLVRLDIRQESDRHTDVLDAITQHLEIGSYRDWSEERRQEWLLSELSGKRPLFGPDLPKTEEIADVLDTFHVIAELPADCFGAYIISMATAPSDVLAVELLQRECRVRQPLRVVPLFEKLADLDAAPAAVARLFSIEWYRNRINGKQEVMIGYSDSGKDAGRLSAAWQLYKAQEELIQVAKEFDVKLTMFHGRGGTVGRGGGPAHLAILSQPPETIHGSLRVTVQGEVIEQSFGEEHLCFRTLQRFTAATLEHGMHPPVSPKPEWRALMDEIAVVATEKYRSIVFKEPRFVEYFRLATPELEYGRMNIGSRPSKRKPSGGIESLRAIPWIFAWTQTRFHLPVWLGFGAAFKYAIEKDIKNLRMLQEMYNAWPFFRVTIDLVEMVFAKGDPGIAALFDKLLVSEDLWSFGELLRSKYEETKSLLLQIAGHKDLLEGDPYLKQRLRLRDSYITTLNVCQAYTLKRIRDPDYSVTPRPHISKEYMEAKPATELVNLNPTSEYAPGLEDTLILTMKGIAAGMQNTG

SEQ ID NO: 39685 - protein, 619 aa, Neurospora crassa
MKFLGIAALVAGLLAPSLVLGAPAPGTEGVNLLTPVDKRQDSQAERYGGGGGGGCNSPTNRQCWSPGFNINTDYELGTPNTGKTRRYKLTLTETDNWLGPDGVIKDKVMMVNDNIIGPTIQADWGDYIEITVINKLKSNGTSIHWHGMHQRNSNIQDGVNGVTECPIPPRGGSKVYRWRATQYGTSWYHSHFSAQYGNGIVGPIVINGPASANYDVDLGPFPLTDYYYDTADRLVLLTQHAGPPPSNNVLFNGFAKHPTTGAGQYATVSLTKGKKHRLRLINTSVENHFQLSLVNHSMTIISADLVPVQPYKVDSLLLGIGQRYDVIIDANQAVGNYWFNVTFGGNDLCGTSDNKYPAAIFRYQGAPKALPTNKGVAPPDHQCLDLNDLKPVLQRSLNTNSIALNTGNTIPITLDGFVWRVNGTAININWNKPVLEYVMTGNTNYSQSDNIVQVEGVNQWKYWLIENDPDGAFSLPHPIHLHGHDFLILGRSPDVTAISQTRYVFDPAVDMARLNGNNPTRRDTAMLPAKGWLLIAFRTDNPGSWLMHCHIAWHVSGGLSNQFLERAQDLRNSISPADKKAFNDNCDAWRAYFPDNAPFPKDDSGLRSGVKAREVKMKW

SEQ ID NO: 39686 - protein, 347 aa, uncultured marine gamma proteobacterium EBAC20E09
MKIYYDDDANLELIKKLNVTIIGYGSQGHAHANNLKDSGVDVTVGLREGSSSWSKASEAGLKVMPVDQSVLNADLVMILAPDEFQKGIFEKSIKPNLKSNAILAFAHGFNIHFKKIVPSETNTVIMIAPKGPGHTVRSTYLNGGGVPSLIAIFNDAMQEGEHSAKDIALSYAKANGGTRAGVLETSFKEETETDLFGEQAVLCGGLTALIKAGFETLVEAGYSPEMAYFECLHETKLITDLIQEGGIANMHYSISNTAEYGDYLSGPKVITETTKEAMREILDNIQSGNFANEFLDDCRQSNDGSGGPFMKSNRKSTKNHPIEEVGKELRSKMKFLNSEKLVDIEKN

SEQ ID NO: 39687 - protein, 221 aa, Zea mays
  misc_feature (214)..(214): Xaa can be any naturally occurring amino acid
  unsure (1)..(221): unsure at all Xaa locations
MGRRPARCYRQIKNKPYPKSRYCRGVPDPKIRIYDVGMKRKGVDEFPYCVHLVSWEKENVSSEALEAARIACNKYMTKSAGKDAFHLRVRVHPFHVLRINKMLSCAGADRLQTGMRGAFGKPQGTCARVDIGQVLLSVRCKDNNAAHASEALRRAKFKFPGRQKIIESRKWGFTKFSRADYLKYKSEGRIVPDGVNAKLLGNHGRLEKRAPGKXAFLDAVA

SEQ ID NO: 39688 - protein, 873 aa, Vibrio parahaemolyticus RIMD 2210633
MTLRSKTIIGIALIEALALGVLIISGLNWFKSSNETSLEVGSQNLVSVFAQASRDAVIATDLAYLDSFARSVVSEHKLAYIRIVNQDGIELTLQGDYTGVDTNVRPFDASDGVYDVAKAITLGDQTFGVVEMGVHVEHVHQMLSFATHASLVIAFVEMSLVALFSFALGSYLMKRLDLLRTGVIKVSQQGPGSQISISGNDEVTRVGEAFNQMSRSLAQAQNKLQQEHQTQQQLSAKISQLAEVAEHARDTIIITHPDGTIAWVNSAFEQLTEYSLEEVVGKSPGELLQGEDTDANTVALLSQSVRSHSPVRVEILNYTKSQRPYWVELELSPVFDENGELLRFIAVERDITDRREMEKRLSSALDKSKKATQAKSEFLANMSHEIRTPMNAIMGISEILLENENRREPRELLLLLHKSANNLVTIINDILDYSKVEAGKLTLVEEEFDLRSLVESCTALCAYQADKKNLKLLVDMPLAMNTVVVGDKGRINQILLNLIGNAVKFTDEGHVLLKVRESELGFDFSVTDTGIGIPEDRLTHIMDKFEQVDTSATRRHEGTGLGLAISKRLISMYNGELCVRSDFGNGSCFSFSLQLPKRSQPHSEPVELNANRLLLIDDYQPRVEHLMRLAKEIGIEVTHRNDWSAAQSLGRDLDDFDRIIASVNNAQDRDALYELDATESAAKRVLFLAPCVMEEGQAWSCERDRLLPQPVTQHKLQTLLSSKIQKRRALSSQDNPDFSNLHLLVAEDSHINRILIEKMLQDTGVKLTLAEDGVEAVELYKQLSPDLVITDISMPNKDGFGVTKDIRELQENGEFPWCPIVAFSAHAMQEEQQKSIALGMNDYLTKPVQKSDLLDMIAKWGRHTQMAEKHASG

SEQ ID NO: 39689 - protein, 209 aa, Ricinus communis
MATVQGGVHDSPQGTANNAEIDGIARFAVDEHNKKENAMVEFGRVLKAKEQVVAGTLHHLTIEAIEAGKKKIYEAKVWVKPWLNFKELQEFKHATDVADTTASHPSFTSSDLGVKREGHGAEWKEVAAHDPVVQDAATHAVNTIQQRSNSLFPYQLQEIVHAKAQVVDDFAKFDMILKVKRGTSEEKFKVEVHKNNEGTFLLNQMEPHT

SEQ ID NO: 39690 - protein, 185 aa, Neurospora crassa
MFSRSVRAVSGRVLANAVRPTVMPAARQIAPAVAVVAKRSYHEKVLDHYSRPRNVGTLDKKDKSVGEGLVGAPACGDVMRLHIKVDPETGVISDVKFKTFGCGSAIASSSYVTELVRGMTLEQASKVKNTEIAKELCLPPVKLHCSMLAEDAIKAAIKDYRTKNPHAMPTNLAGTGAKFETAQAA

SEQ ID NO: 39691 - protein, 459 aa, Arabidopsis thaliana
MTLTFSSSAATVAVAAATVTSSARVPVYPLASSTLRGLVSFRLTAKKLFLPPLRSRGGVSVRAMSELVQDKESSVAASIAFNEAAGETPSELSHSRTFLDARSEQDLLSGIKKEAEAGRLPANVAAGMEELYWNYKNAVLSSGASRADETVVSNMSVAFDRMLLGVEDPYTFNPYHKAVREPFDYYMFVHTYIRPLIDFKNSYVGNASIFSELEDKIRQGHNIVLISNHQSEADPAVISLLLEAQSPFIGENIKCVAGDRVITDPLCKPFSMGRNLICVYSKKHMNDDPELVDMKRKANTRSLKEMATMLRSGGQLIWIAPSGGRDRPNPSTGEWFPAPFDASSVDNMRRLVEHSGAPGHIYPMSLLCYDIMPPPPQVEKEIGEKRLVGFHGTGLSIAPEINFSDVTADCESPNEAKEAYSQALYKSVNEQYEILNSAIKHRRGVEASTSRVSLSQPWN

SEQ ID NO: 39692 - protein, 213 aa, Methanosarcina mazei Go1
MVERTILEAVKKVIEESPKRNFSESVDLAINLKNLDMNQPKNRVDEEVILPHGLGKELKIGVFAKGDVGLRAKAAGAAYVISDVELEELAADKNKARVLANECDLFIAETQFMPIIGKNLGIVLGPRGKMPIPLMPNKDIGELIQSKQNAVKLRSKDRLTFHVAVGRRNMNPDDLSENIETIMSRLERVLDKGKHNLRSVYVTTTMGKSERVV

SEQ ID NO: 39693 - protein, 395 aa, Campylobacter jejuni
MKMDYKEQSHIVPAYKRFDIVLEKGQGVYLFDDKAKKYLDFSSGIGVCALGYNHAKFNAKIKAQVDKLLHTSNLYYNENIAAAAKNLAKASALERVFFTNSGTESIEGAMKTARKYAFNKGIKGGQFIAFKHSFHGRTLGALSLTANEKYQKPFKPLISGVKFAKYNDISSVEKLVNEKTCAIILESVQGEGGINPANKDFYKALRKLCDEKDILLIADEIQCGMGRSGKFFAYEHAQILPDIMTSAKALGCGLSVGAFVINQKVASNSLEAGDHGSTYGGNPLVCAGVNAVFEIFKEEKILENVNKLTPYLEQSLDELINEFDFCKKRKGLGFMQGLSLDKNVKVAKVIQKCQENALLLISCGENDLRFLPPLILQKEHIDEMSEKLRKALKSF

SEQ ID NO: 39694 - protein, 441 aa, Ralstonia metallidurans CH34
MTTQRLDIRAHINERKMSGYQWLLLVLCFLIVATDGMDVAIMGFLAPDITREWGISKAAFGVVMSAAPIGLAIGALVVGPLSDRFGRKKLLVGSIALFGVFNLLSAFADGTATLSLLRFLTGLGLGAAMPSTTTLLSEYVPERSRSMLLATMFTGFNLGSALVGFGAAALLPHHGWRAVLVAGGAIPLICLPFYIMLIPESARFMVVRNVAPARIARTLRRVIGSVVADDTVFTISEPPVSGKQPVRTLLSSGYRSMTLALWVTYFMGLLVIYLLSGWLPTLIKDAGLPIDRAANLTALFQLGGTVGALVVGYCMDRFAPHRVIGVSYVLGAMFILMLASGSVTSSMFALYVLLAGFCMSGAQTGLNAFAPQCYPTPVRATGVSWMLGIGRFGSITGSMAGGVLLSMGWSFSAVIAILAVPATMAAISIVSTKAQPRAVTA

SEQ ID NO: 39695 - protein, 61 aa, Oryza sativa (indica cultivar-group)
MGRGKVELKRIENKISRQVTFAKRRNGLLKKAYELSLLCDAEVALIIFSGRGRLFEFSSSS

SEQ ID NO: 39696 - protein, 230 aa, Glycine max
  misc_feature (197)..(197): Xaa can be any naturally occurring amino acid
  misc_feature (225)..(225): Xaa can be any naturally occurring amino acid
  unsure (1)..(230): unsure at all Xaa locations
MASLDDDYKTNEISLNHVEIPIHAIGEEPKPYQEVEERNNIDYSQRAQWLRAAVLGANDGLVSVASLMIGIGAVKENITAMLLAGFAGLIAGACSMAIGEFVSVYTQYDIEIAQIKRDKENNNIGGVGEELAQREKLPNPFQAALASALAFSVGAVIPLLAAAFIRNYKIRLVVVAVVATLTLLLFGGVGAVLGKTXVRKSCIRVLIGGWMAMSITFGLTKLFGXAGLSM

SEQ ID NO: 39697 - protein, 440 aa, Vibrio sp. Ex25
MSAKERSLPTHRISRFSKFASLATRVAGNVIAEGTKQIAKGNKPKAKDLLLTPQNIARLTDQLAHLRGAAMKLGQMLSMDAGDVLEPELADILSRLRSDADPMPAKQLNAVMESSLGTNWKAEFLSFNFKPIASASIGQVHQAYSDAGDNLAVKVQYPGIRKSIDSDVDNVGTLLKVVGLIPESVDYKGLLEEAKKQLHDEADYAREAQFAIRYHDALKEHPHFVVPKIHTESCSDSVLAMEFIDGSPIEKIEHYDQSTRDFVMHSLLELLFRELFEFKMVQTDPNFANYLYIENTRQIGLLDFGATREYSERFSTGYRQAFASVVNNDEQGLNDALEQIGFFSQTILPDQRQAILDLVKMACEPMLVDEPYDFKASGLAQKLREAGTILSMEQEYWHTPPADALFLHRKIGGMYLLAARIGAKVNIRQLVQPYLTINSE

SEQ ID NO: 39698 - protein, 385 aa, Oceanobacillus iheyensis HTE831
MLTDQHLLRIPGPSPIPPSVQQAMNGTMIGHRGKETKELLQRILPRLKPIFGTKQDVIPIAGSGTAGLEMAVTNAVRPGDHVLVIVTGAFGDRFTKICNAYDLHVNRIDVPWGEAIDPSYIESYLQEHPEISVVFATFCETSTGVLNPIPSLGKVIHQNSNALLVVDGVSCVAGVETKMDDWGIDILITGSQKAFMLPAGLMFISASDRAWEVIENNPHHRFYLDMRTYKKSLADISTPFTPALSLLFGLDQVLNLIDQEGLNNVFKRHLLLRDMTRAAFKALDIPLLTTDEAASPTVTAVQPTDFDSEELRQILKSQFNLSLAGGQQHLKGNIFRVGHMGYCSPADALQTISLIEIGLQLIGKNIELGKGTAAAQQIYIQQEVK

SEQ ID NO: 39699 - protein, 355 aa, GIBBERELLA ZEAE PH-1
MAITKYKAAAVTSEPGWFDLEGGVRKTIDFINEAGQAGCKFVAFPEVWIPGYPYWMWKVTYLQSLPMLKRYRENSMAVDSEEMRRIRRAARDNQIFVSLGFSEIDHATLYLSQVLIGPDGAVINHRRKIKPTHVEKLVYGDGAGDTFMSVSETEIGRVGQLNCWENMNPFLKSLNVSAGEQVHVAAWPVYPGKERQVYPDPATNYADPASDLVTPEYAIETGTWTLAPFQRLSVEGLKINTPEGVEPETDPSVYNGHARIYRPDGSLVVKPEKDFDGLLFVDIDLNECHLTKVLADFAGHYMRPDLIRLLVDTRRKELITEADPNGSIATYSTRQRLGLDKPLEKKEGEDTPDVL

SEQ ID NO: 39700 - protein, 538 aa, Lactobacillus sanfranciscensis
  misc_feature (285)..(288): Xaa can be any naturally occurring amino acid
  unsure (1)..(538): unsure at all Xaa locations
MAKEIKFSDDARSEMLKGVDKLADTVKSTMGPKGRNVVLEETAGNPTITNDGVTIARAISLPDHFQNMGAKLVAEVASKTNDVAGDGTTTATVLTQAIVKEGMKNVTAGANPVGVRRGIEKATAAAVAGLHKMSHKVENKEDIAQIASISSASEKVGKLIADAMEKVGNDGVITIEDSKGVETSLDVVEGMEFDRGYMSQYMVTDQEKMEADLDNPYILVTDKKINNMQDIMSLLQEVVQQGRSLLIIADDIGGEVLPTLVLNKMRGTFNVVAVKAPGFGDRRKXXXXDIALLTGATVITDDLGLELKDTTLEQLGQANKVNVTKDKTTIVEGKGSKEAIAKRVNEIKTQLAATTSQFDREKLQERLAKLAGGVAVIKVGAATETELKERKYRIEDALNATRAAVEEGFVPGGGTAFINILKDVDAVEATGDEKTGVEIVSRALEAPVKQIAANAGVDGAVVVDHLKQEKPGIGYNAADDKYEDMIAAGVVDPTKVSRSALQNAASVSSLLLLTTEAVVAENQKKTMLHLLCHKECLE

SEQ ID NO: 39701 - protein, 653 aa, Ralstonia eutropha JMP134
MTSGPQRTAAKAREAGIVKGLGGSTESMSPDEANARTQQLRALIQLGRQRGYLTHADISDHLQENFTDTAAMESIVTTFAEMGVKIFEQTPDAETLLLSDNAVVASDDQADEEAEVALSTVDSEFGRTTDPVRMYMREMSSATLLTRKEEVELAKRIEDGLNNMVHAISACPSTIATILELSGRVASAEMGIDDLVDGLTDESGADAPVTASADDSDDDSADTADEDDSNEDDDDAEEGSTQQSAEADLAKLRDECLKRFARVSEQFELMRQEYAANGSGSAGFVTARDTVRDELRTIRFTAKTIERLCADVQSMVDDVRVVERQVVQLLVDRCGMDREDVIARFPGNETNLSWGRDLAAASRPYSAAVARALPDLEAHQQKLIDIQARAALPLAELKAVNRKMLAAERQMRQAKHEMTQANLRLVISIAKKYTNRGLQFLDLIQEGNIGLMKAVDKFEYRRGWKFSTYATWWVRQAVTRAIADQARTIRVPVHMIEQINKLNRLSRELMQQTGKEPDPAVLAERMDMPEEKVRAIMKIAREPVSMETPVGEDGDTSLGDMIADSDTATPADAALQASLREVVREMLDELTPREAKVLRMRFGIDMATDYTLEEVGKQFDVTRERIRQIESKAMRKLRHPSRADQLITYLRDA

SEQ ID NO: 39702 - protein, 457 aa, Oryza sativa (japonica cultivar-group)
MVKEEQGGEVAMAAAAAVTTTVAPALPTQEHRLPLSNLDLLLPPLDVSVFLCYRHPAPSAAALKEALAKALVPFYPLAGEVVANGDGEPELLCSGRGVDFTESVAGEEMRGLRIGMVDERVEKLVPAKKAASVMAVQVTKFKCGGAVVGCTFDHRVCDAYSFNMFLVAWAAAARDGHGGGTAPPPPTIPSFRRSIVAPRDPPPPRSPSTDALIDRLFAPLGSAPPPPDDAAAAAVNRIYRVAAADAASLQDSAGPGRTKLEAFTAHLWQLNARAAAAERERPCCMGVVVDGRGRMFPDGAMRAYFGNVLTIPYGVMGSGELRAAALADVAGDVHRWVAEAATGDHFRGLVDWVEARRPKPAAARAYLGGTGGGDAAACIVSSGMGFPVGEADFGTGAPAFASYHFPWPAGAGYVMPMPSARGDGDWVVYVHVSPELAVAMDEEPTVFRSLDNSYVFG

SEQ ID NO: 39703 - protein, 577 aa, uncultured bacterium 314
MPTTKQMNLKEFNSLTDLFFYQAEKQNPKRIFLEWLNPKNKKKFTWSETSSNIYKLAKILKKNINDGDRCLLVSENRPEWLIADLAVMLANGITVPAYTTYTERDYKYLIEDCQPSVIIISNDLMHNKLKNIIKEKIYIKKVITLDKIEGVDGDKYLDFNSIVKINLLENEKIKNTNLKRTSPACIIYTSGTGGNPKGVILSHGGILNNLEGASKILKPLIDKRPIFLTWLPLSHSYEHTVQFVQILVGAKVFYAEKIEKLLDNISEAKPTIMTAVPRFYQNLYNKININMKKAKGLKAKLIKATIFLGRKKLLKQKMSLSEKFLNFIVNALVRKKVKKQFGGNLRAFVSGGGALDREIGEFLNAIGLPTLQGYGLTETSPVVSCNPIHKIKVETVGPPFKGNQVKIAEDGEILVKGENVMLGYWNNKEDTEKVIKDGWLYTGDIGEIDPEDGYLKITDRKKDIIVSAGGDNISPAKIENQLSNSPEIDQCMVWGDGKNYLVALIVPSKEFKEQKDKIGKIINKINENLAQIEKIKNFHLVSENFSIENGMLTPTMKVKRNKVIAKYKNILENFYKE

SEQ ID NO: 39704 - protein, 572 aa, Cryptococcus neoformans var. neoformans JEC21
MVLGHFSPQTNTTVPPPPHPSAFVPLFQTNTSVVSGKPNAFSTMAGTPSSQLAWLSGLSTNFNEMSADQKFLRKTSIIATIGPKTNNVETLVQLADAGMNIVRMNFSHGSYEYHQSVIDNARAAAAKSPSGRPIAIALDTKGPEIRTGLMKDDTDVPISAGHEFWVTTDKAYAEAGTAEHIYIDYTNIVKVTAPGKLIYVDDGILSLQVISIQGEKIRVKSLNSGVLSSRKGVNLPKTAVDLPALSEKDKSDLAFGVKNGVDMIFASFIRSANDVKEIRKVLGPEGADIKIIVKIENEQGVMNFDEILRETDGVMVARGDLGIEIPASQVFMAQKMMIAKCNVAGKPVICATQMLESMTYNPRPTRAEVSDVANAVIDGADCIMLSGETAKGKYPIEAVKMMAETAFLAESSIAYPPLFDQLRALTPRPTETAETLALSAVAAAIEQDAGAIIVLSTSGVSARLISKYRPACPIICVTRNEQTARQLHLSRGVYPVWFPEPRGIPAEKWQIDVDNRIRYGLRMALGLGIIKPEATVMAVQGWKGGLGHTNTLRILSVPSDPADLDLHSIERD

SEQ ID NO: 39705 - protein, 438 aa, Vibrio cholerae O1 biovar eltor str. N16961
MLSFHKTLFFAFLLFVFWLPIPLGSNRPWAWSLNEIYVAFLLLGCLFLLPAAQCWLAIQRAKVILIPVALFTLWSWMQSWPSLGLSSDQTLVFISAVKSLHYLQICLVAALLVDTPHKLKMLATTMIASGICQAFYAGVILLLELQTSPFFSLPLNQRASGSFVYHNHLANFLMLNLCLGFGLLIAELNHQTTQGWRNTLKKLLAILLSDKAFIRLGLVIMVIALVLTRSRMGNIAFFVALSIGSLLILLFYKSKPKSLYLLIVSLFIVDALVVSNWFGLDKVRQRLAETSLQNESRDDVVRDALNAIQERPLTGFGNGTFYSTFPSYNQGEVALFYDHAHNDYVQFTLESGLIATSVFGIMVLFCAWRALSAFRNRTNKTMRGIGLGSLMAIIGMLLHMSVDFPLQAPATALYFLFCLLIANWSMTLPTPKYRSSRT

SEQ ID NO: 39706 - protein, 529 aa, Cryptococcus neoformans var. neoformans JEC21
MAGTPSSQLAWLSGLSTNFNEMSADQKFLRKTSIIATIGPKTNNVETLVQLADAGMNIVRMNFSHGSYEYHQSVIDNARAAAAKSPSGRPIAIALDTKGPEIRTGLMKDDTDVPISAGHEFWVTTDKAYAEAGTAEHIYIDYTNIVKVTAPGKLIYVDDGILSLQVISIQGEKIRVKSLNSGVLSSRKGVNLPKTAVDLPALSEKDKSDLAFGVKNGVDMIFASFIRSANDVKEIRKVLGPEGADIKIIVKIENEQGVMNFDEILRETDGVMVARGDLGIEIPASQVFMAQKMMIAKCNVAGKPVICATQMLESMTYNPRPTRAEVSDVANAVIDGADCIMLSGETAKGKYPIEAVKMMAETAFLAESSIAYPPLFDQLRALTPRPTETAETLALSAVAAAIEQDAGAIIVLSTSGVSARLISKYRPACPIICVTRNEQTARQLHLSRGVYPVWFPEPRGIPAEKWQIDVDNRIRYGLRMALGLGIIKPEATVMAVQGWKGGLGHTNTLRILSVPSDPADLDLHSIERD

SEQ ID NO: 39707 - protein, 473 aa, Pseudomonas syringae pv. tomato str. DC3000
MTLYVNLAELLGSRIENGFYRPGDRLPSVRALSVEHGVSLSTVQQAYRVLEDSGLAAPKPKSGYFVSVSRHAPALPAVGRPAQRPVDISQWDQVLDLIRVAPREAVTQLGRGMPDVTSPTLKPLMRALGQLSRHQDMPGLYYDNIYGVLRLREQVARLMLDSGCNLTANDVIITNGCHEALSASVRAICSPGDIVAVDSPSFFGAMQTLKGVGMKALEIPTDPLTGISLEALELALEQWPIKVIQLTPNCNNPLGYVMPEARKRALLTLAQRFDVAIIEDDVYGDLAYNYPRPRTIKSFDEDGRVLLCSSFSKTLAPGLRIGWVAPGRYLERVLHMKYIGTGSTAPQPQLAIADFLEGGHYEPHVRRMRTQYQRSRDQMIDWVMRYFPEGTRASRPQGSFMLWVELAEDFDTLRLNRALLDKGVQIAVGSIFSASGKYRNCMRLNYAAKSSREIESAVRIVGETIAQLIAQSD

SEQ ID NO: 39708 - protein, 410 aa, Streptococcus mutans UA159
MTLKRVVVTGYGVTSPIGHTPEDFWNSLHDGKIGIKPITKFDASEIPVFNAGEIQDFPFDKYFVKKDKNRMDTYSLYAIYAAMEAIENAALDMAQEIRDRVGVIVSSGIGGLQELEDQIIRMHERGMKRIKPMFIPKALSNMGAGNIALKIGAQGVCKSITTACASANDAIGEAFREIKYGFHDVILAGGSEASITKIGIGGFNALTALSTTEDPARSAIPFDKDRNGFVMGEGAAVLILESLEHAQKRGARILAEVVGYGSNCDAYHMTTPTPDGSGAAKAIKLAINEAGISPEEVNYVNAHGTSTQANEKGESKAIVAVLGKDVPVSSTKSFTGHLLGAAGGVEAIATIEAIRNHFVPMTAGTKELSEDIEANVVYGQGQEAVIKYAISNTFGFGGHNAVLAFKRWED

SEQ ID NO: 39709 - protein, 630 aa, Schizosaccharomyces pombe
MEAKETHSISDHEVELQDAKPEEKSENGNFVFEKAFSSDEEKGSGYNTNETYSKMDNSLQHRGVSKIEAVRDSIYQNKRGMYLAYAFGIAILACSWASAIQSSTTYSYQVYATASFNRTSMISTLEIATAIISSVCKPILGKFSDITSRPMTYTLVLLFYVIGFIVVASSSTISAYVIGSVFISIGSSGLDYLNTLVVGDLTSLKWRGFMTALLSTPYIATVWFTGFIVQGIIDSNWRWGYGMFAIIMPAVMTPAVIILMYLERQANKDENIKKIINYQTEEKNKNKQSKWQKLWKAVLEVDLFGLILLGVGWSILLLPFSLTSYAKNGWKNPSMIAMMVVGGVILIAYSGYEMFIAPYPSCPRRVMNRTFITAVIIDFFYYLAGYLQSMYFTTYTWILYDWSYRDWTYFNNTMTIALCVFGVFAGAMHRVFHRYKYLQIIGLVIKIVGYGILIRPNFAATGKVDLAWSLILIGMGGSFSVVGSQVSCQASVPHQDLAIASSLLPLYTNIGGAIGAAIASPIFSNKVPKYLREYLPSSINDTQVYNFYSDSSLIREYPVGTEIRDGAIKAYSRSMFFLLVPAVSLSFIPLAAAFWQSNFYLGNQQNAVEGDQDHKKKGDKETTQEEKIII

SEQ ID NO: 39710 - protein, 294 aa, Antirrhinum majus
MEQYEKVEKIGEGTYGVVYKARDRVTNETIALKKIRLEQEDEGVPSTAIREISLLKEMQHGNIVRLQDVVHSEKRLYLVFEYLDLDLKKHMDSCPEFSQDPRLVKMFLYQILRGIAYCHSHRVLHRDLKPQNLLIDRRTNALKLADFGLARAFGIPVRTFTHEVVTLWYRAPEILLGSRHYSTPVDVWSVGCIFAEMVNQRPLFPGDSEIDELFKIFRVMGTPNEETWPGVTSLPDFKSAFPKWPAKELAAVVPNLDASGLDLLDKMLRLDPSKRITARNALQHEYFKDIGFVP

SEQ ID NO: 39711 - protein, 500 aa, Streptococcus thermophilus
MNKRVKIVATLGPAVEIRGGKKFGEDGYWSEKLDPDASAKNIAQLIEEGANVFRFNFSHGNHAEQGERMDVVRMAESIAGQKVGFLLDTKGPEIRTELFEGDAKEYAYKTGEQIRIATKQGLKSTRDVIALNVAGALDIFDDVEVGKQVLVDDGKLGLRVVDKDAEKREFIVEVENDGIIAKQKGVNIPYTKIPFPALAERDNADIRFGLEQGINFIAISFVRTAKDVQEVRAICEETGNGHVKLLAKIENQQGIDNIDEIIEAADGIMIARGDMGIEVPFEMVPVYQKMIITKVNAAGKIVVTATNMLETMTEKPRATRSEVSDVFNAVIDGTDATMLSGESANGPYPVESVRTMATIHKNAQTLLKEYGRLNSSTFDRSSNTEVVASAVKDATNSMHIQLIVALTESGNTASLIDTYRPEADIWAITFDELTQKSLMLNWGVIPVVTETPSSTDDMFEVAERVALESGLVESGDNIVIVAGVPVGSGNTNTMRIRTVK

SEQ ID NO: 39712 - protein, 594 aa, Schizosaccharomyces pombe
MTKDAESTMTVGTYLAQRLVEIGIKNHFVVPGDYNLRLLDFLEYYPGLSEIGCCNELNCAFAAEGYARSNGIACAVVTYSVGALTAFDGIGGAYAENLPVILVSGSPNTNDLSSGHLLHHTLGTHDFEYQMEIAKKLTCAAVAIKRAEDAPVMIDHAIRQAILQHKPVYIEIPTNMANQPCPVPGPISAVISPEISDKESLEKATDIAAELISKKEKPILLAGPKLRAAGAESAFVKLAEALNCAAFIMPAAKGFYSEEHKNYAGVYWGEVSSSETTKAVYESSDLVIGAGVLFNDYSTVGWRAAPNPNILLNSDYTSVSIPGYVFSRVYMAEFLELLAKKVSKKPATLEAYNKARPQTVVPKAAEPKAALNRVEVMRQIQGLVDSNTTLYAETGDSWFNGLQMKLPAGAKFEVEMQWGHIGWSVPSAMGYAVAAPERRTIVMVGDGSFQLTGQEISQMIRHKLPVLIFLLNNRGYTIEIQIHDGPYNRIQNWDFAAFCESLNGETGKAKGLHAKTGEELTSAIKVALQNKEGPTLIECAIDTDDCTQELVDWGKAVAPPTPVLLPLITRLKRTLFGKNMLHLDYKNYLDIRNT

SEQ ID NO: 39713 - protein, 149 aa, Pleurotus ostreatus
MADQLSEEQISEFKEAFSLFDKDGDGTITTKELGTVMRSLGQNPTEAELQDMINEVDADGNGTIDFPEFLTMMARKMRDTDSEEEIKEAFKVFDKDGNGYISAAELRHVMTNLGEKLTDNEVDEMIREADVDGDGQINYEEFVKMMLSK

SEQ ID NO: 39714 - protein, 588 aa, Arabidopsis thaliana
MEAKIVKVLDSSRCEDGFGKKRKRAASYAAYVTGVSCAKLQNVPPPNGQCQIPDKRRRLEGENKLSAYENRSGKALVRYYTYFKKTGIAKRVMMYENGEWNDLPEHVICAIQNELEEKSAAIEFKLCGHSFILDFLHMQRLDMETGAKTPLAWIDNAGKCFFPEIYESDERTNYCHHKCVEDPKQNAPHDIKLRLEIDVNGGETPRLNLEECSDESGDNMMDDVPLAQRSSNEHYDEATEDSCSRKLEAAVSKWDETDAIVVSGAKLTGSEVLDKDAVKKMFAVGTASLGHVPVLDVGRFSSEIAEARLALFQKQVEITKKHRGDANVRYAWLPAKREVLSAVMMQGLGVGGAFIRKSIYGVGIHLTAADCPYFSARYCDVDENGVRYMVLCRVIMGNMELLRGDKAQFFSGGEEYDNGVDDIESPKNYIVWNINMNTHIFPEFVVRFKLSNLPNAEGNLIAKRDNSGVTLEGPKDLPPQLESNGARGSGSANSVGSSTTRPKSPWMPFPTLFAAISHKVAENDMLLINADYQQLRDKKMTRAEFVRKLRVIVGDDLLRSTITTLQNQPKSKEIPGSIRDHEEGAGGL

SEQ ID NO: 39715 - protein, 497 aa, Staphylococcus aureus subsp. aureus MSSA476
MSKVQNESNNVVKRGLKDRHISMIAIGGCIGTGLFVTSGGAIHDAGALGALIGYAIIGIMVFFLMTSLGEMATYLPVSGSFSTYATRFVDPSLGFALGWNYWFNWVVTVAADITIAAQVIQYWTPLQGIPAWAWSALFLVIIFSLNSLSVRVYGESEYWLALIKVVTVIVFIAIGLLTIVGIMGGHVVGFEIFNKGEGPILGGNLGGSLLSILGVFLIAGFSFQGTELIGITAGESENPERAVPKAIKQVFWRILLFYILAIFVIGMLIPYDSSALMGGSDNVATSPFTLVFKNAGFAFAASFMNAVILTSVLSAGNSGMYASTRMLYSMSKDKLAFEAFGKTNKNGVPYMSLLVTAIIVVIIFVLQSLTKGAYEYIVAASGLTGFIAWVGIAVSHYRFRRAFDKQNYDKSKLKYTAKLFPFGPLFAGFLCIVVIIGQDVDFIKTGDFNFSRFLITYMGIPVFLAFFIYHKLRYKTKKIPLEQVDLRQDVSMDEIKG

SEQ ID NO: 39716 - protein, 688 aa, Oryza sativa
MKDGWRAHQRVAYDGEAKNLTVALSYGDAAAARRIPIDPKDVWVVLGLYSLLLVLVAIGVLWFVSQWRKAGELADGDIFDEMVYDELADEEFFVESGPRRFRYSDARPHPTRAPAAARSPPHLPPPPRAASQPSTVAGGGAVLALVLLLVLLAAAEWWRRRSPSPSGGGGGSGRRPRRWRRGYGKSEAAAPCSRSSSSSFSSPSRHGAGEGHRLPPRAQQEYDVTSATATGPCDAYLVFRCSPPLYASAISISNVLNITATAVTESNAVDPVTPVAADPLVLAPVGNGGGRGGGGGEAKRSEIYTYEAGWHIYGMNWSVRRDKKYRLAIASLLEQHNNHVQVVQLDESSGDIAPVLTFDHPYPPTKTMFVPDPHSVRPDLLATSADHLRIWRIPSPDEAAAAAAASSNSGSVRCNGTASPDVELRCELNGNRNSDYCGPLTSFDWNDADPRRIGTSSIDTTCTIWDVEREAVDTQLIAHDKEVYDIAWGGAGVFASVSADGSVRVFDLRDKEHSTIIYESGSGGSSNSAGADGGAASPTPLVRLGWNKQDPRYMATIIMDSPKVVVLDIRYPTLPVVELHRHHSPVNAIAWAPHSSCHICTAGDDSQALIWDLSSMGTGSNNGGNGNGNAAAAAAAEGGLDPILAYTAGAEIEQLQWSATQPDWVAIAFSTKLQILRIYGVSHVVLLK

SEQ ID NO: 39717 - protein, 596 aa, Pichia stipitis
MAEVSLGRYLFERLYQLQVQTIFGVPGDFNLSLLDKIYEVEDAHGKNSFRWAGNANELNASYAADGYSRVKRLGCLVTTFGVGELSALNGIAGSYAEHVGLLHVVGVPSISSQAKQLLLHHTLGNGDFTVFHRMSNNISQTTAFISDINSAPAEIDRCIREAYVKQRPVYIGLPANLVDLNVPASLLESPINLSLEKNDPEAQDEVIDSVLDLIKKSLNPIILVDACASRHDCKAEVTQLIEQTQFPVFVTPMGKGTVDEGGVDGELLEDDPHLIAKVAARLSAGKNAASRFGGVYVGTLSKPEVKDAVESADLILSVGALLSDFNTGSFSYSYRTKNIVEFHSDYTKIRQATFPGVQMKEALQELNKKVSSAASHYEVKPVPKIKLANTPATREVKLTQEWLWTRVSSWFREGDIIITETGTSSFGIVQSRFPNNTIGISQVLWGSIGFSVGATLGAAMAAQELDPNKRTILFVGDGSLQLTVQEISTIIRWGTTPYLFVLNNDGYTIERLIHGVNASYNDIQPWQNLEILPTFSAKNYDAVRISNIGEAEDILKDKEFGKNSKIRLIEVMLPRLDAPSNLAKQAAITAATNAEA

SEQ ID NO: 39718 - protein, 444 aa, Prevotella ruminicola
MKATEVIEKLKAKFPGQPEYIQAVSQVLGTIEEEYNKHPEFEKANLIERLCVPDRILQFRVSWVDDNGNVQTNLGYRVQHNNAIGPYKGGLRFHKSVNASILKFLAFEQTFKNSLTTLPMGGAKGGSDFDPHGKSDMEVMRFCQAFMNELYRLIGPDEDVPAGDIGVGGREVGYMFGQYKKLTHQFQGILTGKGLEFGGSLIRPEATGYGNVYFLEDMLKTRGESLEGKTVLVSGSGNVAQYTIEKLLQLGAKPVTCSDSNGYIYDPDGIDAEKLAFIMELKNVKRGRIKEYAEKYGVKYVENARPWGEKADIATPCATQDEINEAEAKTLIANGVFAVSEGANMPTEPAAIKVFQDAKILYCPGKASNAGGVATSGLEMSQNSERLSWTREEVDTKLHNIMDEIHANCVKYGTEPDGYINYVKGANVAGFMKVAKAMMAQGIY

SEQ ID NO: 39719 - protein, 187 aa, Triticum aestivum
DHFLPPCCSIQRNGEGRICFSSQRTQGPTLYHHQKFFDWKSSYCRISHQSLNTSVNASGQQLQSEPEAHDSTTIWRAISSSLDAFYRFSRPHTIIGTALSIVSVSLLAVQSLSDISPLFLTGLLQAVVAALFMNIYIVGLNQLFDIEIDKVNKPTLPLASGEYTPATGVAIVSVFAAMSFGLGWAVG

SEQ ID NO: 39720 - protein, 325 aa, Xanthomonas axonopodis pv. citri str. 306
MSDTTMTAIAIRDGKGDADALYATEQPRPRPAPGQVLIRVHAAGINRPDLLQRAGHYPPPPGAPETLGLEIAGEIVEPAGRWKVGDRVCALLGGGGYAQYAAVDARHVLPIPAGMDLVHAAALPETIFTAYANLFEHGRLAAGQWLLLHGATSGIGVTAIQMAKAAGAHVLATARSAVKAAQARELGADVAIDSTTASFVEVAKAHGGVDVALDMVGAAVFADTLEALNPHGRIVYIASQAGATIEVPIPVLMRKQAVITGSTLRPRSADEKARLAAEVERVVWPWIEQGKLRVLLDKRFPLREAAAAHRYLEQGSHLGKVVLEM

SEQ ID NO: 39721 - protein, 181 aa, Vibrio sp. Ex25
MKGLLKLVALVGFLSMNSLALASECPDILQGKQRLLNSTEEVDLCESFKGKTLLVVNTASQCGFTPQFEQLETLYQTYKEQNFTVIGFPSNDFRQDRGSETNTAKVCYLDYGVTFPMMARSSVLGVDANPVFSEITNQAGIKPKWNFYKFLISSEGKVIATFPSSTSPTSTTLTNMIEQQL

SEQ ID NO: 39722 - protein, 177 aa, Glycine max
DKEGIPPDQQRLIFAGKQLEDGRTLSDYNIQKESTLHLVLRLRGGMQIFVKTLTGKTITLEVEPSDSIENVKAKIQDKEGIPPDQQRLIFAGKQLEDGRTLSDYNIQKESTLHLVLRLRGGMQIFVKTLTGKTITLEVEPSDSIENVKAKIQDKEGIPPDQQRLIFAGKQLGDGRTL

SEQ ID NO: 39723 - protein, 272 aa, Nostoc punctiforme PCC 73102
MKKLIKGLREFKSSYFSANEELFEQLSHGQKPRVLFITCSDSRIDPNLITQAGLGELFVIRNAGNIIPPFGATNGGEGATIEYAIQALDIQQIIVCGHSHCGAMKGLMKLDSLRVEMPLVHDWLKYAEATRRLVKDNYSHYEGEELLEIIIAENVLTQIENLRTYPVIRSKLHQGQLSIYAWIYQIETGEILAYDPQKHAYVLPQNQLLSSEIDETLLSPPLNSNVEIHFTKTQQRPFQSSGELPIPTHEWFPMTVLSPEQMERIYRGSATK

SEQ ID NO: 39724 - protein, 1092 aa, Solibacter usitatus Ellin6076
MNTWLNTVIAEFARHPWRYALLVACVAAGICVASLNKPSTAMLLRVGYSDFFPYVARDELGRPIGLAVELVQEAAARSGVELRWIAIDDAEQALRTGQIDLYPILTATAERKRDLYPSIPWWEVTNSLLSLRDHPLKNPAAAAGRRIAIRNRSTSDVLAAVVLPGAAVVRMPTGRVSIGALCAGSVDGVLLDARLIYEAMLDRPEGCADRKFMVVPLPQTSLPLATFARSPYPRAVRRLYAAIEQATLDGTMTAIANRWFAIPQQRYVQQRLAGRQRYLLGLLFAACVLLLTAFTWWHYRRTLRIRRTAENAWTRAVEAERRFETFMAHTPAISFIKDAAGRMIYVNHAFVRFHGFSAAQSIGRLDTELFGESVAGIRERDAEVLQTGRPVQYLLPLPGTDGALYYWLVLKFLLRGEAGETRIGVVAIDISDQQRAAELIARSEERYRMLFEEAPVAIHEIDRDGLVTRINRAGRMLCGYSESEIIGRHASEFVAPHYREESRAAVHAKMKGTRPLAPFERHYQRKDGRLLRVEVHETAIFDHGGEIQGLRSCLIDLTERYEAQERLDAFALQLQQNNSALALALESARQATRLKSQFLANMSHEIRTPMNGVLGMTELLVQSGLTEEQRSLALSVTQSGEHLLAIINDILDFSKIESGKLELEATPFDPTATIEAVIELMAPTAHIKNLELTYWIAAEMPARVRGDAARLRQVLLNLLGNALKFTAEGEIAIQATFDAAADRLRVSVADTGIGIPEAAIPHLFAAFTQADNSTTRRFGGTGLGLTIAKSIVELMDGEIGIESRYGHGSTFWFTASLPAVAQAAAPPAPLPPAAILIVDDNASSRAILERHIALWGLRAETAVDGAHALALLRSHPFDAALIDTQIPGTDVVALLHEIAAESALRSTSIIRLSSIGILPDLGVASSIHKPVKPEVLYECLSRILQPVATLASAARVPAASSPLHAARGRVLIAEDNAVNQRVARLQVAHCGFDSDVVSNGQEALDALSHMNYALVLMDCQMPGMDGYAATRELRRRENGARHLPVIALTANAFATDREACLEAGMDDHLSKPVSLRSLAAILDRWSIAARES

SEQ ID NO: 39725 - protein, 434 aa, Saccharophagus degradans 2-40
MIRRGFAVELRWFVLSMAAAAIVGVAVGYFLAVMCLALLLYVCWLFYNITRLEAWIIAARRKTNPRNELYGIFGEIAEDVVLLRKRYQKEKLRLQAVVSRVQDMTSALTDGVVLLDSLGNIEWWNEAAKQMFDLRDVDHGHKLTNIIRHPRFVKYFENGKYGDPLELEGIRHPDQHLQFQIHPFGQGERLVVLRDVTRVYKLEQMRKDFVANVSHELRTPLTVVRGYIETLSDAPSIPPAWARALTAMQGQCQRMTALINDLITLTKLETDEREIRQEAVDIGPLIQTIMSDAQALNGESTHTLIHKGDDNLVLRGNEKELRSAVSNLVFNAMKYSPDGCKIEVQYTANEHDVVISVSDTGVGIDPKHLPRLTERFYRVDGGRATTMGGTGLGLAIVKHVLLRHDAQLRISSKVGKGSTFSCHFPKARLIKRAK

SEQ ID NO: 39726 - protein, 149 aa, Capsicum annuum
MADQLTDDQISEFKEAFSLFDKDGDGCITTKELGTVMRSLGQNPTEAELQDMINEVDADGNGTIDFPEFLILMARKMKDTDSEEELKEAFRVFDKDQNGFISAAELRHVMTNLGEKLTDEEVDEMIREADVDGDGQINYDEFVKVMMAK

SEQ ID NO: 39727 - protein, 348 aa, Ipomoea purpurea
MVGGNHTPASPAPTVCVTGAAGFVGSWLVMKLLQRGYIVHATVRDPGNTQKVKHLLELPKAEGKLKVWKGVLEEEGSFDEAIAGCEGVFHVAAAVNFASKDPENEVIKPAVKGILSIINSCAKAKTVKKLVFTSSTAAVHIKETQQLVYDESSWSDLDFIYANKMGGWMYFASKTLAEKEAWKAAKEKQIEFISIIPPLVIGPFLIPTFPLSLVTALSPIMGNGLHHNIIKQGKFVHLDDLCEAQIFLYQHPEAGGRFICSSHHATIHDVAKMIRHNWPEYYVPSEFKGIEKELPIVSFSSKKLQEMGFQFKYTLEDMYKGAIETLRKKGLLPYSTKEPAGIEQEPKS

SEQ ID NO: 39728 - protein, 386 aa, Ipomoea purpurea
MVDGNHPLPAPKVCVTGAAGFIGSWLVKTLLQRGYHVHATVRDPGNTKKVKHLVELPKADTNLTVWKGVMEEEGSFDEAIAGCEGVFHVATPMDFDSKDPENEVIKPTINGVLNIINSCVKAKTVKRLVFTSSAGTLNVQPQQKPVYDETCWSDLDFIYAKKMTGWMYFASKILAEKEAWKATKEKQIDFISIIPPLVVGPFITPTFPPSLITALSLITGNEAHYSIIKQGQYVHLDDLCEAHIFLYEHPKAEGRFICSSHHTTIHGLADMITHNWPEYYIPSQFKGIEKELPVVYFSSKKLQDMGFQFKYSLEDMYRGSIETLRKKGLLPYSTKETAAIEEEQETVPLKVEEPTAIEQKQETVPLKLEEEPIAIEQKQEVVPLKA

SEQ ID NO: 39729 - protein, 356 aa, Ipomoea purpurea
MSGGGGHAPTLPAPKVCVTGAAGYVGSWLVMKLLQRGYVVHATVRDPGNTKKVKHLLELPKAAEGKLRLWKGVLEEEGSFDDAIAGCEGVFHVAATPVDFVSDDPQNEIIRPAVKGILSIINSCAKAKTVKRLVFTSSAVTLIVQGNPKPVYDESSWSDLDLIYAKKMPGWMYFASKTQAEKEAWKAAKEKQIDFISIIPPLVIGTSIVPTVPLSFTIALSPVTGNEAHYFVIKQGQYVHLDDLCEAQIFLFEHPKAEGRFICSSHDATIHDLAKMIRQNWPEYYVPSEFKGIEKDLQVVSLSSKKLLDMGFQFKYTLEDMYREVIETLRNKCVLPYSIKPPPNEQEWENGKTLEA

SEQ ID NO: 39730 - protein, 495 aa, Magnaporthe grisea 70-15
MPLAAETKRIVDQFEYTDDDVNKGVKEFLRQMDEGLAKDGTSLSQIPTYVAAVPSGKEQGLYLAVDLGGTNFRVCSVHLNGDNTYDLNFNKVAIPKELMVAKTSEELFAFLAKQIEVFLKDHHEDHFESLKRRREATSATNGYREEDVFRLGFTFSFPVDQVGINKGNLIRWTKGFDIDDTVGKDVCALLQAELDKLKLPVKVAALVNDTVGTLMARAYTSPSKKGTILGAIFGTGTNGAYMEKYDSIKKGLKGADYVDTTGEMIINAEWGSFDNQLNVLPSTPWDDALDRESNNPGVQMFEKRVSGMFLGEILRQAVVDAVKNDKVQLFKQVQVNSSSSRLFTSYGVDSAIMSDAAEDNTPELATLRKKLSSEVGLNDVSVEDAQAFKAISAAVGRRAARLSAVAVAAVVLKTGKLTHPDWKGEQIDIGVDGSLFQFYPQFPDMIYEALRVIDGIGEKGAEQITIGLTQDGSGVGAALIALIAAEMEKSASGSK

SEQ ID NO: 39731 - protein, 573 aa, Pinus taeda
MAVYVQGASMMMDEEAKIEAEVAEVQTWWNSERFRLTQRPYTAKDVVRLRGTMRQSYASNELAKKLWRTLKTHQANKTASRTFGALDPVQVAMMAKYLDTIYVSGWQCSSTHTSTNEPGPDLADYPYDTVPNKVEHLFFAQQYHDRKQREARMSMSREERARTPHIDYLRPIIADGDTGFGGTTATVKLCKLFVERGAAGVHIEDQASVTKKCGHMAGKVLVSTAEHINRLVAARLQFDIMGVETVLIARTDAVAATLIQTNIDGRDHPFILGVTNPKLKGKPLATVLAEAMANGKTGTELQDVEDKWMGMANLRLFSDVVGDAIRSLAIPQQEKSNRINLWFNKIDQLSHFEARELAEKLGVSDVFWDWDLPRTREGFYRFQGSTKAAILRGWAFGPHADLIWMETSSPDMVECKRFAEGVKSKHPDLMLAYNLSPSFNWDASRMSDEQMMNFIPQIAQLGFCWQFITLAGFHADALVIDTFARDYAKKGMLAYVQQIQRQERANGVDTLAHQKWSGANYYDTLLKTVQGGISGTAAMGKGVTEDQFKADAWSSDGRALDLTNHGVVARARM

SEQ ID NO: 39732 - protein, 221 aa, Ginkgo biloba
MGRGKIEMKRIENTTNRQVTFCKRRNGLLKKAYELSVLCDAEVALIVFSSRGRLYEFANNSVKRTIDRYKKTCADNSHGGAISECNSQYWQQEAGKLRQQIDILQNANRHLMGDALTSLSVKELKQLEIRLERGISRVRSKKNEMLLEEIEIMQRREHILLAENQFLRTKIAECESSQNANMLPGPEFDALPGFDSRHFLHASIMDAHHYAQQDQTALQLG

SEQ ID NO: 39733 - protein, 580 aa, Pinus taeda
MAIYSAQAPNSILEEEARFEAEVSETQAWWNSTDLFRLTRRPYTARDVVRLRGSMRQSYASNEMAKKLWRTLKTHQANKTASRTFGALDPVQVSMMAKYLDSIYVSGWQCSSTHTTTNEPGPDLADYPYDTVPNKVEHLFFAQQFHDRKQKEARMSMTREERSKTPYIDYLKPIIADGDTGFGGATATVKLCKLFVERGAAGVHIEDQASVTKKCGHMAGKVLVSVGEHVNRMVAARLQFDIMGVETLLVARTDAVAATLIQTNVDARDHQFILGATNPNLKGKPLADVLARAMASGKSGADLQAVEDEWMAMADLKLFSDCVVDGIKALNVSEQEKGRRLGEWMQQTGGNTGNVLSYYQAKELAEKLGISNLFWDWDLPRTREGFYRFQGSVKAAIVRGWAFGPHADIIWMETSSPDMVECRDFALGVKSKHPEIMLAYNLSPSFNWDASRMTDEQMKNFIPEIARLGYCWQFITLAGFHADALVIDTFAKDFAQRGMLAYVEKIQRQEMMNGVDTLAHQKWSGANYYDQLLKTVQGGISATAAMAKGVTEDQFEETQSSTLALESNIGAGTVLAKSRM

SEQ ID NO: 39734 - protein, 370 aa, Glycine max
MGVVTVSSSAARTPLGLNTKFCNNRLKRPLIVAFKGDKHNDSALVATQEKIPVPVETAKKTQKKRIGKTNKLPKRESSPSSMDVDYNEAAAMLENLYKLSPASDNAECIDGKIKRVSRRGKKVVDESEEKELKGDWVVRNQNKNKKPKRLNLDQRISLKNNKSGDEVIPTRKKRNVGNKIEKIEELIREYSVSTDFVSMDWKRMRIPPVLSSSEHAWLFKLMQPMKALLQVKEDLQQELTREPADGELADATNMSITQVRKAIDVGQAARNKLIKHNLRLVLFVINKYFTDFASGPRFQDLCQAGVKGLITAIDRFEPNRRFRLSTYSLFWIRHAIIRSMTLSNFTRVPFGLESVCILSFLLHLVINVLF

SEQ ID NO: 39735 - protein, 218 aa, Ginkgo biloba
MVRGKTQMKRNENATSRQVTFSKRRNGLLKKAYEFSVLCDAEVGLIIFSPRGKLYEFASASMQKMLERYQKYSDDMNANKKTNEQDAQHWKEEIENMGQRIEILEATQRQMLGECLASCSMKELNHLENQVERGLNHIRARKTEILMEQIEQLKRKERFLTEENAILRQKCIQPHYADASISTTPTIGYGSIQHPEVETQLLMRPPEVQDHIQLKGSN

SEQ ID NO: 39736 - protein, 294 aa, Pinus contorta
MEQYEKVEKIGEGTYGVVYKARDRLTNETIALKKIRLEQEDEGVPSTAIREISLLKEMQHGNIVRLQDVVHSEKRLYLVFEYLDLDLKKHMDSCPELAKDPRLIKTFLYQILRGIAYCHSHRVLHRDLKPQNLLIDRKTNALKLADFGLARAFGIPVRTFTHEVVTLWYRAPEILLGSRHYSTPVDVWSVGCIFAEMVNQRPLFPGDSEIDELFKIFRVLGTPNEETWPGVTSLPDFKSAFPKWPAKDLATVVSGLEPAGIDILSKMLCLEPSRRITARSALEHEYFKDLGFVP

SEQ ID NO: 39737 - protein, 612 aa, Arabidopsis thaliana
MKMDKKTIVWFRRDLRIEDNPALAAAAHEGSVFPVFIWCPEEEGQFYPGRASRWWMKQSLAHLSQSLKALGSDLTLIQTHNTISAILDCIRVTGPTKVVFNHLYDPVSLVRDHTVKEKLVERGISVQSYNGDLLYEPWEIYCEKGKPFTSFNSYWKKCLDMSIESVMLPPPWRLMPITAAAEAIWACSIEELGLENEAEKPSNALLTRAWSPGWSNADKLLNEFIEKQLIDYAKNSKKVVGNSTSLLSPYLHFGEISVRHVFQCARMKQIIWARDKNSEGEESADLFLRGIGLREYSRYICFNFPFTHEQSLLSHLRFFPWDADVDKFKAWRQGRTGYPLVDAGMRELWATGWMHNRIRVIVSSFAVKFLLLPWKWGMKYFWDTLLDADLECDILGWQYISGSIPDGHELDRLDNPALQGAKYDPEGEYIRQWLPELARLPTEWIHHPWDAPLTVLKASGVELGTNYAKPIVDIDTARELLAKAISRTREAQIMIGAAPDEIVADSFEALGANTIKEPGLCPSVSSNDQQVPSVVRYNGSKRVKPEEEEERDMKKSRGFDERELFSTAESSSSSSVFFVSQSCSLASEGKNLEGIQDSSDQITTSLGKNGCK

SEQ ID NO: 39738 - protein, 350 aa, Glycine max
MALVTTNPTINEGPLFAEVDMGSDFNAPTVRATVVQASTIFYDTPATLDKAERLLAEATSYGSQLVVFPEAFVGGYPRGSAFGLSIGNRTVKGREEFRKYHSAAIDVPGPEVDRLAAMAGKYKVHLVMGVIERDGYTLYCTVLFFDSQGHYLGKHRKIMPTALERVIWGFGDGSTIPVFETPVGKIGAAICWENRMPLLRTAMYAKGVEIYCAPTADARDVWQASMTHIALEGGCFVLSANQFCRRRDYPPPPEYVFAGTEVDLTPDSVVCAGGSVIISPLGAVLAGPNYDGEALISADLDLGEIARAKFDFDVVGHYSRPEVLSLTVKDHPTNPVTFTSTSTKIEDKTK

SEQ ID NO: 39739 - protein, 258 aa, Methanothermobacter thermautotrophicus str. Delta H
MNAFDFLTPPRSGKPRKNGITMVLDKGMGPASARDLMEISSDYVDFIKFGWGTLPLHRRDTVKEKVDMYRSFDVEPYPGGTLFEIAHLNDKVEEYFQEARSLGFETLEISNGTVEIETEEKCRLIEMAVDEGFMVLSEVGKKDPERDRLLEPDDRVRLVRADLRAGASMVLMEARESGQNIGIYDERGNIREDEFNHLTDRLPMDRIIWEAPQKSQQVYFILKIGPDVNLGNIPPEEITALETIRRGLRGDTLGKVNL

SEQ ID NO: 39740 - protein, 325 aa, Listeria monocytogenes str. 4b F2365
MNLNKHSERKFDLITVGRACIDLNAVEYNRPMEETMTFSKYVGGSPANIAIGTAKLGLKVGFIGKISADQHGRFIEKYMRDLSINTDGMVKDTEGRKVGLAFTEIKSPDECSILMYRENVADLYLTPEEISEDYIKEARVLLISGTALAQSPSREAVLKAVSLARKNDVAVAFELDYRPYTWTNTEETAVYYSLVAEQADVIIGTRDEFDMMENQVGGKNEATKAHLFQHQAEIVVIKHGVEGSFAYTKAGETFQAKAYKTKVLKTFGAGDSYASAFLYGLFSGESIETALKYGSAAASIVVSKHSSSDAMPTADEIKALIAQAE

SEQ ID NO: 39741 - protein, 445 aa, Ralstonia metallidurans CH34
METLLYKVEDRPPILTTVLLAAQHLLAALGGIIAVPLVLGGALKLPPDQIVALVNAALLGSGIVTIIQCKGVGPVGIRLPCVMGTSFTFVGAGISVGLEHGVPGILGASLAGSLVMIVGSFFMPTIRKLFPHTVTGVVVTMIGLSLTPVAIDWAAGGAGSANYAAPGSLAIAGIVLLLVIGFVQWGKGIVSASAVVLGIMIGYLICLALGMVDFSQLHDAPVFALPQPASFGMKFPISGIAAMSLAFLVTIVETTGTFMALGSATRTPMPGKTLARGILCDGVGSAFAALLSSPPVSTFAQNVGVVSLTGVASRHVVALTGGMLVLAGLFPVLGALVVTIPQPVLGGAGLMMFAMIVSAGIRMLGHSAPTKRNSLIIAVSIGCGLAVTIRPDLLAKLPAFVKEVFGSGITVGALVAVVLNLCLPGREVDAIDEEVEGETLVQELA

SEQ ID NO: 39742 - protein, 554 aa, Staphylococcus aureus subsp. aureus MSSA476
MMKFHHRLMLLISSILIISFVTLGIIIHASITYVLSEKHEQALATDARSYIYLVQDNEIDKVKEIVKQQNIDLLITKHDKKVFSSGKLKAIPNSDSYIQKRDFFIFNKKVNGYHVWIKGYNNDITEMHWTLWKYLILTCLVVLICLYFASRSFKRTLIRPIQEVTYATQLLANGYYHIRVPESNVVETKALFVSTNDLARRLQKLNNEQKIQSNRLKTTIENIPSAILMIDRNGKIVVANKAYYEQFNISHNIEQVGYHGYVNTEIEQLILESFKVEKPIYEQLEVAINQVHAKYFDISCVPILTRSQKSLQGILVVMHDITNLKQLENLRREFVANVSHELKTPITSIKGFAETLIDGAKNDAESLDMFLNIILKESNRIESLVTDLLDLSHIEQHTELDTDYMNLSDLTRRIIDNMMTQANQKNISIHTDIEKDVIVKAQESKIAQVITNLLTNAINYSYEDGDINVRVYRDDFRVIFEVQDFGIGIKLEDQQRIFERFYRVDKARSRDSGGTGLGLSITKHIVEAHQGNIEVNSQVGKGSTFKVILKDYKE

SEQ ID NO: 39743 - protein, 373 aa, Staphylococcus aureus subsp. aureus MSSA476
MAELQRGLEGVIAAETKISSIIESQLTYAGYDIDDLAENAQFEEVIFLLWNYRLPNEEELAHLKGKLNQYMTLNPRVYTHFEEYVTDHVHPMTALRTSLSYIAHFDPDAENESDENRYERAMRIQAKVASLVTAFARVRQDKEPLKPNPDLSYAANFLYMLRGELPTDIEVEAFNKALILHADHELNASAFTARCAVSSLSDMYSGIVAAVGSLKGPLHGGANEQVMTMLSEIGSIENVDAYLDEKFANKDKVMGFGHRVYKDGDPRAKYLREMSRQITKDAGREELFEMSVKMEKRMAEEKGLIPNVDFYSASVYHCMEIPHDLFTPIFAVSRSAGWIAHILEQYKDNRIMRPRAKYIGETNRKYIPLEERK

SEQ ID NO: 39744 - protein, 453 aa, Staphylococcus aureus subsp. aureus MSSA476
MAEKLQRELSNRHIQLIAIGGAIGTGLFLGAGQTIALTGPSILLTYIIIGFMLFMFMRGLGEIIIQNTEFKSFADVTNTYIGPFAGFVTGWTYWFCWIITGMAEVTAVAKYVSFWFPEIPNWISALFCVLLLMSFNLLSARLFGELEFWFSIIKIATIIGLIVVGFVMILFAFKTQFGHASFTNLYEHGIFAKGASGFFMSFQMALFSFVGIEMIGVTAGETKDPVKTIPKAINSVPIRILIFYVGALAVIMSIIPWQQVDPDNSPFVKLFALIGIPFAAGLINFVVLTAAASSCNSGIFSNSRMLFGLSSQQQAPPNFSKTNKYGVPHVAIFASSALLLVAALLNYIFPDATKVFTYVTTISTVLFLVVWGLIIIAYINYSRKNPDLHKNATYKLLGGKYMGYLIFVFFIFVFGLLFINVDTRRAIYFIPIWFILLAFMYLRYKRIAAKSNK

SEQ ID NO: 39745 - protein, 585 aa, Staphylococcus aureus subsp. aureus MSSA476
MRKTKIVCTIGPASESEEMIEKLINAGMNVARLNFSHGSHEEHKGRIDTIRKVAKRLDKIVAILLDTKGPEIRTHNMKDGIIELERGNEVIVSMNEVEGTPEKFSVTYENLINDVQVGSYILLDDGLIELQVKDIDHAKKEVKCDILNSGELKNKKGVNLPGVRVSLPGITEKDAEDIRFGIKENVDFIAASFVRRPSDVLEIREILEEQKANISVFPKIENQEGIDNIAEILEVSDGLMVARGDMGVEIPPEKVPMVQKDLIRQCNKLGKPVITATQMLDSMQRNPRATRAEASDVANAIYDGTDAVMLSGETAAGLYPEEAVKTMRNIAVSAEAAQDYKKLLSDRTKLVETSLVNAIGISVAHTALNLNVKAIVAATESGSTARTISKYRPHSDIIAVTPSEETARQCSIVWGVQPVVKKGRKSTDALLNNAVATAVETGRVSNGDLIIITAGVPTGETGTTNMMKIHLVGDEIANGQGIGRGSVVGTTLVAETVKDLEGKDLSDKVIVTNSIDETFVPYVEKALGLITEENGITSPSAIVGLEKGIPTVVGVEKAVKNISNNMLVTIDAAQGKIFEGYANVL

SEQ ID NO: 39746 - protein, 610 aa, Dechloromonas aromatica RCB
MSMELENLTLPQMLRQRAQQQPNRVAIRQKDFGIWNPISWDDYYRRAGHFGLGLCALGVQPGGHIGVISENRVEWVLAQMGAGLVGAVTVGVYPTSPTNEVSYVLEHADIDVVICEDQEQSDKVLAAIDSLPRLRKIVVMEEKGLRNTPAEFRDKVLAFSEVEALGVDYEAVHRTLIDEVLAKQSLDDIGLMIYTSGSTGKPKGAMISYGNIRAVAPGIIERLGLDEHSRHLSYLPLCHVAEQMLTTFTPIYLGSQVNFGESLRTVQEDLREVAPTLFLGVPRIWEKLHASISIRIHETGRFRRWLFDKALVACETFACKAVHQRTLGEKLTFGFYYVLILRALQNYIGLRNAKVALTGAAPISPAIISFFRALGVPLVEVYGLTESSGMIFGQRLDHVQLGTVGAAISGIDYRIAETGELQVRGGAVFAGYYKNAEATAASIRDGWLHTGDVVRELDGDIKIVDRLKDIMITAGGKNLTPSEIENGMKASPYIKECIVVADGRNFVAALIQIDFETVGKWAERNRMAFTHFRSLVESPQVRELVAEEINKANAKLAQVSQIRKFHLLTKELDHDDGEVTATMKVRRSSIYKTYEKEIEAMYGKGGLANA

SEQ ID NO: 39747 - protein, 888 aa, Xanthomonas axonopodis pv. citri str. 306
MRDDVRRLGALVGDLLAEQVSAEFLDEIERVRTTAISRRESDAPPSTLSEQLAGRQPRDAEALVRAFSTYFQVVNIAERVHRIRRRREYQRSGTDTPQPDGLHDALRRLKAQGVTLDELSQWLPRIDVEPVFTAHPTEAVRRALLEKEQLMVASLVDNLDGMRTPNERASDAARFRMALTASWQTADSSPVRPTVDDEREHVGFYLTQVLYRVIPVMYETLEHAIEETYGSVPALPRLLRFGTWVGGDMDGNPNVDAKTIAGTLDAQRRAVLDRYQKELWQLASLLSQSTTLVQVSGELTAQLERYRALLPDAAARSRPRHGDMPYRLLNDLMRARLQATLDDADGAYAAPSELEHDLQLILDSLQANKGLHAGWFAARRLLWRVRSFGFHLARLDVRQESSVHARAVADALGQTDWDAQDATQRAAVLGPYAAGQDPLPRVDDEGNARLDAVFAALADARTRHGADALGSYIISMAHNRADVLTVLALARRGGLVDDAGAVPLDIVPLFETVDDLRGGTGTVQDLLADPVYRQHLAARGDTQMVMLGYSDSGKDGGIAASRWGLQRAQVELLEAAAELGVRLTFFHGRGGSIARGGGKTSRALDAAPRGSVDGRLRVTEQGEVIHRKYGIRALALRSLEQMTGAVLLSSLRPRAPEPREARWRPVMDLVAERSTVAYRAFVGAPEFMQYFRLATPIDVIERMTLGSRPSRRLGQDAALSNLRAIPWVFAWSQARAVIPGWYGVGSGLQAAVDAGHEETLREMAQDWPFFRTFLDDIAMVLSKGDLNIAELFSRLSGDLHTRFFPLIRDELALTKGWVKALLQQQSLLQHDPRLALSIRLRNPYIDPISVLQVDLLQRWRATDGEDEALLRALVACVNGVSQGVQNTG

SEQ ID NO: 39748 - protein, 351 aa, Magnaporthe grisea 70-15
MATEAPRQYVPLTCHGHSRPVPHINFSSTFESENYFMISACKDGNPMLRQGQTGDWIGTFIGHKGAVWQAKLSPDMSNAATASADFSCKIWNSHTGEVLFTLKHEHIVRAIAYPPNTSDMVATGGFEKKLRLWDLQAASKKLAETTEEVAVESSEAHEIGAGTHTDPIKAIVWAPDPTKIITASGKTLRWFDVPTKSLVKTLVLDDEIKSCESSQLDPQFADSSDINGGSPVLAVAAGKTVVFFGGRQMNEELKRIKLTHGIASVALDLKQRKFAVGEEPGTWVRVYSYEDEKEIDVHKGHHGPVWSIAFSPDGKLYATASEDGTIKLWKNCEAFYGLWRGGANGTEKSSD

SEQ ID NO: 39749 - protein, 562 aa, Arabidopsis thaliana
MATEPTRSWFQIRQQKPDKSSPTKKGQEGNVKNLGRPPMNDAPSNATKQKVAAAKQYIENHYKIQKKSLQERKERRSILEQNLADADVTVEDKMDILKNFEKKEMEYMRLQRQKMGVDDFELLSIIGRGAFGEVRICKEKSTGSVYAMKKLKKSEMLRRGQVEHVKAERNVLAEVDSPFIVKLCYSFQDDEHLYLIMEYLPGGDMMTLLMRKDTLREDETRFYVAQTILAIESIHKHNYVHRDIKPDNLLITRNGHIKLSDFGLSKSLESKNFPDFKAELVDRSTKPAAEHDRLSKPPSAPRRTQQEQLLHWQQNRRTLAFSTVGTPDYIAPEVLLKKGYGMECDWWSLGAIMFEMLVGFPPFYSEEPLATCRKIVNWKTCLKFPDEAKLSIEVKDLIRRLLCNVEQRLGTKGVHEIKAHPWFRGVEWERLYESNAPYIPQVKHELDTQNFEKFDEVPSTCQTSSKSSPWRKMISSKDANFLGYTFKNLEIVDEHHIPGMAELKRKSKTANKPSLKTLFETPYPPSENQALKDLLDSPIYSEGSRGSSGSPFSRPNQSQARR

SEQ ID NO: 39750 - protein, 300 aa, Sorghum bicolor
MGRRACCAKEGVKRGAWTAKEDDVLAAYVKAHGEGKWREVPQKAGLRRCGKSCRLRWLNYLRPNIKRGNISYDEEDLIIRLHKLLGNRSVSVVRAGGGRWSLIAGRLPGRTDNEIKNYWNSTLGRRAGITTGAVGGSRVVVVAPDTGGSHSRATPAASGSCETAGRQKQQGAAAAPPPPRADPDSAGSAAAAAAAGTTTAVWAPKAVRCTAGGRLFFFHRDTTTPTPTTPMAGGGEACAGSSPDDCSSSAASVSPLVGSQQDEPCFSGGDWMDDVRALASFLESDEEWLRCQQTAEEQLA

SEQ ID NO: 39751 - protein, 477 aa, Vigna mungo
METPLKIYFLPFFAQGHQIPMVQLARLIASRGQHITILTTSGNAQLFQKTIDDDIASGHHIRLHLLKFPGTQLGLPEGVENLVSATNNITAGKIHMAAHFIQPQVESVLKESPPDVFIPDIIFTWSKDMSKRLQIPRLVFNPISIFDVCMIQAIKAHPEAFLSDSGPYQIPGLPHPLTLPVKPSPGFAVLTESLLEGEDDSHGVIVNSFAELDAEYTQYYEKLTGRKVWHVGPSSLMVEQIVKKPAIVSEIRNECLTWLDSKERDSVLYICFGSLVLLSDKQLYELANGLDASGHSFIWVVHRKKKEGQEEEEEEKWLPEGFEEKIEREKRGMLIKGWAPQPLILNHPAVGGFLTHCGWNAVVEAISAGVPMVTMPGFSDQYFNEKLITEVHGFGVEVGAAEWSISPYEGKKTVLSGERIEKAVKRLMDKGNEGEKIRKKAKEMQDKAWRAVQEGGSSHNNLTALIDHLKALFPLST

SEQ ID NO: 39752 - protein, 580 aa, Sorghum bicolor
MGTAHVEPRFGVTLRGGVGLTPGGRRAGGGESATLGRERSLGRYTSSQTKDSEAFRSKATQFFRASGSQEADQHLFFTCTVSNQVWSSANPPFLTNQIPEEDDGVQLSLSFFFQNDITDHDLCNKLFLLWYIWKARNDTRFQRKTWTANQIRLAAAARINAHLDALQNPNSLDISLFTNNTSAGTEQRSSQTSSDPFLVSFPSSFAGTRCYTDAATLPDNLNSDTSQAGLGVFIVNTDEHPPISIFVKALLQESSSVLMAESAALALATDLLKQIQCTRYTIFSNNQQLVNFLNQSDLSNPSDRRIKPYSQHAANLLAIFGTQHIKKSQKLTEVNNPSRLPSISPEFTDPDRPASQSKYRTEPGFVLDLAAAAAPSSQIKANMQKEIWSCSYAMETLASYAEDIDGGESPSISMLSEVAAAKKITIVGGSIPEKASGKMFNTCCVIGPDGKILAKHRKLHLFEIDIPGDITLKESDTFTGGQETTIVDTDVGRIGIGICHDIRFPELAMLYRSKGAHLICYPSAFNMSTGELLWDLMQKSRAVDNQFGEVLAAAGHEEATVIGEMDLTTIQSTRHAILRI

SEQ ID NO: 39753 - protein, 381 aa, Vigna mungo
FARAQISKTAIVKAFVIDLFCASTMESASSMGIPVYFFFTSGAAILALYSYFPKLHQECIVSFKNMVGVELRVPGNATLKARGTAGTHLGQARPCVLGHAGLLHAPPEARGVIVNSFEELEPAAVNAVTQGACFPDATHVPRVYYIGPLIAESQQSDAEGRESKECLRWLEEQPSRSVVYLCFGSRGSFSVSQLKEIAKGLEKSGKRFLWVVKRPLEEEGAKHEEAAKPGDEFDLASMLPDGFLERTKDRGMVVKAWAPQVEVLSRESVGGFVSHCGWNSVLEGVVAGVPMVAWPLYAEQHVNREVMVGEMKVAVGVNERVEDGFVSAEEVEKRVREVMETKEIRGRSFKLKQMAMAAVAEFGSSTTAIAHLLHSWTSFTS

SEQ ID NO: 39754 - protein, 270 aa, Buchnera aphidicola
MNRYENIFDRLSQRKEGCFVPFVVLGDPSLDTSLKIINILIQNGADALELGIPFSDPLADGKTIQKANLRALSQKNNIFQYFKEIKNLRKKHTQIPIGLLIYANLVYNQGLDNFYLKCRKSGVDSVLIADVPIEESEIFYTTANKYKISSIFICPPNADDDLLYRISLYAKGYIYVLSRPGVTGIENQNFFVSGDFIKKIKKYNSVPLLQGFGISNSIQVKQAISSGLSGVICGSAIINIIEKYLYEEDIMMTKIQEFVKHLKKSTKLIA

SEQ ID NO: 39755 - protein, 269 aa, Streptococcus mutans UA159
MNHMKRNFEHVKRIVIKIGTSSLVLPSGKIDLNKIDQLAFVISNLMNRELDVILVSSGAMGFGLDILKMDKRPAEVARQQAVSSVGQVAMMSLYSQIFSHYQTNVSQILLTRDVVEFPESLENVTNTFETLLSMRIVPIVNENDAISVDEMDHTTKFGDNDRLSALVANITNSDLLIMLSDIDGLFDKNPTIYDNAVLRENVTEITEEILKSAGGAGSKFGTGGMMSKIKSAQIIFDCDRQMILMNGANPRDILRALDGKMIGTLFAKE

SEQ ID NO: 39756 - protein, 460 aa, Pseudomonas syringae pv. tomato str. DC3000
MQPPAFKELWIILRLAGPLIASQMAHMLMVFTDTVMMGKIGPEALAGGGLGAATYSFISFFCVGVMAAVGTLVSIRHGAGDSEGVTRLTQAGLWLAWGMALIAALLLWNLEPILLQLGQAEANVHMAAQFLITLPFALPGLLSFMALRGFTSALGRAGPVMTISVAGAVANFVLNYAMINQWLGLPNLGLMGIGLVTAMVTNCMALALAWHIKRHPAYAAYPISKGLSKLSRSHLKELWRLGLPIGGTYAVEVGLFTFAAFCMGAMGSTQMAAHQIALQTVSMAFMIPVGISYAVTMRIGQHYGAGNILMARTAGRLGIGFGGSVMLLFGIFFWLAPHWVIGLFLDLDDPAFAEIVVLAAKLLAIAAWFEFFDGTQTIAMGAIRGLKDARTTFLIGLGCYWLIAAPAAWLLGFYADGGASGVWWGLALGLFCSAVALTYAFEWKTARLLRKEAVGAAVPG

SEQ ID NO: 39757 - protein, 416 aa, Streptococcus mutans UA159 [sequence omitted]

SEQ ID NO: 39758 - protein, 205 aa, Arabidopsis thaliana
GKTQISEPESFVAKHEEEEHKPTLLEQLHQKHEEEEENKPSLLDKLHRSNSSSSSSSDEEGEDGEKKKKEKKKKIVEGDHVKTVEEENEGVMDRIKEKFPLGEKPGGDDVPVVTTMPAPHSVEDHKPEEEEKKGFMDKIKEKLPGHSKKPEDSQVVNTTPLVETATPIADIPEEKKGFMDKIKEKLPGYHAKTTGEEEKKEKVSD

SEQ ID NO: 39759 - protein, 225 aa, Arabidopsis thaliana
MDIEQKQAEIIDQLVKRASTCKSEALGPLIIEATSHPSLFAFSEILALPNVAQLEGTTDSVYLDLLRLFAHGTWGDYKCNATRLPHLSPDQILKLKQLTVLTLAESNKVLPYDTLMVELDVSNVRELEDFLINECMYAGIVRGKLDQLKRCFEVPFAAGRDLRPGQLGNMLHTLSNWLNTSENLLISIQDKIKWADNMSEMDKKHRKEAEEGVEEVKKSLSMKRE

SEQ ID NO: 39760 - protein, 243 aa, Ginkgo biloba
MGRGRVELKRIENKINRQVTFSKRRNGLLKKAYELSVLCDAEVALIIFSSRGKVYEFGSAGMTKTLERYQKCSYVLQDVNVSDREAQNWHQEVGKLKAKVELLQRSQRHLLGEDLGPLSVKELQQLERQLEVALTHVRSRKTQVMLDLMDELRKKERLLQEVNKSLRKKLSEAEEQRAFSAMQDPGSWDSNAVANNAYAMPPNQSNAVDCEPTLQIGYQYAPPETSMPRADQTENNYMQGWMV

SEQ ID NO: 39761 - protein, 594 aa, Cupriavidus necator
MSVIEVKVPDIGDFDAVEVIEVLVKAGDTVEVEQSLIVLESDKASMDVPSSAAGKVVEVKVKVGDKVGQGAVICTIEAQQAAAAPAPAQAPAPAQAPAPAAAAPAPAPAAASHSGGADIQCEMLVLGAGPGGYSAAFRAADLGMNTVLVERYSTLGGVCLNVGCIPSKALLHNAAVIDEAKALAAHGILFGEAKIDLDGLRHYKNQVVGKLTGGLAGMAKARKVQVVRGIGNFLDPHHMEVELTEGEGKRSTGKKTVIRFEKAIIAAGSQAVKLPFIPEDPRIVDSTGALELPEVPNKMLVIGGGIIGLEMATVYSTLGADIDVVEMLDGLMNGADRDLVKVWEKKNKDRFGKVMLKTKTVGVEAKPDGIYVKFEGEAAPAEPQRYDLVLVSVGRSPNGKRISAEKAGVAVSERGFINVDKQMRTNVPHIFAIGDIVGQPMLAHKAVHEAHVAAEAAHGEKAYFDAKQIPSVAFTDPEVAWAGLTEDECKEKGIKYSKGVFPWAASGRAIANGRDEGFTKLIFDEETHRVIGGGIVGTHAGDLISEVCLAIEMGADAVDIGKTIHPHPTLGESIGMAAEIYEGTCTDVPPPRKR

SEQ ID NO: 39762 - protein, 324 aa, Streptomyces kanamyceticus
MAAQTLRAAARMRVVELIGDKERTAAEVAAEAGARPEGMIRLLRALAGIGVVAERTPGVFAVTPTGALLDSRRPGNVASLVLMMSDPTMLRGWEHLDEVVRTGEPAFDTVFGTDFFGHLREHPEESARFNEAMSQSTGAAAATLPRAFDFTRFATVADVGGGDGTLLSAVLKEHTGLTGIIYDTAEGLAQAPATLERHGLTERCSSVAGDFFQSAPKGADLYLLKSILHDWPDERAVTILSHCRAVLPPEGRVLILEHVLPEAVDPAAPGFAYLSDLNMLVNLGGRERTRADFDELCGRAGLSIVSVTPMGAPNPLSMIEVAAA

SEQ ID NO: 39763 - protein, 224 aa, Methanothermobacter thermautotrophicus str. Delta H
MNLFFEVHGGFRMQQEIMEAVKKAKELSRPRNFTQSMDVILNIKDLDVNKPENRFDEEVSLPNGRGKDVKIAVIADGELALQAKNAGADLVITKDELEELGKNRKEAKKLANQYEFFVAQADMMPLVGRFMGPVLGPRKKMPKPVPATINPEPILNKLRDTVKVRIKDQPVVHTVVGTEDMDDEKLAENIEAVLQTIDRKLEKGRNQLKSMYVKTTMGPVVRVI

SEQ ID NO: 39764 - protein, 548 aa, Lactococcus lactis subsp. lactis
MYTVGDYLLDRLHELGIEEIFGVPGDYNLQFLDQIISHKDMKWVGNANELNASYMADGYARTKKAAAFLTTFGVGELSAVNGLAGSYAENLPVVEIVGSPTSKVQNEGKFVHHTLADGDFKHFMKMHEPVTAARTLLTAENATVEIDRVLSALLKERKPVYINLPVDVAAAKAEKPSLPLKKENSTSNTSDQEILNKIQESLKNAKKPIVITGHEIISFGLEKTVTQFISKTKLPITTLNFGKSSVDEALPSFLGIYNGTLSEPNLKEFVESADFILMLGVKLTDSSTGAFTHHLNENKMISLNIDEGKIFNERIQNFDFESLISSLLDLSEIEYKGKYIDKKQEDFVPSNALLSQDRLWQAVENLTQSNETIVAEQGTSFFGASSIFLKSKSHFIGQPLWGSIGYTFPAALGSQIADKESRHLLFIGDGSLQLTVQELGLAIREKINPICFIINNDGYTVEREIHGPNQSYNDIPMWNYSKLPESFGATEDRVVSKIVRTENEFVSVMKEAQADPNRMYWIELILAKEGAPKVLKKMGKLFAEQNKS

SEQ ID NO: 39765 - protein, 185 aa, uncultured marine gamma proteobacterium EBAC20E09
MIHYTKNISLESNVPNNLKEIILGAGCFWGVEKKFWDLDGVYLTSVGYSGGHTDNPTYEDVCYKNTNHAEVVKVIYDPNIIELKKILKVFWECHDPTQGMRQGNDVGSQYRSVIYSSDTSDLDIANESKEIYQKELEKNNYSTITTEIDIVKNYFLAEEYHQQYLAKNPNGYCGIGGTGCTFPNE

SEQ ID NO: 39766 - protein, 310 aa, Bordetella bronchiseptica RB50
MTTHRIAVIQDGPVPGDAMATAEKMSRLAASAKAQGARLALFPEAFVGGYPKGADFHIFLGGRTPQGRAQYQRYAETAIAVPGPVTERIGQIAAEQDMFIVVGVIERDGGTLYCTILFFSPEGELLGKHRKLMPTALERLLWGYGDGSTFPVYDTPLGKLGAVVCWENYMPLLRMAMYGKQIQIYCAPTADDKPTWVSTMQHVALEGRCFVLSACQHLRGKDFPPEFHNALDVQPDTVLMRGGSCIVDPMGQLLAGPVYDEDAILVADIDLDAVTRGKMDFDVVGHYARPDIFSLTVDERPKPPVTTLKP

SEQ ID NO: 39767 - protein, 525 aa, Glycine max
MDGYDGTVRLGAINLKHDRAADFDSATAAPDVSVSSPVTRQKAAAAKQFIENHYKNYLQGLQDRKDRRRALQRKVQESQVSAEEQEEMMRNLERRETEYMRLQRRKIGIDDFEQLTVIGKGAFGEVRLCRAKDTGEIFAMKKLKKSEMLSRGQVEHVRSERNLLAEVDSRCIVKLHYSFQDSDFLYLIMEYLPGGDIMTLLMREDILSEDVARFYIAESILAIHSIHQHNYVHRDIKPDNLILDKNGHLKLSDFGLCKPLDDKYSSILLENDDLTSQESTSETEGYSVSPWLMPKEQLQQWKRNRRALAYSTVGTLDYMAPEVLLKKGYGIECDWWSLGAIMYEMLIGYPPFCSDDPRMACRKIVNWKTCLKFPDEPKISAEAKDLICRLLCDVDSRLGTRGIEEIKAHPWFKGVQWDMLYESEAAYKPTVTGDLDTQNFEKFPEVDGPPSVTATVGPWRKMLTSKDNNFIGYTFKKSDILKSLESSDADIRVNGSSKTPSLITLLGRIDLQDTIIPESEQKPEA

SEQ ID NO: 39768 - protein, 323 aa, Rhodobacter capsulatus
MSYAMVVTAPGGVENFRLLERDVPQPGPGEVLLRQTAIGLNYIDVYFRTGLYPWGVPADLITGGEAAGVIEAVGPGVDLPVGQRVAYTVRNGAYASHRVIAAEDLVPIPEGISDEIAAAVMLKGLTVHYLIHHSYPAAAGDCVLVHAAAGGVGLLAGQWLKHKGVRALGTAGTAEKCALALAHGYDAVIDYKTRDFVAETMRLTEGKGVKAVYDSVGAVTVKKSVEVLETFGTLVSFGQSSGPALDFRITDLSRGSLRLTRPTLFHHTAQPGWLRKASAEMFDLILKGTIRVEIGQRYDLKDVAAAHTALESRKTTGCTILTP

SEQ ID NO: 39769 - protein, 471 aa, Edwardsiella tarda
MKKTTLVLSAVALSLGMALSPMSASAAETSSATTAQALPSLAPMLEKVMPSVVSINVEGSATVNNSRVPPQFQQFFGEDSPLCQPGSPFGDSPMCQGGGNAPSKERFKALGSGVIIDAGKGYVVTNNHVVANADSIKVQLSDGRRFDAKVIGTDPRTDIALIQLKDAKNLTAIKMADSDNLRVGDYAVAIGNPYGLGETVTSGIVSALGRSGLNVENYENFIQTDAAINRGNSGGALVNLNGDLIGINTAILAPDGGNIGIGFAIPSNMVKNLTGQMVEYGQVKRGELGIMGTELNSELAKAMKIDAQRGAFISQVLPKSAAAKAGLKRLDVIVSLNGKNISSFASFRAEIGTMPVGSKLALGIIRDGKPMNVEVTLEQSAQSQVASDNIFSGIEGAELSNAAGGKGVKVDNVKKGSTAARIGLQKGDVILGVNQHAIANIGELRKILDAKPPVLALNIQRGDNTLYLLMQ

SEQ ID NO: 39770 - protein, 158 aa, Triticum aestivum
  misc_feature (12)..(12): Xaa can be any naturally occurring amino acid
  misc_feature (29)..(30): Xaa can be any naturally occurring amino acid
  misc_feature (42)..(42): Xaa can be any naturally occurring amino acid
  misc_feature (91)..(91): Xaa can be any naturally occurring amino acid
  misc_feature (106)..(106): Xaa can be any naturally occurring amino acid
  unsure (1)..(158): unsure at all Xaa locations
FSINNDENREIXPISSQDACDFIDFVEHXXGKVLVQFFEGKXSRNPTVVLAYLILKKNCTLLEAWTMLKKVHRRAHPNDGFAKVLLVLEKXLHGRPPMESQHKRPXMKVCPICGKNAGLSSSSLKLHLQKVHRKISSGSVDSPITLEIQKAIKALKTG

SEQ ID NO: 39771 - protein, 197 aa, Mycobacterium leprae
MSVHGANRLGTNSLLDINVFGRRSGIAAASYASANDFVDMPPNPAEMVISWVANILSEHGNERVADIRGALQQTMDNNAAVFRTEETLKQALTDIHSLKERYSRITVHDKGKSFNSDLLEAIELGFLLELAEVTVVGALNRKESRGGHAREDYPHRDDTNYMRHTMAYKQGTDLLSDIALDFKPVVQTRYEPQERKY

SEQ ID NO: 39772 - protein, 546 aa, Dechloromonas aromatica RCB
MTKYVFVTGGVVSSLGKGIAAASLGAILESRGIKVTHLKLDPYINVDPGTMSPFQHGEVFVTDDGAETDLDLGHYERFTSAKMAKRNNFTTGQIYDSVLKKERRGEYLGKTVQVIPHITDEIKDRIKAGAEGADVAIVEVGGTVGDIESLPFLEAIRQMGIMEGRNNVCFMHLTLLPYIPTAGELKTKPTQHSVKELREIGIQPDILLCRADRSIPVEERRKIALFCNVMPEAVIECLDADSIYKIPGMLHEQMLDEIVCHKLNILAKAADLTVWENLIVALEHPLHQVKIAFVGKYVDLTESYKSLIEAIKHAGIHTRSQVNIIYLDSEDIEKNGTGVLEDLDAILVPGGFGRRGTEGKIAAIRYARENKVPYLGICLGMQLAVVEFARDVAGMPGAHSTEFVQDTPYPVIGLITEWLDASGKIEKRTEDSDIGGTMRLGAQVCKLGEGTLARSIYGAPEITERHRHRYEVNNTLLAKLEEKGLIVAGRAPGTDLCEMVELPADVHPWFVGCQFHPEFTSNPRQGHPLFSSYVKAALANQKAKGK

SEQ ID NO: 39773 - protein, 282 aa, Zea mays
MAGGGDHSQTNGGHVDQRALEEGRKEEFADQGCAAMVVSVPFIQKIIAEIFGTYFLMFAGCGAVTINASKNGQITFPGVAIVWGLAVMVMVYAVGHISGAHFNPAVTLAFATSGRFPWRQLPAYVLAQMLGATLASGTLRLMFGGRHEHFPGTLPTGSEVQSLVIEIITTFYLMFVISGVATDNRAIGELAGLAVGATILLNVLIAGPVSGASMNPARSVGPALVSGEYTSIWVYVVGPVVGAVAGAWAYNLIRFTNKPLREITKSTSFLKSTSRMNSAASA

SEQ ID NO: 39774 - protein, 203 aa, Arabidopsis thaliana
MTEAMIRNKPGMASVKDMPLLQDGPPPGGFAPVRYARRISNTGPSAMAMFLAVSGAFAWGMYQVGQGNKIRRKRNMLLVEQYFPFFKQKKMKDSNLVSIPVLHSRFVSEWKKYLEYEADVMKDVPGWKVGENVYNSGRWMPPATGELRPDRMIQQTVFFLYWFSLKCFNRNMRQKQFHDSSASCKKLAYLTAPGEKYSKKLTE

SEQ ID NO: 39775 - protein, 700 aa, Oryza sativa
MITFVDSAAKERERESDKCLDPQLWHACAGGMVQMPPVSSKVYYFPQGHAEHAQGHGPVEFPGGRVPALVLCRVAGVRFMADPDTDEVFAKIRLVPVRANEQGYAGDADDGIGAAAAAAAQEEKPASFAKTLTQSDANNGGGFSVPRYCAETIFPRLDYSADPPVQTVLAKDVHGVVWKFRHIYRGTPRRHLLTTGWSTFVNQKKLVAGDSIVFMRTENGDLCVGIRRAKKGGVGGPEFLPPPPPPPPTPAAGGNYGGFSMFLRGDDDGNKMAAAARGKVRARVRPEEVVEAANLAVSGQPFEVVYYPRASTPEFCVKAGAVRAAMRTQWFAGMRFKMAFETEDSSRISWFMGTVSAVQVADPIRWPNSPWRLLQVSWDEPDLLQNVKRVSPWLVELVSNMPAIHLAPFSPPRKKLCVPLYPELPIDGQFPTPMFHGNPLARGVGPMCYFPDGTPAGIQGARHAQFGISLSDLHLNKLQSSLSPHGFHQLDHGMQPRIAAGLIIGHPAARDDISCLLTIGSPQNNKKSDGKKAPAQLMLFGKPILTEQQISLGDAASVDVKKSSSDGNAENTVNKSNSDVSSPRSNQNGTTDNLSCGGVPLCQDNKVLDVGLETGHCKVFMQSEDVGRTLDLSVVGSYEELYRRLADMFGIEKAELMSHVFYRDAAGALKHTGDEPFSEFTKTARRLNILTDTSGDNLAR

SEQ ID NO: 39776 - protein, 585 aa, Schizosaccharomyces pombe
MNAYVRDSESVYSESYPPENFISNEPEKSKDKDNFNGEEVISYVGEVETVPAKEENVFRRFINGFKIEKNQQDSAGQGLKRRLKSRHIQMIGIGGAIGTGVWVGSSKSLYRGGAASVLIDYCIVGTMVFCTVYALGELAVAFPTRGSFVTHATRFIDESWGFALSWNYVFSFIVTIPLELTTGTMMIKYWTNLNSGIWVTVFIVFLFFINIFGVKGYGEMEFIMSTIKVVAMCGFIILGIIIDCGGVPTDHRGYMGTHIFRENAFRHKFKGFCAVFTSAAFSFSGTEYVGVAAAETENPAKAFPVAVRQTLFRIAIFYILSLFIVSLLISGADPRLTSYHGVDASPFVLAIKDANIKALPSILNAIILISVISSANAQLYAGSRAIHSLGCNGFAPKCFTLVDREGRPLVALLILFLFMFLGYLVETGQYDTVFDWMLSISGLGTLFCWGSICLAHIRYRAAMKHQNRSLKEVGFVSPFNVYASYYAFILVCLVLAAEFYVSIFPVGGKPDASAFFENYLSAPVILVFFICHKLYYKTKRITLSNMDLETDFAYKTPVEEEEEEEKSAGSLSIKQRMKKLSDMMC

SEQ ID NO: 39777 - protein, 287 aa, Cytophaga hutchinsonii
MGIRNSKTFTSTDIATYYDVSEDHYMYFWDLNQSHSLHYGYWDASTKTFREALANINRVLAEKASITAGTRVLDAGCGVGGSSIWLAKNKQANVTGITVSKKQAARANTSAAAVNPGGTAVFDVQDYTNTPYHSESFDVVWAIESVCHAANKEDFIKEAYRLLKPGGQLIMADFFIVKDGNADDQRSIDAWGHGWAVPFFEKKDAFQHMLLKAGFNTADMIDSTEHIRRSAKRLYYAFFPGWIISKLYNLVNRRTTEFSKNNVYTAYYQYKTLKKELWKYYIVHAKK

SEQ ID NO: 39778 - protein, 299 aa, Cryptococcus neoformans var. neoformans JEC21
MTSTAIPPAAVAANNNTLNSALAAEQISSPASPVDKPVDEKKQLEEGEIEENPSEGDSQTKTIFDDASKFNVKHPLFSTWTLYFDSPQSKSLPKTPQTTPAMPQGSHGWMADIRKVVSFDSVEEFWGLYNNIIPPSQLPGKANYYLFKNGIIPAWEDPQNKNGGKWSIQVPKNSESKSSIDRMWLYTMLAAIGETFETASTDSENAPSPTQSDLITGVIVSPRPAFYRISIWTREASDVNVLDTDAIKARLLNIGKHFKTSVLGYELEQKLTEGGFQTELTFDAHKDSEKKVNKNKFTV

SEQ ID NO: 39779 - protein, 907 aa, Pseudomonas syringae pv. syringae
MLLLTILPASLMAAMLGGYFTWMQLSELQSQLLQRGEMIAQDLAPLAANALGRKDKVLLSRIATQTLEQTDVRAVSFLDTDRTVLAHAGPTMISPSPIGSGSQLLSSTGTDATRYLLPVFGSQRHLTSPIIPAEADTLLGWVELEISHNGTLLRGYRSLFASLLLILTGLAFTATLAVRMSRTINGPMSQIKQAVSQLKDGNLETRLPPLGSRELDELASGINRMAATLQNAQEELQLSIDQATEDVRQNLETIEIQNIELDLARKEALEASRIKSEFLANMSHEIRTPLNGILGFTHLLQKSELTPRQFDYLGTIEKSADNLLSIINEILDFSKIEAGKLVLDNIPFNLRDLLQDTLTILAPAAHAKQLELVSLVYRDTPLALSGDPLRLRQILTNLVSNAIKFTREGTIVARAMLEDETEEHAQLRISVQDTGIGLSSQDVRALFQAFSQADNSLSRQPGGTGLGLVISKRLIEQMGGEIGVDSTPGEGSEFWISLKLPKAREDKEESLNIPLGGLRAAVLEHHDLARQALEHQLEDCGLQTIVFNNLENLLNGVTAAHETPAAIDLAVLGVTALEISPERLRQHIWDLENLNCKVMVLCPTTEHALFQLAVHDVYTQLQAKPACTRKLQKALSELIAPRAVRADIGPPLSSRAPRVLCVDDNPANLLLVQTLLEDMGAEVVAVEGGYAAVNAVQQEAFDLVLMDVQMPGMDGRQATEAIRAWEAERNQSSLPIVALTAHAMANEKRSLLQSGMDDYLTKPISERQLAQVVLKWTGLALRNPAPERQNEALEVHVGPLVLDHEEGLRLAAGKADLAADMLAMLLASLDADREAIRVARANQDVHALIERIHRLHGATRYCGVPQLRSACQRAETLLKQNAPHTEEALNDLDKAIIRLEAEARVMA

SEQ ID NO: 39780 - protein, 106 aa, Brassica rapa
GFIGSWLVMRLLERGYFVRATVRDPGNLKKVQHLLDLPNAKTQLTLWKADLSDEGSYDDAINGCDGVFHIATPMNFESKDPENEVIKPTVNGVLGIMKACDKAKTV

SEQ ID NO: 39781 - protein, 816 aa, Oryza sativa (japonica cultivar-group)
MGETTGERALTRLHSMRERIGDSLSAHTNELVAVFSRLVNQGKGMLQPHQIIAEYNAAIPEGEREKLKDSALEDVLRGAQEAIVIPPWIALAIRPRPGVWEYLRINVSQLGVEELSVPEYLQFKEQLVDGSTQNNFVLELDFEPFNASFPRPSLSKSIGNGVQFLNRHLSSKLFHDKESMYPLLNFLRAHNYKGMTMMLNDRIRSLDALQGALRKAEKHLAGITADTPYSEFHHRFQELGLEKGWGDCAQRVRETIHLLLDLLEAPEPSALEKFLGTIPMVFNVVILSPHGYFAQANVLGYPDTGGQVVYILDQVRAMENEMLLRIKQQGLNITPRILIVTRLLPDAHGTTCGQRLEKVLGTEHTHILRVPFRTENGTVRKWISRFEVWPYLETYTDDVAHEISGELQATPDLIIGNYSDGNLVACLLAHKLGVTHCTIAHALEKTKYPNSDLYWKKFEDHYHFSCQFTADLIAMNHADFIITSTFQEIAGNKETVGQYESHMAFTMPGLYRVVHGIDVFDPKFNIVSPGADMSIYFPFTESQKRLTSLHLEIEELLFSDVENTEHKFVLKDKKKPIIFSMARLDHVKNLTGLVELYGRNPRLQELVNLVVVCGDHGKESKDKEEQAEFKKMFNLIEQYNLNGHIRWISAQMNRVRNGELYRYICDMRGAFVQPALYEAFGLTVIEAMTCGLPTFATAYGGPAEIIVHGVSGYHIDPYQNDKASALLVEFFEKCQEDPNHWIKISQGGLQRIEEKYTWKLYSERLMTLSGVYGFWKYVTNLDRRETRRYLEMLYALKYRKMATTVPLAIEGEASTK

SEQ ID NO: 39782 - protein, 461 aa, Candidatus Blochmannia floridanus
MKIVNPIITISIIFALICINNLQTSNNYYTALGSETPYLSMPTSLAPMLDNVLPTVVSIHVEGTQPSKRLTLPKEFRYFFGPDLPNGNFGNRPFEGLGSGVIINSNKGYIITNNHVVHGADKITIQLNDGREYNAKIIGHDEQTDLALLQILKFKNLSEIKIADSDTLKVGDFAVAIGNPFGLGQTATSGIISALGRSGLNLEGLENFIQTDASINRGNSGGALVNLNGELIGINTAILAPGGGNIGIGFAIPSNIVKNLSQQLIDFGEVKRGQLGIKGTELTADIAKAFNIDIQRGAFVSEVLPGSAAAKARIKAGDVIISVEGKPIKNFAELRVKVGTTAPGKIIKIGLLRDGKTHIVSVLLDDSTCVSTSEENLIPALQGATLSNNYLKDGTPGVQVEEINKDSPAASIGLQKGDMIIGLNRTRISNLSQLRKILKENPTVMALNIIRGGTNIFILLR

SEQ ID NO: 39783 - protein, 283 aa, Citrobacter freundii
RAAQERSDIEIVAINDLLDADYMAYMLKYDSTHGRFNGTVEVKDGHLIVNGKKIRVTAERDPANLKWDEVGVDVVAEATGLFLTDETARKHITAGAKKVVLTGPSKDNTPMFVKGANFDKYEGQDIVSNASCTTNCLAPLAKVINDNFGIIEGLMTTVHATTATQKTVDGPSHKDWRGGRGASQNIIPSSTGAAKAVGKVLPELNGKLTGMAFRVPTPNVSVVDLTVRLEKAASYEEIKKAIKAASEGPMKGVLGYTEDDVVSTDFNGEVCTSVFDAKAGIAL

SEQ ID NO: 39784 - protein, 283 aa, Serratia sp. MF 426
RAAQERSDIEIVAINDLLDADYMAYMLKYDSTHGRFNGTVEVKDGHLVVNGKTIRCTSERDPANLKWNEVNVDVVAEATGLFLTDETARKHIAAGAKKVVLTGPSKDDTPMFVMGVNHKSYAGQEIVSNASCTTNCLAPLAKVINDKFGIVEALMTTVHATTATQKTVDGPSHKDWRGGRGASQNIIPSSTGAAKAVGKVIPELNGKLTGMAFRVPTPNVSVVDLTARLAKPASYKEICAAIKAASEGELKGVLGYTEDEVVSTDFNGEKLTSVFDAKAGIAL

SEQ ID NO: 39785 - protein, 283 aa, Enterobacter cloacae
RAAQKRSDIEIVGINDLLDAEYMAYMLKYDSTHGRFDGTVEVKDGHLVVNGKTIRVTAEKDPANLKWNEIGVDVVAEATGIFLTDETARKHITAGAKKVVLTGPSKDNTPMFVRGANFETYAGQDIVSNASCTTNCLAPLAKVINDNFGIIEGLMTTVHATTATQKTVDGPSHKDWRGGRGAAQNIIPSSTGAAKAVGKVLPELNGKLTGMAFRVPTPNVSVVDLTVRLEKAASYEEIKKAIKAASEGAMKGVLGYTEDDVVSTDFNGEICTSVFDAKAGIAL

SEQ ID NO: 39786 - protein, 554 aa, Erwinia carotovora subsp. atroseptica SCRI1043
MCSIFGVLDLKSDPVELRKKALELSRLMRHRGPDWSGVYASDKAILAHERLSIVDVNTGAQPLYNAERTHILAVNGEIYNHQALRQQYGDRYAFQTGSDCEVILALYQEKGPEFLDELRGMFAFALYDSEKDAYLIGRDHLGIIPLYMGYDEHGNLYVASEMKALVPVCRTIKEFPAGSYLWSKDGEIREYYQRDWFDYDAVKDNETDKVALHDALEEAVKSHLMSDVPYGVLLSGGLDSSVISAITKKYAARRVEDDARSEAWWPQLHSFAVGLEGAPDLKAAQEVAKHLGTVHHEIHFTVQEGLDAIRDVIYHIETYDVTTIRASTPMYLMSRKIKAMGIKMVLSGEGSDEVFGGYLYFHKAPNAKELHEETVRKLLALHQYDCARANKAMSAWGVEARVPFLDKNFLDVAMRINPRDKMCGNGKMEKHILRECFESYLPHSVAWRQKEQFSDGVGYSWIDTLKEVAANQVTDQQLETARFRFPYNTPGSKEAYLYREIFEELFPVSSAAECVPGGPSVACSSAKAIEWDESFKTLDDPSGRAVGVHQSAYK

SEQ ID NO: 39787 - protein, 283 aa, Serratia sp. MF 416
RAAQERSDIEIVAINDLLDAEYMAYMLKYDSTHGRFDGTVEVKDGHLVVNGKTIRCTSERDPANLKWNEVNVDVVAEATGLFLTDETARKHIAAGAKKVVLTGPSKDDTPMFVMGVNHKSYAGQEIVSNASCTTNCLAPLAKVINDKFGIVEALMTTVHATTATQKTVDGPSHKDWRGGRGASQNIIPSSTGAAKAVGKVIPELNGKLTGMAFRVPTPNVSVVDLTARLAKPASYKEICAAIKAASEGELKGVLGYTEDEVVSTDFNGEKLTSVFDAKAGIAL

SEQ ID NO: 39788 - protein, 379 aa, Vibrio parahaemolyticus RIMD 2210633
MTTNQQNAVVSQPQTVVVKLGTSVLTGGTLALDRAHMVELARQCAELKKQGHSVVMVSSGAIAAGREHLGYPALPNEMASKQLLAAVGQSRLIQTWESLFGIYGIKIGQMLLTRADLDDRERFLNARDTINALVANDIIPIVNENDAVATSEIKVGDNDNLSALVGILCGADKLLLLTDQKGLFTADPRKDPNAELIKEVKTIDDTLRKIAGGSGTTLGTGGMATKLQAADIARRAGIEVIIAAGSAPNVIFDSLSTEPQGTRFLPCSEALENRKRWILAGPAASGDIIIDDGAVNAVVGKGSSLLAKGVIKVSGDFARGEVARVTNSHGKLVARGISAYSSEDLAKITGKHSKDIISILGHDYGSEVIHRDDLVVIQE

SEQ ID NO: 39789 - protein, 416 aa, Vibrio parahaemolyticus RIMD 2210633
MDLTNMGKAAKGAAFELATASTAQKNQALAIIADELEANSAAILAANAKDIELGREAGLTDALLDRLLLNEERLTGIANDVRNVISLNDPVGSEIDSKVLENGMSLSRRRVPLGVVGVIYEARPNVTIDIAALCLKTGNASILRGGKETFFSNMELVKVIQSALAKANLPAASVQYIEKPDRELVSQLLKLDDYVDMIIPRGGAGLHKMCKENSTIPVIIGGFGISHIFVDESADLEKSLNVVENSKVQRPSACNSLDTLLVHEKVAAKFLPMIVERMSDKVTFVAEPKAKALMAQATQIRDAVEGDFDTEWLSYTLGVKVVADVKEAIDHMRVHNASHSDAIMTNSLINSELFINSVGSAAVYVNAATRFTDGAQFGLGAEVAVSTQKLHARGPMGLEELTSYKWVGKANYLARS

SEQ ID NO: 39790 - protein, 877 aa, Listeria monocytogenes str. 4b F2365
MKMAKTKVHVIPHSHWDREWYFTSSRSTIYLVKHLKEVIETLEAKDDYHFYLMDAQSSLIEDYLHYCPEDKTRLEKLIAEKRLITGPWYTQTDQLVISQESIVRNLLYGTRIAREMGHSMAVGYVPDAFGQGGNMPQIYKEFGISKFLFWRGVADNRLKQTEFIWRGDDGTEMLAEQIPFGYYYGANIPENEAELKTYLDDQIGALEEKASTRNVYFPNGLDQAPVRENLPELVAKFNELDSTREYQIASPETFFADLEKDVTNLPVIAGELTEGKHSRLHKSIFSTRADLKQANNEIENFLSNVLEPVLSISYSLGNRYPHNELAEIWKLMFENAAHDSIGGCNSDTTNRDVKHRYKLASDLATNLLDLNMRLISEKIEQKQPFQFTVFNPLPYEKSGVIKMTAYIPEDNFEIEDTQGNTLEYTILEKTDLTDYVLNQHIDLNPSKSIYLPEKVFLATMLVNVNSLPALGYDTIYFNLEKETAEQEPTQSTMTKIENEFYEIQLAANNSLTIHDKKAGRTYTDQMLFVENGDDGDSYNYSPPRKDLVISSEEAVVESLESSISSVNQTLTISFKLNVPYNLEERANGEKSNEMTIKTVISLRKNEELIRFDVQVANQVLSHRLCVTFATEIASKFSTADQLFAPIQRPVRLPEMDVWEAEEWQEAPISIEAMQSFVSLHDEAHGVAVMTEGVREYEIIGENYDTISLTLFRTFSHMGKTDLLYRPGRASGESIVATPDAQLLGEINATFALTLFESSFDEADIAKKAKEYLSNPPVYQMSDFLNGRLIYVYRDEEKTLDATYSLALPTIDGAIISAVKKAEDADAFITRFFNPYLQKEITIPEVFRGKERHLDESESNEKQTRLKHAKVQSYLFEK

SEQ ID NO: 39791 - protein, 136 aa, Conocephalum supradecompositum
MARTKQTARKSTGGKAPRKQLASKAARKSAPSTGGVKKPHRYKPGTVALREIRRYQKSTELLIRKLPFQRLVREIAQEFKSDLRFQSSAIGALQESVESYLASLFEETNLCAIHAKRVTIQSKDIQLARRLRGERN

SEQ ID NO: 39792 - protein, 462 aa, Cucumis sativus
MEKAINRQSILLHHLRPSSSAYTNESSLSASVCAAGDSASYQRTSVFGDDVVIVAAYRTAICKSKRGGFKDTYPDDLLAPVLKALIEKTNLNPSEVGDIVVGSVLAPGSQRASECRMAAFYAGFPETVPVRTVNRQCSSGLQAVADVAAAIRAGFYDIGIGAGLESMTTNPMAWEGSVNPRVKSIENAQNCLLPMGVTSENVAQRFGVSREKQDQAAIESHRKAAAATASGKFKDEIIPVSTKIIDPKTGQEKPVTISVDDGIRPNTTQADLGKLKAVFKKDGTTTAGNSSQVSDGAGAVLLMKRSVAMRKGLPILGVFRTFSAVGVDPAIMGVGPAVAIPAAVKAAGLELNDIDLFEINEAFASQFVYCRNKLGLDPEKINVNGGAIAIGHPLGATGARCVATLLHEMKRRGKDCRFGVISMCIGTGMGAAAVFERGDCVDELCNAKKVEGGVNLLSKDAR

SEQ ID NO: 39793 - protein, 392 aa, Solanum tuberosum
MSCTVAIPNSPAFSPATRIPVTNSLLCKSASFSSSSPSRKSSESLTLTKFPSFTFSSLSSSSQLKILLIEKSSPETISLNRNSSECSTSAPISTSPTVSKRKRPARLDIPVVSTNFGNFPGTPTAAADFVEVEGDEYSVCCKRGRRGAMEDRYSALVNLQGNSKQGIFGVFDGHGGPKAAEFAAEHLNKNIMDELVRRNDEDVVEALKNGYLKTDTEFLSEEFGGGSCCVTALIRNGNLVVSNAGDCRAVVSRGGIAEALTSDHKPSRKDEKDRIETSGGYVDCSNGVWRIQGSLAVSRGIGDRYLKQWVIAEPETTVVELNPELEFLVLASDGLWDKVSNQEVVDAARPLCCTGMSKPQPLLASKKLIDLAVSRGSVDDICVMIIQLQQFW

SEQ ID NO: 39794 - protein, 269 aa, Zea mays
MRKRERENPCGICGHYHKYEEGEVCGVCGHRWKPSDGEGAPSRHESAFPTEVLKDFLFLGSYDNASRSEVLRTLSISHILNTVPDCHNLYKNSFTYHSLQRDRPLDFDEANQYLEKCERDKSRVLVHCMTGKNRSAAIVAAFLMKSRGWRLAQSFQWVKDRRPQVQLTDASHKELLEYELKLFGPSTQTLVPTESFASLGFGYTKPAGDMQTPVFNQTTMPSIFERFNPNDRPANFTFGVERKAEANPRDNNSDGRVNPTSMENLMDSS

SEQ ID NO: 39795 - protein, 874 aa, Solanum tuberosum
MLEVDEKDRVPAGGNRKTYARSISWSDRSPTKSSAKPQWNSKARACLPPLQPLSITRPTAEEWPRAGSDDLGVWPNPSTPGVRLGSFSTHEGSATKQAPREFEFKKDKLAFFNKECSKIVDHIYLGSDTVAKNRDILRENGITHVLNCVGFSCPEYFKDDLVYKTLWLQDSPTEDITSILYDVFDYFEDVREQGGRVFVHCFQGVSRSASLVIAYLMWKEGMSFEDAFQHVKAARGVTNPNMGFACQLLQCQKRVHAQPVSPTSVLRMYRMAPHSPYDPLHLVPKMLSEPGAEGLDSRGAFLVLIPSVIYVWIGKHCTSVMSDNARAAAFQVIRYEKAQGPVLIINEGKEPSDFWSALSQESFFSGGCGKEKTKVDARLLAENDLITDDISQCIGQKNEYDLDFEIFCKALAGGVVPPFPLSGTESETCLPARQNGWSRLRRKFSSGIMKEFITASKLYSHTGITSPVLDKMDTIKELSPALPSSPSSPQCGSPDSFSSYATSSPSWTKDPCRDVENPGLDAVPVLSPSPSFSSLDSLSCFLVSKPKSNTTSPSLSPSTSDYSSSFTFSPSSSNWSDLAYLSAQPSPTRFEHEDPNFVKNDFFKVSSSLLCKGSPFPAAEEAFPTSLALRRANSCLQYKETSPSLAERRGSHPPPMMMLRSNDDSAKISVKLVRTSSFSLPNFEDDTMKCVECDSLNDGDFVDNSKEELMLDVENSITDNQLQNGVQPVDDVSGSFNDNPIGIPIRVAETTDIGLYQWPSMHKLGLSSVVFDSRSVYIIVIPDLSLDENSSSSLYIWMGRDVQWKESSDQVINNDSMCEDNHVHWEKVGLNFLIQKGLATSSLVQIVKEGEEPEQLLKHLPCFSFDKALDVGVK

SEQ ID NO: 39796 - protein, 322 aa, Arabidopsis thaliana
MAHATFTSEGQNMESFRLLSGHKIPAVGLGTWRSGSQAAHAVVTAIVEGGYRHIDTAWEYGDQREVGQGIKRAMHAGLERRDLFVTSKLWCTELSPERVRPALQNTLKELQLEYLDLYLIHWPIRLREGASKPPKAGDVLDFDMEGVWREMENLSKDSLVRNIGVCNFTVTKLNKLLGFAELIPAVCQMEMHPGWRNDRILEFCKKNEIHVTAYSPLGSQEGGRDLIHDQTVDRIAKKLNKTPGQILVKWGLQRGTSVIPKSLNPERIKENIKVFDWVIPEQDFQALNSITDQKRVIDGEDLFVNKTEGPFRSVADLWDHED

SEQ ID NO: 39797 - protein, 411 aa, Colwellia psychrerythraea 34H
MKAITKSSKLHNVCYDIRGQVAVEAKRLEDEGHKILKLNIGNPAPFGFEAPDDILKDVIHNLPNSQGYSESQGIYSARVAVMQYFQQQGIKDVMVDDIFIGNGVSELIVMAMQALLDNGDEVLIPAPDYPLWTAAVSLSGGKPVHYRCDEQNHWFPDLEDMESKITKKTKAIVLINPNNPTGAVYSEEVLHAIIALARKHGLIIYSDEIYDKILYDEAKHVPTAALATDVFIITLGGLSKNYRIAGFRAGWMVISGPKLHAEDYIKGIKLLSSMRMCANVPSQHAIQTALGGYQSINELIRDDGRLIKQRNVAYKMINDIDGLSCNPAMGALYLFVKVDNKKFNITNDERMVLDLLKQEKILLVHGRAFNVKEHNYFRLVFLPHVDELIPALEKLKSFFASYKQVQPSKSA

SEQ ID NO: 39798 - protein, 179 aa, Solanum tuberosum
MAQALEFYNGQIEALMRAMSVAKIIREDKNPCMIEEGLYLGSLGAANNKVALKSLNLTHILTIARDINPPYPNEFVYKVLSVHDRVDVNISHYFEECFDFIEEAKGQGGGVLVHCFAGKSRSATIVIAYLMKKHGMSHSEAFELAKSKRPVVSPNAGFMTQLENYDKTLKDLNTPNVML

SEQ ID NO: 39799 - protein, 76 aa, Wolbachia endosymbiont of Aedes albopictus
EEKQGGIVLPSSAEKKPTKGEVIAIGGGSRNSSGERIALTVKTGDKVFYRQWAGTEVEHDNEKYVVMKESDLLAVI

SEQ ID NO: 39800 - protein, 77 aa, Wolbachia sp. wPseu
EEKQGGIVLPSSAEKKPTKGEVIAIGGGSRNSSGERIALTVKTGDKVFYRQWAGTEVEHDNEKYVVMKESDLLAVIK

SEQ ID NO: 39801 - protein, 113 aa, Triticum aestivum
GMTCNKAEGAMYLFPRLHLPQKAIGAAQAAGAAPDAYYALRLLQATGIVVVPGSGFGQAPGTYHFRCTILPQEDKIPAIISRFKEFHEKFMDEFRDVSRDEAPTGTTIESGGD

SEQ ID NO: 39802 - protein, 461 aa, Zea mays
MEKAVDRQRVLLRHLNPAAAASPAPHAISASACAAGDSAAYHRRPAFADDVVIVAAYRTAICKAKRGGFKDTFAEDLLVPVFKALVDKTKLDPSEVGDIVVGTVLAPGSQRAIECRMAALYAGFPDTVPLKTVNRQCSSGLQAVADVATAIKAGLYDIGIAAGLESMTVNKVSLDGQANPKVELFSQARDCLLPMGLTSENVAHRFGITRLEQDQAAVESHRKAAAAAAAGKFKEEIVPVHTKIVDPKTGEEKKIVVSADDGIRVDTSLAVLSKLKPAFSKDGSTTAGNASQVSDGAGAVLLMRRDVAMKKGLPVLGVFRTFAAVGVDPAVMGIGPAVAIPAAVKAAGLQMDDIDLFEINEAFASQYVYCCKKLELDPAKVNVNGGAMALGHPLGATGARCVSTLLNEMKRRGKDCRFGVISMCIGSGMGAAAVFERGDGVDELTNARGISTHNWLSKDAM

SEQ ID NO: 39803 - protein, 461 aa, Cucumis melo
METMQTIDFSFHVRKCQPELIAPANPTPYEFKQLSDVDDQQSLRLQLPFVNIYPHNPSLEGRDPVKVIKEAIGKALVFYYPLAGRLREGPGRKLFVECTGEGILFIEADADVSLEEFWDTLPYSLSSMQNNIIHNALNSDEVLNSPLLLIQVTRLKCGGFIFGLCFNHTMADGFGIVQFMKATAEIARGAFAPSILPVWQRALLTARDPPRITVRHYEYDQVVDTKSTLIPANNMIDRLFFFTQRQISTLRQTLPAHLHDCSSFEVLAAYVWRLRTIAFQLKPEEEVRFLCVVNLRSKIDIPLGFYGNAIVFPAVITTIAKLCGNPLGYAVDLIRKAKAKATKEYIKSMVDFMVIKGRPRFTEIGPFMMSDITRIGFENVDFGWGKAIFGGPIIGGCGIIRGMISYSIAFMNRNGEKGIVVPLCLPPPAMERFRANVHASLQVIQVLDKVDRDMQTILSAL

SEQ ID NO: 39804 - protein, 713 aa, Schizosaccharomyces pombe
MAVQDEYILVTGGAGYIGSHTVIELINHGYKVIIVDNLCNSCYDAVARVEFIVRKSIKFFKLDLRDKEGLAQIFDTFKIKGVIHFAALKAVGESMKLPLEYYDNNICGTITLLNVMREHRVKTVVFSSSATVYGDATRFDNMIPIPESCPNDPTNPYGKTKYAIENIIKDLHTSDNTWRGAILRYFNPIGAHPSGLLGEDPLGIPNNLLPFLAQVAIGRREKLLVFGDDYDSHDGTPIRDYIHVVDLAKGHIAALNYLNKINNSEGMYREWNLGTGKGSSVFDIYHAFCKEVGKDLPYEVVGRRTGDVLNLTASPNRANSELKWKAELSITDACRDLWKWTIENPFGFQIDNYKWKLFNTLGIMDYKNRLHTICFQDLEVSIANYGALVQAVRYKGRNLVNGFNDFSRYKLKENPFFGATIGRFANRIANGQFEVDGHLYTLCKNENNKTTLHGGNNGFDKQFFLGPIARQYEDYNTLEFILVDKDGNNGFPSDLETLVKYTIKNNSLEIEYKSVIPEYSKLNVTAVNLTNHSYWNLASPNKTIDGTIIKSTTNVYLKVNSETSLPTGDIVEWQNDITKPTKLDPNISFDNCFIVDREASKFCLDTRKYSLKNIVEVIHPSVPVKLVVSTTEPAFQLYTGDGNDICEFQSRSGFCVETGRFINALNNEKWSKQVILRKGEVYGARSKFSLYAQDLEENKHFLDSASYNSGEYY

SEQ ID NO: 39805 - protein, 446 aa, Polaromonas sp. JS666
MNKPSTSSMHSATGTALDSALAETTARYRARNPGSERLLRKAADVLPAGNTRSVLFYTPFPLYMARGEGCHLWDADGHRYLDALGEFTAGIYGHSNPVIRQAIVAALQDGLSLSSHTAREAALAHEIQRRFPGMALLRFTNSGTEANLMALAAATAHTGRRKVLVFNGAYHGGVLSFGGGGSPVNVPHDFVVAPYNDLDAVRGLVQTHGPQLAAILVEPMLGAGGCIPAEPAFLHGLRALADACGALLILDEVMTSRLSGGGRQALLGLKPDLTTLGKYFGGGLSFGAFGGRVDVMSRFDPRRADALGHAGTFNNNTLTMAAGLAGLTQVLTPAALDALNQRGERLRERLNGVFKRHAVGLQFTGLGSVMQLHATDRPLRNAADLAGADDRVKALLFFDLLERGIFLARRGLVALSLPFGDAEADEFVAALDAVVTARHALLPVAG

SEQ ID NO: 39806 - protein, 740 aa, Arabidopsis thaliana
MDNSSDEESEISESEIDVYYEKPYEKLMNGDYKVKVKDTFRCPFCAGKKKQHYKYKELLAHASGVAKGSASRSAKQKANHFALAKYMENELAGDADVPRPQIPSSSTEQSQAVVDDIYVWPWMGIVINPVRRTDNKNVLLDSAYWLKKLARFNPLEVKTLWLDQESVVAVIPQFNSGWSGFKSVTELEKEYEIRGCGRKDWIDKRGDWRSKAYGWCARADDYNSQGSIAEYLSKVGKLRSFSDITKEEIQNKSIVVDDLANKIAMTNEDLNKLQYMNNEKTLSLRRVLIEKDELDRVYKQETKKMQELSREKINRIFREKERLTNELEAKMNNLKIWSKQLDKKQALTELERQKLDEDKKKSDVMNSSLQLASLEQKKTDDRVLRLVDEHKRKKEETLNKILQLEKELDSKQKLQMEIQELKGKLKVMKHEDEDDEGIKKKMKKMKEELEEKCSELQDLEDTNSALMVKERKSNDEIVEARKFLITELRELVSDRNIIRVKRMGELEEKPFMTACRQRCTVEEEAQVQYAMLCSKWQEKVKDSAWQPFKHVGTGDRKKEVVDEEDEEIKKLREEWGEEVKNAVKTALEELNEFNPSGRYSVPELWNSKQGRKATLKEVIDYITQQYCLLIDLGNKHMPEGIDKFGRGCILLTVIDEAAPVVPPAAEAAAIPEVICSWWLKTVTNLIMYVKLVKALCADHNINLLTLVNGPLCKIDSEGNARKVVGCSCVVIKDYGEGTTS

SEQ ID NO: 39807 - protein, 447 aa, Cryptococcus neoformans var. neoformans JEC21
MREIVHLQTGQCGNQIGAKFWEVVSEEHGIQADGSYKGTTDTQLERINVYYNEAAAGKYVPRAVLIDLEPGTMDSIRGGPLGSLFRPDNFVFGQSGAGNNWAKGHYTEGAELVDSVLDVVRREAEGCDCLQGFQITHSLGGGTGAGMGTLLISKIREEFPDRMMCTFSVVPSPKVSDTVVEPYNATLSVHQLVENSDETFCIDNEALYDICLRTLKLSTPTYGDLNHLVSVVMSGVTTCLRFPGQLNSDLRKLAVNMVPFPRLHFFMVGFAPLTARGSASYRAVTVPELTQQMFDAKNMMAASDPRHGRYLTVACYYRGKVSMKEVEDQIQSVQAKNSAYFVEWIPGNISAAQCDIPPRGLKMSSTFICNSTSIQSLFKRIGEQFSAMYRRKAFVHWYTGEGMDELEFSEAESNLQDLVSEYMQYQEAGADDEIYGDEEIPIEEEEM

SEQ ID NO: 39808 - protein, 409 aa, Triticum aestivum
  misc_feature (408)..(408): Xaa can be any naturally occurring amino acid
  unsure (1)..(409): unsure at all Xaa locations
MNALAATSRNFKQAAKLLGLDSKLEKSLLIPFREIKVECTIPKDDGTLASYVGFRVQHDNARGPMKGGIRYHHEVDPDEVNALAQLMTWKTAVANIPYGGAKGGIGCSPGDLSISELERLTRVFTQKIHDLIGIHTDVPAPDMGTNAQTMAWILDEYSKFHGYSPAVVTGKPVDLGGSLGRDAATGRGVLFATEALLAEHGKGIAGQRFVIQGFGNVGSWAAQLITEAGGKVIAISDVTGAVKNSNGIDIAKLMKHSAENRGIKGFDGGDAVDPTSLLTEECDVLIPAALGGVINKDNADGIKAKYIIEAANHPTDPEADEILANKGVLILPDILANSGGVTVSYFKWVQNIQGFMWDEEKVNRELKTFMTRAFRDTKEMCPPHLSPLRMGAFTLGVNRVARATVLRXL

SEQ ID NO: 39809 - protein, 617 aa, Candidatus Blochmannia floridanus
MDHNPQSQLKLLVTRGKEQGYLTFSEVNDHLPEDIIDSDQLNNIIQMMNDMGIQVMEEAPDSDDFLLTENCGTSNNDEEDATEAAVQALSHVDTDLGRTTDPVRMYMKEMGAVELLTREGEIDIAKRIEDGIHQVQCSVAEYPEAITYLLEQYKRVKTGEVRLSDLVTGFVELNLEHDTLSTKTIHDGYITPEIINSPIIIDDEENTENDDDNNVDPELARKKFTDLQKQYEKTRITIKYNGRDHHQSLLEILKLSEVFKQFRLVPKQFDYLVNNMRSMMDRIRLQERLIMKLCVDVSQMPKKKFINLFSGNETSKDWLNKALSLNTSWSQKLHNVDSKIQQSLYQLHQIEKETGLTIEQIKNINKRMAIGEAKAKRAKKEMVEANLRLVISIAKKYTNRGLQFLDLIQEGNIGLMKAVDKFEYRRGYKFSTYATWWIRQAITRSIADQARTIRIPVHMIETINKLNRVSRQILQETGCEPTPEELAERMFMSEDKIRKVLKIAKEPVSMETPIGDDEDSHLGDFIEDTNLDLPLDSATSDNLRAATNDVLSGLTPREAKVLRMRFGIDMNTDHTLEEVGKQFDVTRERIRQIEAKALRKLRHPSRSEILKSFLDDD

SEQ ID NO: 39810 - protein, 294 aa, Ustilago maydis 521
MTRFPTLAPIRLVLLDAFDTLVTPRSAPHLQYAAVAREHGLRVADNDVKAAFKQAFRTTSIQHPNYGLETNIASPDEWWRLVIQRTFAAGLHPHVTTDQYSDSIESLCQRLVTRFSTSEAYHLFNDVLPTLQQLSQLRLGNHAAITLALATNSDSRILSVLKSFNLDRVLQLDHHATTAPPTLSYLEKCAKPHAHFFHAAIRRASSSSNTIEPAHVLYVGDQLHEDFWGATDAGLQAAWLQRPSTIQSNQPYEQISRNRDSQSERDHVTASTITSLSNLIDIVRQSHTRAQESR

SEQ ID NO: 39811 - protein, 1086 aa, Cryptococcus neoformans var. neoformans JEC21
MASNDPKAKVILQSIATEKRNIEGARAVIRAFEASSKNETVIQQAQNEIRTATMSIKFLEDELAKLQVGGSGGASGTPGRGEPSGGTGAGVPGKQGPQGVVASSPGGRGMAGDRERPLPPPPPGAEQDSAKKPETKNYSQLDLLRYDAPLTGAKITRMLNQLQFKLQVEEQYKTGIEKMAQAYRAEGDKRLKSETDAKKSESEGKIQLLRKAKKRYESLAKFGGAVEDDEDLMSDGKRKEALRKPISGKLVISLRSARDLNHRALPRRSSKTYSETTVVIKVEGNERAVSHPSRNDKWHEDFHIPVEKANEVEITIYDTVAPGDSAPIGMLWLRVSDLVEALRRQKVGIEGQGAGWVTAATAATMGPRSSGNAPDSVTLHSAGTLRGKPDAEGKGPDGIDGWWSVEPAGAISLRMDFVKDTVAGARRPYEALGRQGAVRMRKGDVYEMNGHKFVQRQFYQPIMCALCQEFLLTGEGYQCEDCRYACHKKCYPKVVTKCISKSNADGEGDEEKINHRIPHRFTPYTNMSANWCCHCGYMLPFGRKNAVKCSECALTCHQTCSHLVPDFCGMTMEMANLLLKNLRDIKTTQHRKPVPSTSTSSSVSTLPSYHSQESRSHPVQSAAPQQPAPSSRPPAGALPSTDQRPIQPQVQNQQTGAYDNLRPAGGRAMPQLPPVAVPSNKISFEGDRLQEPHGQIPPVMPAAQPQPQTLPPSAQSVQSPVKPQYVPQPAVQQQVAQRLPPQQPLMARKRKVGLDDFNFLAVLGKGNFGKVMLAEEKTSSNLYAIKVLKKEFIIENDEVESTQSEKRVFLAAAQERHPFLLGLHSCFQTETRVYFVMEYISGGDLMLHIQKKQFTLRQAKFYACEVLLALQYFHSKGIIYRDLKLDNILLTLDGHVKVADYGLCKEEMWFGKTTSTFCGTPEFMAPEILLEQRYGRAVDWWAFGVLTYEMLLGQSPFRGEDEDEIFDAILEDEPLYPITMPRDAVSLLQRLLTRDPTRRLGAGEGDAEEIKQHLFFRDVNFDDVYHKRIPPPYFPVIGNATDTSNFDQEFTREQPTLTPVHTQLSEADQKEFAGFSWIAPWAAAQT

SEQ ID NO: 39812 - protein, 191 aa, Yarrowia lipolytica
MQTIKCVVVGDGAVGKTCLLISYTTNKFPSEYVPTVFDNYAVTVMIGDEPYTLGLFDTAGQEDYDRLRPLCYPQTDVFLVCFSVTSPASFENVKEKWFPEVHHHCPGVPCLIVGTQVDPRSDRMILDKLSRHKLRPMTTEQGYQLARELGAVKYVECSALTQKGLKDVFDEAIVAALEPPVVKKNKKCIVL

SEQ ID NO: 39813 - protein, 136 aa, Conocephalum supradecompositum
MARTKQTARKSTGGKAPRKQLASKAARKSAPSTGGVKKPHRYKPGTVALREIRRYQKSTELLIRKLPFQRLVREIAQDFKSDLRFQSSAIGALQESVESYLVSLFEDTNLCAIHAKRVTIRSKDIQLARRLRGERN

SEQ ID NO: 39814 - protein, 136 aa, Conocephalum supradecompositum
MARTKQTARKSTGGKVPRKQLASKAARKSAPSTGGVKKPHRYKPGTVALREIRRYQKSTELLIRKLPFQRLVREIAQDFKSDLRFQSSAIGALQESVESYLVSLFEDTNLCAIHAKRVTIQSKDIQLARRLRGERN

SEQ ID NO: 39815 - protein, 706 aa, Pseudomonas tolaasii
MAQLKDGNLETCLAPLGSQELDQLASGINRMAETLQNAQEELQHSIDQATEDVRQNLETIEIQNIELDLARKEALEASRIKSEFLANMSHEIRTPLNGILGFTHLLQKSELSPRHVDYLGTIEKSADNLLGIINEILDFSKIEAGKLVLDSVPFNLRDLLQDTLTILAPAAHAKQLELVSLVYRDTPLAVVGDPLRLKQILTNLISNAIKFTREGTIVARAMVEDEEEDSVQLRISVQDTGIGLSNQDVRALFQAFSQADNSLSRQPGGTGLGLVISKRLIEQMGGEIGVDSTPGEGSEFWISLNLPKTRDDVDDLPSAPLLGRRVAVLENHDVARQALQHQLEDCGLEVTPFNTLESLTNGITSTHQTEQAIDLAVLGVTANDIPPERLNQHLWDLEHLGCKVLVLCPTTEQMLFNQSVPNPNSQLQAKTPCTRKLRRALADLISPPVAQRTREPLSSRAPRVLCVDDNPANLLLVQTLLEDMGAKVLAVESGYAAIDAVKQETFDLVLMDVQMPGMDRRQSTEAIRQWESERHGTPLPVVALTAHAMANEKRALLQSGMDDYLTKPISERQLAQVVLKWTGLALRNQGPERGNDNLGHGVQLLVLDHEEGLRAAANKADLAADMLAMLLASLEADRLAITVAREAKDNNALIERIHRLHGATRYCGVAELRAACQRAETLLKQDDAQGHGALDELDMAIGAAGQ

SEQ ID NO: 39816 - protein, 445 aa, Lactuca sativa
MAIEIVQPSVGLSKIAVSETHGEDSPYFAGWKAYDENPYDEVHNPTGVIQMGLAENQVSFDLLEEYLEANLEASNWGQKVSGFRENALFQDYHGLQSFRKAMASFMEQVRGGKAKFNPDRVVLTAGATAANELLTFILADPGDALLVPTPYYPGFDRDLRWRTGVQIVPIHCESSNNFQITPEALEAAYDHARAMNIKVRGVLITNPSNPLGATIQRKVLEEILDFVTRKNIHLVSDEIYSGSAFYADEFVSIAEVLESRDYKDAERCHIVYSLSKDLGLPGFRVGTVYSYNDQVVTTARRMSSFTLISSQTQFLLASMLSDKEFTQKYIKINRERLKKRYEMIINGLRKAGIECLEGNAGLFCWMNLSPYLEDATINSEIAIWKTIMHEVRLNISPGSSCHCSEPGWFRVCFANMSEETLDVALSRIHEFIERRKQDRQMVCIQ

SEQ ID NO: 39817 - protein, 327 aa, Yersinia pestis CO92
MAKHIQFTTTGGPDVLQYLEFTPSDPAPHEVQVENKAIGINYIDTYVRSGLYPPAHLPSGLGTEAAGIVSKVGAAVSSVKVGDRVVYAQSALGAYSEVHNVPADKIALLPEQISFEQAAASFLKGLTAYYLLRQTHEIKPGEVFLFHAAAGGVGLIACQWAKALGAKLIGTVGSDEKAQLAKAAGAWATINYRTENIAQRVAELTEGEKVGVVYDSVGKSTWEASLDSLKRRGLLVSFGNASGPVTGVNLGILNQKGGIYVTRPSLNVYVANRQELESASQQLFSMITSGAINVDVAQAQQFPLRDAQRAHETLEGRQTTGSSLLIP

SEQ ID NO: 39818 - protein, 386 aa, Staphylococcus aureus subsp. aureus MSSA476
MYYHQPLLLTPGPTPVPDAIMREIQAPMVGHRSKDFEDIAQQAFQGLKPIFGSQNDVLILTSSGTSVLEASMLNIVNPEDHFVVIVSGAFGNRFKQIAQTYYKNVHIYDVTWGEAVDVKDFINFLSTLNVEVKAVFSQYCETSTTVLHPIHELGNAINQFNSNIYFVVDGVSCIGAVDVDINKDKIDVLVSGSQKAIMLPPGLAFVAYSHRAKERFKEVTTPKFYLDLNKYISSQADNSTPFTPNVSLFRGVNAYVETVKAEGFNHVIARHYAIRNALRSALKALDLTLLVNDKDASPTVTAFKPNTNDEVKIIKDELKNRFKITIAGGQGHLKGQILRIGHMGKISPFDILSVVSALEIILTEHRKVNYIGKGISKYMEVIHEAI

SEQ ID NO: 39819 - protein, 136 aa, Conocephalum supradecompositum
MARTKQTARKSTGGNAPRKQLASKAARKSAPSTGGVKKPHRYKPGTVALREIRRYQKSTELLIRKLPFQRLVREIAQDFKSDLRFQSSAIGALQESVESYLVSLFEDTNLCAIHAKRVTIQSKDIQLARRLRGERN

SEQ ID NO: 39820 - protein, 235 aa, Neurospora crassa
MPFPAAAAARVRLSHVTRPVTALTNPRQWQASLGPHPAKPTNWWVNLRTQKRLASSVLGVGQRKIWLDPNEVSEISNANSRQTIRKLVADGLIIKKPVTMHSRSRARELNLARRIGRHRGFGKRKGTADARMPEQVLWMRRQRVLRRLLVKYRASGKIDKHLYHELYHLAKGNTFKHKRALVEHIHRAKAEKAREKAIKEEMDAKRARTKAARERKLERQAAKRNALAGEEEESK

SEQ ID NO: 39821 - protein, 738 aa, Nicotiana tabacum
MDCNCFDPQWPADELLMKYQYISDFFIAVAYFSIPIELVYFVQKSAVFPYRWVLVQFGAFIVLCGATHLINLWTSTAHTRTLAIVMTTAKVLTAVVSCATALMLVHIIPDLLSVKTRELFLKNKAAELDREMGLIRTQEETGRYVRMLTHEIRSTLDRHTILKTTLVELGRTLALEECALWMPTPPGLELQLSYTLRHQNPIGFTVPIQLPVINQVFGTNRAVKISPNSPVARLRPAGKYMPGEVVAVRVPLLHLSNFQINDWPELSTKRYALMVLMLPSGSARQWHVHELELVEVVADQVAVALSHAAILEESMRARDLLMEQNVALDLARREAEMAVRARNDFLAVMNHEMRTPMHAIIALSSLLQETELTPEQRLMVETILKSSNLLATLINDVLDLSRLEDGSLQLDVGTFNLHVLFRKVLNLIKPIASVKNCLSRLTCLQICPEFAIGDEKRLMQILLNVVGNAVKFSKEGSVSISAVAAKSESLSDPRAPEFFPVQSENHFYLRVQVKDTGSGINPQDIPKLFCKFAQNQALATKSSGGTGLGLAISKRFVNLMEGHIWIESEGLGKGSTAIFIVKLGIPGRSNEPKLPFMPRLPANHMQMTFQGLKVLIMDDNGFSRMVTKGLLVHLGCDVTTVSSGDECLRVLTQEHKVVFMDVSIPGIDCYEVAVQIHEKFGKHHNRPLIVALTGNTDRVTKENCMRVGMDGVILKPVSVDKMRSVLSELLEHGVILQS

SEQ ID NO: 39822 - protein, 136 aa, Conocephalum supradecompositum
MARTKQTARKSTGGKAPGKQLASKAARKSAPSTGGVKKPHRYKPGTVALREIRRYQKSTELLIRKLPFQRLVREIAQDFKSDLRFQSSAIGALQESVESYLVSLFEDTNLCAIHAKRVTIQSKDIQLARRLRGERN

SEQ ID NO: 39823 - protein, 424 aa, Staphylococcus aureus subsp. aureus MSSA476
MSDFNHTDHSTTNHSQTPRYRRPKFPWFKTVIVALIAGIIGALLVLGIGKVLNSTILNKDGSTVQTTNNKGGNQLDGQSKKFGTVHEMIKSVSPTIVGVINMQKASSVDDLLKGKSSKPSEAGVGSGVIYQINNNSAYIVTNNHVIDGANEIRVQLHNKKQVKAKLVGKDAVTDIAVLKIENTKGIKAIQFANSSKVQTGDSVFAMGNPLGLQFANSVTSGIISASERTIDAETTGGNTKVSVLQTDAAINPGNSGGALVDINGNLVGINSMKIAATQVEGIGFAIPSNEVKVTIEQLVKHGKIDRPSIGIGLINLKDIPEEEREQLHTDREDGIYVAKADSDIDLKKGDIITEIDGKKIKDDVDLRSYLYENKKPGESVTVTVIRDGKTKEVKVKLKQQKEQPKRQSRSERQSPGQGDRDFFR

SEQ ID NO: 39824 - protein, 741 aa, Malus x domestica
MLACNCIEPQWPADELLMKYQYISDFFIALAYFSIPLELIYFVKKSAVFPYRWVLVQFGAFIVLCGATHLINLWTFSIHSRTVAMVMTTAKVLTAVVSCATALMLVHIIPDLLSVKTRELFLKNKAAELDREMGLIRTQEETGRHVRMLTHEIRSTLDRHTILKTTLVELGRTLALEECALWMPTRTGLELQLSYTLRQQNPVGYTVPIHLPVINQVFSSNRAVKISANSPVAKLRQLAGRHIPGEVVAVRVPLLHLSNFQINDWPELSTKRYALMVLMLPSDSARQWHVHELELVEVVADQVAVALSHAAILEESMRARDLLMEQNIALDLARREAETAIRARNDFLAVMNHEMRTPMHAIIALSSLLQETELTAEQRLMVETILRSSNLLATLINDVLDLSRLEDGSLQLEIATFNLHSVFREVHNMIKPVASIKRLSVTLNIAADLPMYAIGDEKRLMQTILNVVGNAVKFSKEGSISITAFVAKSESLRDFRAPDFFPVQSDNHFYLRVQVKDSGSGINPQDIPKLFTKFAQTQALATRNSGGSGLGLAICKRFVNLMEGHIWIESEGLGKGCTATFIVKLGFPERSNESKLPFAPKLQANHVQTNFPGLKVLVMDDNGVSRSVTKGLLAHLGCDVTAVSLIDELLHVISQEHKVVFMDVSMPGIDGYELAVRIHEKFTKRHERPVLVALTGSIDKITKENCMRVGVDGVILKPVSVDKMRSVLSELLEHRVLFEAM

SEQ ID NO: 39825 - protein, 497 aa, Arabidopsis thaliana
MEISVSSVTFSLAVVVVSWWVWRTLKWVWFTPKMLERSLRRQGLSGTSYTPLIGDFKKMISMFIEATSKPIKPTDDITPRVMPHPLQMLKTHGRTNLTWFGPIPTITIMDPEQIKEVFNKVYDFQKAHTFPLSKILGTGLVSYDGDKWAQHRRIINPAFHLEKIKNMVHVFHESCSELVGEWDKLVSDKGSSCEVDVWPGLTSMTADVISRTAFGSSYREGHRIFELQAELAHYLPTKGNRRMKTAAREIQDILRGIINKRERARESGEAPSEDLLGILLESNLGQTEGNGMSTEDMMEECKLFYLAGQETTSVLLVWTMVLLSQHQDWQARAREEVKQVFAHTPPDTEGLITLKVTPMILHQVLSLYPPVVQLTRAILKQMKLGDLTLPVGVQISLPVLLVHRDTELWANDAGEFKPERFKDGLSKATKNQVSFFPFAWGPRICIGQNFTLLEAKMAMSLILQRFSFELSPSYVHAPYTIITLYPQFGAHLMLHKL

SEQ ID NO: 39826 - protein, 255 aa, uncultured bacterium 439
MKIATISLNIAWQDIEKNLERTEKFVRQAKADGCDVVVLPEVFNTGFIADVGKYAELPNCKTHHALQQFALNNLINIVAGASEKQPNEKAHNIALVFDSHGNEVAKYSKLHPFNYANEGKYFTSGNETIKFELDGVACSVFICYDLRFPEIFRQIAEEVEVIFVIANWPHTREMHWQNLLIARAIENQCFIVGVNRIGNDGVGLKYNGSSMVINPLGEVLLQTDKKTEYASCDIDTLMVSKTRKDFPFLEDIRFI

SEQ ID NO: 39827 - protein, 472 aa, Arabidopsis thaliana
MVFFRSVSAFTRLRSRVQGQQSSLSNSVRWIQMQSSTDLDLKSQLQELIPEHKDRLKKLKSEHGKVQLGNITVDMVIGGMRGMTGLLWETSLLDPEEVFALGDCRLPECQKALLPTAQSGGLNHYRRSFVASLNWKGTLAKSKLKHCRKTWNRAAVSDYVYNAIDALPSTAHPMTQFASGVMALQVQSEFQKAYENGIHKSKFWEPTYEDCLNLIARVPVVAAYVYRRMYKNGDSIPSDKSLDYGANFSHMLGFDDERLKELMRLTSPSTVMHEGGNVSAHTGHLVGSALSDPYLSFAAALNGLAGPLHGLANQEVLLWIKSVVEECGEDISKEQLKEYVWKTLNSGKVIPGYGHGVLRNTDPRYVCQREFALKHHPDDPLFQCCKLMKLASCLTELESEEPWPNVDAHSGVLLNHYGLTEARYYTVLFGVSRSLGICSQLIWDRELLLALERPKSVTMDWLEAHCKKASSA

SEQ ID NO: 39828 - protein, 279 aa, Polaromonas sp. JS666
MSTVASLTDCAYRIRRYALRMGEVQGQGYIGQALGLADALAVAYGHALNYRPEDPQWEGRDRFLLSHGHYAIAHYAALIEAGVLPEEELETYGSDDSRLPMSGMAAYTPGMEMSGGSLGQGLVIAVGMALGLRLKRNPAFVYNSMSDGELDEGSTWEAAMSAAHHGLSNLICMVDINNQQADGSSGQVLRFEPIADKWAAFGWHVQRVNGNDLGAVLAAFDAARRYDLPQPRVILLDTLMGKGVPFLEQREKNHFIRVDPPEWQQAIAILDAQHAGASE

SEQ ID NO: 39829 - protein, 192 aa, Triticum aestivum
MGLSVIAPPAGDSASPAHRRARRAFLVSNYMILGAASGCGFLTLSLRLVPSVDGFLLILLHALTVAAAVAGCAVIAAPDPPRGRVYTAHMSATVVVSILQGAAAVLAFSRTAEFLAYGLRSYVREEDGAIILRMIGGLGIAIFCLEWVALALAFVLRYYAYVDRECGGNPMRRSAKVGGEDGAGNWPWPFQV

SEQ ID NO: 39830 - protein, 536 aa, Methanosarcina acetivorans C2A
MASKQIMFDENARKTLLTGVDKVANTVKITLGPKGRYVVLDKSTKPVVTNDGVTIAKEIELHDKFENMGAKLVKEVASRTQDNTGDGTTTATLLAQSMIREGLKNISAGANPIEVKKGIEFATEKVVEYLKNKSVEVKGKDKIIQVATVSANNDEEIGNLITDAMERVGYNGVITVEDSKTMETSLDVVEGMQFDRGFVSPYMALDTEKMNCEFEDPYILITDKKINSMKQIVPVLEKVASEGRSLLIIAEDVDGDAQAALILNIIRGSLRVCAVKAPGFGNERKEMLEDIAVLTGGQVISEEKGMKLEEFSDYMLGSARKVTVDNNKTIIVEGRGDKEKIEERVRIIEAQVNIAEADYRKTELKKRQAKLGGGVAVIKVGAATETELKEKKMRIDDALNATKAAVEEGVVTGGGVSLFRAAATLDSLSLGGDRQVGVKIVQRSIEDPVRQIAANAGREGAEVVATIRAESSERFGYNAKRDVFEDLFEAGVIDPTKVVRSGLQNAASIAGMVLTTEALVTDFDEEKDDRTAAIII

SEQ ID NO: 39831 - protein, 450 aa, Eleusine indica
MREIISIHIGQAGIQVGNACWELYCLEHGIEPDGTMPSDTSVGVAHDAFNTFFSETGSGKHVPRAIFVDLEPTVIDEVRTGSYRQLFHPEQLISGKEDAANNFARGHYTVGKEIVDLCLDRVRKLADNCTGLQGFLVFNAVGGGTGSGLGSLLLERLSVDYGKKSKLGFTIYPSPQVSTAVVEPYNSVLSTHSLLEHTDVAVLLDNEAIYDICRRSLDIERPTYTNLNRLISQIISSLTTSLRFDGAINVDVTEFQTNLVPYPRIHFMLSSYAPVISAEKAYHEQLSVPEITNAVFEPSSMMAKCDPRHGKYMACCLMYRGDVVPKDVNAAVATIKTKRTVQFVDWCPTGFKCGINYQPPSVVPGGDLAKVQRAVCMISNNTAVAEVFSRIDHKFDLMYAKRAFVHWYVGEGMEEGEFSEAREDLAALEKDYEEVGAEGADDEGDEGEDY

SEQ ID NO: 39832 - protein, 413 aa, Vibrio vulnificus YJ016
MSKRRVVVTGMGMLSPVGNTVAESWKSLLEGKSGIVNIEHFDATNFSTRFAGLVKDFNCEEYMSKKDARKMDLFIQYGIAAGIQALDDSGLEITDENAHRVGVAIGSGIGGLDLIEAGHTALVEKGPRKVSPFFVPSTIVNMVAGNLSIMRGMRGPNIAISTACTTGLHNIGHAARMIAYGDADAMVAGGAEKASTPLGMAGFGAAKALSTRNDEPQKASRPWDKDRDGFVLGDGAGIMVLEEYEHAKARGAKIYAELVGFGMSGDAYHMTSPSEDGSGGALAMEAAMRDAGIVGTQVGYVNAHGTSTPAGDVAEIKGVKRALGEEGAKQVKVSSTKSMTGHLLGAAGSVEAIITVLSLVDQIVPPTINLDNPEEGLDIDLVPHTAKKVDMEYAICNSFGFGGTNGSLVFKKI

SEQ ID NO: 39833 - protein, 282 aa, Perilla frutescens var. crispa
GSWRSLPKLAGLLRCGKSCRLPWTNYLRPDIKRGPFSTEEEKLVIQLHGILGNRWAAIASQLPGRTDNEIKNLWNTHLKKRLLLMGIDPHTHEPSLTSNGLLTRPPSSPSTRHMAQWESPRLDAEARLSKESLLSIHAPLPKSEADHFLRLSNSEVGETFRKIKNGEKAEPPSPSQSPGSSASTKCCSFSGTTTEIGLQSGLHETDCKSSKTCTEYVRTGTDSSSSNEMEDSSESTLQLLLDFPCKNDMSFLGNADCYSLYPGFTNGSLYDSSSQEKKGGFV

SEQ ID NO: 39834 - protein, 444 aa, Phytophthora cinnamomi
MRELVHIQGGQCGNQIGAKFWEVISDEHGVDPTGSYHGDSDLQLERINVYYNEATGGRYVPRAILMDLEPGTMDSVRAGPYGQLFRPDNFVFGQTGAGNNWAKGHYTEGAELIDSVLDVVRKEAESCDCLQGFQITHSLGGGTGSGMGTLLISKIREEYPDRIMCTYSVCPSPKVSDTVVEPYNATLSVHQLVENADEVMCLDNEALYDICFRTLKLTNPTYGDLNHLVCAAMSGITTCLRFPGQLNSVLKLFAVNLIPFPRLHFFMIGFAPLTSRGSQQYRALTVPELTQQQFDAKNMMCAADPRHGRYLTAACMFRGRMSTKEVDEQMLNVQNKNSSYFVEWIPNNIKASVCDIPPQGLKMSTTFIGNSTAIQEMFKRVSEQFTAMFRRKAFLHWYTGEGMDEMEFTEAESNMNDLVSEYQQYQDGTAEEEGEFDEDEEWMR

SEQ ID NO: 39835 - protein, 1390 aa, Cryptococcus neoformans var. neoformans JEC21
MSLPDAYPPVIATEGSTAFQSHILSLLSVISQHPSPDYPFPSSGDSTLQDNASVTAKKNATLSTFPGKKTPAEDAIERAIIALGDRVWTSERTQAHLVKDVKRDVPAQPGSDLLTPDWTPPVPTLNDSSPDPVCPTCTRPVSSSETSSFTPQQIASFYHPFTAALSTPPPPLPEQMFFPQSVLAAYVSATSDSESAGDSGMSAEKELELLKAQVQDIARVCKAVATGDLTQKIIVPVKGQTMTELKNIINAMVDRLQTFAVEVERVSLEVGTEGKLGGQAVVPNVEGTWKVLTAVVNKLAANLTNQVRSIAKVTKAVAKGDLSETIDVEASGEIAELKTTVNGMVMSLRTLADEVSRVSLEVGSQGKLGGQANVPDVEGVWKDLTVNVNRMCESLTTQVRSIGSVTTAVARGDLSKMIEIEAEGEMAVLKNTVNSMVRQLTVFAKEVTRVALEVGTHGQLGGQAVVPGVEGVWDDLTTNVNKMARNLTDQVREIAMVTKAVARGDLSKTVNADVQGEILDLKCTVNEMLTNMPCKVAQLTVFAAEVTRVSLEVGTEGKLGGQAVVPNVEGTWMVLTDNVNLMALNLTTQVRSVAEVTTAVAAGDLSKKINVAAFGEILELKNTVNNMVDSLRSFSSEVTRVAREVGTDGRLGGQAKVPGVAGTWKDLTDCVNIMAANLTEQVRTIAHATTAVARGDLTQKVVGVKVSGEILDLVNTINNMIDQLAIFAAEVTRVAREVGTEGKLGVQAEVENIEGTWQEITSNVNTMASNLTSQVRAFAQISAAATDGDFTRFITVEASGEMDSLKTKINQMVYNLRESIEKNTKARQEAEMANRSKSEFLANMSHEIRTPMNGIIGMTVLTLESELTRQQRENLMIVSSLAGSLLTIIDDILDISKIEAGRMTMEQIPFSLRVAVFSVLKTLCVKAAQNKLDLIFDVDPTMPDQLIGDPLRLRQVITNLIGNAVKFTTKGQVALSCRVKRYVTVADAVELEFCVADTGIGIKQDKLDVIFDTFAQADGSTTRKYGGTGLGLTISKRLVNLMSGDLWVESEYGQGSRFYFTTVAEMTSVPRDQIIERLSPWSGRSVLFIDTLGDQTGIVEMLQELGLKPIVIHSVNDVYLLQDQGLTVFDTMIVDSLKAAGELRGIEYLRYIPIVLLAPSNKPSGPSNPSFISLPESRRRLLALPSASEQLLSPIPVKDCLEMGINTYYTTPLSLQELSNAIVPALESHQIQPGDTVKDTILSVLLAEDNLVNQKLAVKLMEVAGHKIEVADNGEIALEKYKRRQLARTPFDVILMDVSMPVMGGMEATGLIREFEANEGVPRTPIIALTAHAMIGDKERCLAAGMDEYVTKPLRRGDLLASIAKVLAPKQSASGLEMPAVPIPANIYGR

SEQ ID NO: 39836 - protein, 1122 aa, Arabidopsis thaliana
MVVQAGYIVSDCDSLGILYGSQHYTKTPEEAAAKSILAGLDLNCGSFLGNHTENAVKKGLIDEAAINKAISNNFATLMRLGFFDGNPKNQPYGGLGPKDVCTVENRELAVETARQGIVLLKNSAGSLPLSPSAIKTLAVIGPNANVTKTMIGNYEGVACKYTTPLQGLERTVLTTKYHRGCFNVTCTEADLDSAKTLAASADATVLVMGADQTIEKETLDRIDLNLPGKQQELVTQVAKAARGPVVLVIMSGGGFDITFAKNDEKITSIMWVGYPGEAGGIAIADVIFGRHNPSGKLPMTWYPQSYVEKVPMTNMNMRPDKSNGYLGRTYRFYIGETVYAFGDGLSYTNFSHQLIKAPKFVSLNLDESQSCRSPECQSLDAIGPHCEKAVGERSDFEVQLKVRNVGDREGTETVFLFTTPPEVHGSPRKQLLGFEKIRLGKKEETVVRFKVDVCKDLGVVDEIGKRKLALGHHLLHALGLSSEESEMSPDGELVPVDSSAVVTAKRKTSQLSRSWISIDATGQKTVLDVDKHVIMHRVQIHARDLRILDPNLFYPSAILGRERAIVLNLEHIKAIITAEEVRIISYWLVAKYSSDENVIPVLEEFQRRLPVGNEAHGVHGDGDLGEEDESPFEFRALEVALEAICSFLAARTTELEKFAYPALDELTLKISSRNLERVRKLKSAMTRLTARVQKVRDELEQLLDDDGDMADLYLTRKLVGASSSVSVSDEPIWYPTSPTIGSMISRASRVSLVTVRGDDETDVEELEMLLEAYFMQIDSTLNKLTELREYIDDTEDYINIQAIITVYLQLDNHRNQLIQLELMLSAGTVCVSVYSMIAGIFGMNIPNTWNHDHGYIFKWVPPEKNMIILIRILDGQLDLSLFRRSLFSPLVFVSPLILCLEQSQIHQIKLKMDTSRDDDFTFSKVSPPDSEVKDLASDVGSITLKDGLDQQKSNGLIWKDKSLPPKEETIGSLSFTVTDSSSSKKQSNESSETFKTPARKPITRTKVPFEKGYSQMDWLKLTRTHPDLAGLKGESNKRLIPMDEVKKHRTGDSMWTVLKGRVYNISPYMNFHPGGVDMLMKAVGRDGTLLFNKYHAWVNVDILLEKCLVGVLDDTKVKKQEP

SEQ ID NO: 39837 - protein, 97 aa, Candidatus Blochmannia floridanus
MKIRPLHDRVIVKRKEVESKSSGGIVLTGSAAGKSTRGEVLAVGHGRVLENGGIKALDVRVGDTIIFNDGYGVKVEKIDNEEVLIMSENDILAIVEK

SEQ ID NO: 39838 - protein, 490 aa, Colwellia psychrerythraea 34H
MQEHQELGLQDNQLVRSFSYINGRWHSSDSYISVTNPANGKVIAQVSNAGVVETELAVKAAKDALKMWSAKSANERATLMRNWFNLIMENQDDLGRILTLEQGKPLAEAKGEIGYGAAFIEWFAEEGKRVYGDTIPAPSGDKRIIVIKQPVGVVASVTPWNFPNAMIARKAAAALSAGCTFVVRPATQTPLSALAMAELAERAGIPAGVFNVVVGEDAHGIGKVLTQHPDIAKFTFTGSTPVGKALISQCATSVKKVSMELGGNAPFIVFDDADIDAAVQGALVSKYRNAGQTCVCTNRIFVQKGVIEQFTKKFTSAVAALAIGDGLTDGVSIGPMISSDAVCDVELLVKDSITAGAILALGGERDQAGDAFYQPTILTNVTNDMPIAKNEIFGPVTPIISFEDEDEVIAMANDTEYGLASYFYARDIGRIWRVAEGLEYGMVGINEGMISNAAAPFGGVKQSGNGREGSKYGLDDYLEIKYLCMGGLGK

SEQ ID NO: 39839 - protein, 136 aa, Conocephalum supradecompositum
MARTKQTARKSTGGKAPRKQLASKAARKSAPSTGGVKKPHRYKPGTVALREIRRYQKSTELLIRKLPFQRLVREIAQDFKSDLRFQSSAIGALQESVESYLVSLFEETNLCAIHAKRVTIQSKEIQLARRLRRERN

SEQ ID NO: 39840 - protein, 136 aa, Conocephalum supradecompositum
MARTKQTARKSTGGKAPRKQLASKAARKSAPSTGGVKKPHRYKPGTVALREIRRYQKSTELLIRKLPFQRLVREIAQDFKSDLRFQSSAIGALQESVESYLVSPFEDTNLCAIHAKRVTIQSKDIQLARRLRGERN

SEQ ID NO: 39841 - protein, 261 aa, Zea mays
AIGYLEAGRGLRPTAQPLCVRALSHTVCDDCVGGWVGYRRRPSPGADLLTPLTLLSRLPCENVPPRRTMGRPSRGRQRIEIRRIEEGGRLHVTFSKRKSGLQKKAAELSLLCGSPVAVVVFSPGRKVFALGAPSVDHVLRRHAPPIPGEGEEDGLLPTLQDGDVVMSSSAIADRAELENIVRRTEETKARSVAEKARMDAVGKAVRQAAAKAGRRFWWEADSGELGDAELPGFAKALRRLSQVNLQRHLDSLSASANKQLQ

SEQ ID NO: 39842 - protein, 385 aa, Methanosarcina mazei Go1
MEVIVVGGFLGSGKTTTIINMGKYLADKGKKVAIIVNEIGEIGIDGDVIKRFGFDTKEITSGCICCTLKVGLRATMSTLVKEYKPDIIMIEPTGIAFPNVIKTEVELMNLGEEVKVAPLVTLIDGSRFKHLMKEVKEFAMRQIIDAEILGINKVDLIEPIRIPILETSVQQLNPEAKVVLLSGKDTGERFEKFMQVVLPDIREAPKKIQETATAENTSSITGPQETEDSIKASGVGSYAAEFEIKEGGNLNTEEARKLTTELMNIIKGKVLELNPEFVGHIKLFLDNGTETVKQSVTIYNEEPQEDVIKSKDGAFPTFKILSAVSNVDKEALKDAVNSSVKETFEKKGINAHKTEHGHKHEGHAHNEHKHEGHIQRIGSIKGIKE

SEQ ID NO: 39843 - protein, 493 aa, Vibrio sp. Ex25
MQTINVVWLKRDLRLTDHQPLTQALSSKHPTVLLYIVEPLLLNNPHYSERHWRFVWQSLQDMNETLKAYGHRITVLFGDALACFQSIQMQYQINAVFSHQEIGLNCTFERDKQIADWLHEQNITWFEFEHGAVIRGAKDRQGWDKHWDLVMRSSISPLDLQTNLLHSLDAESLGCAFSPPSSWLSKCKGMQTGGSQLAWKTLEDFFNRRGRDYYRSISSPTASRTACTRLSPYLAWGNISLREVYQYLLKHWQVVGFRRSLIALSSRLHWHCHFIQKFESEYDMEFYCVNRAYESLIKQSSTFDEEKLAAWKSGYTGIPLIDACMRCLHQTGYINFRMRAMLVSFLTHHMNMDWRTGVTHLAQLFLDFEPGIHYPQFQMQAGVTGTNTIRIYNPVKQAQEHDPDGAFIYKWVPELQMVPTPLLFEPWTMTQMETVMYHLKPDSRYLAPIVDLNSAAKDARERLWAWRKRADVKQEGKRILTRHVRPSKESRAR

SEQ ID NO: 39844 - protein, 456 aa, Colwellia psychrerythraea 34H
MKNILFIIALALISILTVYAVAPKSTEYSTTNSTINSTNTQSDIEKMMPKSSNSTKEMPATTHLDSIVLGAGCFWGAEKRYQAIPGVVDAISGYADGKNVSASYREITQRKNKYNEDNHAEVVKVIFNSAKVSLETILQSYYEGHDPTQLNRQGNDIGTQYRSTILTSNEQQNDIAQKVTAQYQTLLNDAGYGNIATKISSLSKFFEAEQYHQDYLAKNPNGYCPDHSTGVKFDADASKPGLASQKIDNTPLLTGKHIIVIESENYCPYCEKFKKNVANDYKGSIAINFRLASQLKGLTIKTETWATPTIIFIEDGEEVFGKQGYMSPDYFYKALGAFKLGKSEAFNVAFDEGTDSRFCKEYEIFKNTPDGVFIDKLSGAPLFDTDDRFNSASGWLSFTKAVDGSVIEKPDNRYGMVRTEIRSKTSGIHLGHVFPDGPNGQPRFCINATVLEFKAR

SEQ ID NO: 39845 - protein, 77 aa, Wolbachia sp. wUnif
EEKQGGIVLPSSAEKKPTKGEVIAIGSGSRNSSGERIALTVKTGDKVFYRQWAGTEVEHDNEKYVVMKESDLLAVIK

SEQ ID NO: 39846 - protein, 795 aa, GIBBERELLA ZEAE PH-1
MPSVTDRRVYEDQIPPFMTVFDLDAETMADQDTVTLMDTKFVDIDSKRPGMMATSHQHGLAPSMMPVDSIHKHHDSTSTQTSESADSSPTTTLSTTDSSPLSDASPSSSPDSPMNLIPLNNFPATSFGTLGVNNMSMNYNANSSTMLSEPPRLQRPMTSPSPRRGRNMKGLSIQPPFAVSTATTNISLISEPASPSFIKPTIPAMRRKPSQLSLNTNTSDLNHKTTLEVPPSPAMPMLQRRALKHSCSSPHMSSGLKSATFGPPGGMTFPKVLERNESGLSEVLRPSKSTLKPTTIHSAITEEDSPIRTQMAFRDDDPYRDNENNEDMKTPGYPDGPIAIYGDNIFLYSEPTAEEAARFDVVINCAREVSNPFEINKATRRPMSIAEPDTAVSTASFMTAWEFPQGDDSAETPTTPKALQFQEPEYIHIPWDHNTDIAPDLMDLCHVVDDRTKAGKRVLIHCQQGASRSASLIIAYGLFQRPELTVNDAYYAAQAKSQWISPNMKLMYSLQDFQKEVSTKRTAQPSNRPRPGRKPSKHRLTLSANAIDIGPKEPQTAPLPTQGEDVQDSNLSSSPTRLRGNSTPGPRPVSPGPASAPPTCTWKDEIEQRPSDKLNPFKLGDLPKRPVSNHGNAPPTLAPPTLVLPTLAPSTLAPSPMMDSSMKPPPSPGFPSQSSFGFQSMTFPRFNPAPPEMKFNDSPFQRTIALPGSYPEDDALLSPRAETMTNNPLHDVPEVAGMRFVESPPTPGQGLFSPRAGMFPRDPFSTFGRPPVVADPRSPPTKGEAPIIRSIDDLL

SEQ ID NO: 39847 - protein, 241 aa, GIBBERELLA ZEAE PH-1
MGESRQELVAWLNSLLQLNITKVEQCGTGAALCQVFDSIYMDVPMSKVKFNVNSEYLYIQNFKVLQNTFAKHQIDKPIPVPSLIKCKMQDNLEFLQWTKRFWDLNFPDHEYDAVSRRKGGSMPPSAAAPKPVSATTGAARRGGSTPSGGPRVAKAAGPATAALQQENATLKETVVGLERERDFYFSKLRDIELLVQTAVDEDPELEKLEDGLVKQIQTILYSTEEGFEIPAEGEVDDQETF

SEQ ID NO: 39848 - protein, 775 aa, Magnetospirillum magnetotacticum MS-1
  misc_feature (618)..(618): Xaa can be any naturally occurring amino acid
  unsure (1)..(775): unsure at all Xaa locations
MTKTLHARPSAATDTTFAPPVITGTATEDALDILFHALLDVARRHDPELEDVLHGRADISSYSPEMLARALQVQGIWFQLVSIAEQNAAMRRRRHLERAKGRAALNGSFAKVLAEASAKGIGAAQIHALLKDLRIRPTITAHPTEGKRVTVLEKLRRIYLVLRELELPRWTERERNGLMNELRDQIELIWMTGELHLEKATVEREVAWGLHFFDETLFEMLPEVMVSLEESLAQYYPDETFEVPPFFQFGSWIGGDRDGNPYVTASVTRETLQRNALASLRRYRDGITHLGRVLSITERSLPVPESFRAELAHMLAESGDARAIAARNPGEAYRQFLTCVLRKLEATIARNKGARSVGPDYPSADGLINDLRTLEKGLADAKCGALATDIVRPVRRMVEIFRFSTVRLDLRENSTRTTKTLHALWKLRNGDREPPELDAPAWKEWLLTELARPRSPETSFEDFADRLPDEARETLATFALVGEMRDTLDREAFGAFILSMTRSTVDVLGAYLLAKEAGIFLDATGTEICPLPIVPLFETIDDLRAAPAIMKELLAIPVVRRSTRWQGGVQEVMIGYSDSNKDGGFIASNWELYKAQVLAHRARQASRRAGSPSSTVAXVPSAGAACRPIAASRPSRRARSTGASASPSRARSSRSNMPTAVPPPIRWSCWRPRSSSTPCSRRAAATALGPNSTTRWRRSRAPLGPPMSTCSRPTASSTTSRPRAPSTRSRCSTSARARPAVSARSRSRICGRSRGCSRGRRTATSSPAGTASVRG

SEQ ID NO: 39849 - protein, 261 aa, Magnetospirillum magnetotacticum MS-1
MPTHRGIAAQPPGSINGRFRITEQGEVVSFKYANRGTASYQMELLAASVFEHALLSEGSGNGSRAELDDALEALSGASRAAYVNLLQADGLVDYFQAASPLDEIALLNIGSRPARRFGAKSLSDLRAIPWVFAWSQNRHVITGWYGVGSGLKSFIDIRGEQGEALLRRLFKDCPVFRLVLDEVEKTLMMVDLEIARDYAGLVPDAGIRSRIFGMIEQEYALTREMVLRVSGDGELAQRFPQFRERLQGRLPTINQVSREQV

SEQ ID NO: 39850 - protein, 106 aa, Glycine max
  misc_feature (29)..(29): Xaa can be any naturally occurring amino acid
  misc_feature (49)..(49): Xaa can be any naturally occurring amino acid
  misc_feature (67)..(67): Xaa can be any naturally occurring amino acid
  misc_feature (71)..(71): Xaa can be any naturally occurring amino acid
  misc_feature (73)..(73): Xaa can be any naturally occurring amino acid
  unsure (1)..(106): unsure at all Xaa locations
VFDDKLGALCMQWLEDKVFSIRDAAANNXKRLAEEFGPEWAMQHIIPQXVLEKSTTPHYYTDDDLQXSPCXSXMGAEIHCQKCFKRHNSSKARFQQSCAKDYTVPC

SEQ ID NO: 39851 - protein, 449 aa, Oceanobacillus iheyensis HTE831
MHMYQTTTLKDKIKLFIIILLPILITQVSINLMSFFDTMMSGQFSARDLAGVAIGSSLWVPILTGINGIVLSITPIIAHLIGAKNKKDIPQVIQQGIYLSFVLSIIIIVIGGIALDPILQAMSLEKEVQRIAKYYLITLGTGIVPLFLFHTIRSFMDGLGQTRSSMIIILISLPINAVLNYILIFGKFGIPAFGGIGAGIATSLTYWIISGISIFMIHRVYPFHSYKVFQKILPPTLSYWADQLKIGLPIGLAIFFETSIFSAVTLLMSEYNTNTIAAHQAAMNFASLLYMLPLSVGMALTIAVGFEVGAKRLHDAKRYTYLGIMGGLFIAIFAGIILYTFDDVVARLYNSNPEVIELTKQFIIFAIFYQLADAIGAPIQGALRGYKDVNMTLVIALISYWIIGLPTGYLLANYTALEPFGYWVGIIVGLSTGAIALLARLLFIQKKSV

SEQ ID NO: 39852 - protein, 568 aa, Aspergillus parasiticus
MATQHKTQSSPVNAAWWKKASVYQIYPASFKDSNGDGIGDIPGIISELDYLKALGIDLVWLSPILQSPQVDMGYDVSDYYQIHPPYGTVEDVDALIQGLHQRGMRYVMDLVVNHTSDQHEWFKQSRSSSDNEYRDWYIWKKPKYDANGVRQPPNNWSAYFGGSAWQYDETTDEYYLHLFAPEQPDLNWENPKVRSAVHQIMRYWLDKGVSGFRMDVINMISKDQSFPDAPITDPKAQWQHGADVLLLRTTSSRIPARAGEGSEGIRCLFLGFDRGELAMAFQFEIMDIDHGPGGKFSPHKYRMSDLKHIVSKWQDFMYENEGWNALYLENHDQGRTISRFTSAGPEYRATAGKMLATFLGLQGGTPFVYQGQEIGLGNVPETWGIEQFRDIETLNYWNEIEREMAAYPNDTELHKVTLEQFRVKSRDNGRTPMQWTSGKFAGFTAAHNGPWIDVHDDYEDWNAASQVGNPNSVFQHWAKVLSLRKAHKRLFVYGSYKLIDEANNDLFTYLRVYGGQSALVLANFTGKEVSWVVPAETISILKNGAVLLESYQRHPSSATGWYNRCNAI

SEQ ID NO: 39853 - protein, 572 aa, uncultured bacterium 439
MGYRQFTQRLFPYIKSHIGKLAFTSLMMVFATALEASIPEITGQIIDTLFGVGRSNDEALLYSLTLFTVIALSSLFALTSVSASSWVSNKVIMDLRVDMFAKLLKLPKAYFDKNTTGGTLSKLTFDVEQISAAASTIWLDFIKSSLTVVLLTGYLFYKNYLLSLTLLVLLPLVYLAVKFSTTRMRSGSKKVQDSMGKMTHLLDENISGSDLVKIYHAQENEQSKFFKLINTIRQQRFKVDMAGGLNTSIVNILIGLSLACVVYLSSTYLTMSAGDFLAFFTAMGMLVKPAKTLININKPLQGAIVAAISVFTLIDEKTEVNDGNQILDHAKGDINFDNVSFSYDGEKSPLKNINLTIKRGETVALVGSTGSGKTTLVNLLARFYKPSNGKITIDEINIDEFELSSFRSNISFVDQHVRLFNDTVKGNIAFGQTDSMPLESIIHAAKVSNSVEFIEKLDDQFDTEIGEDGITLSGGQRQRLSIARAIAKDSPILILDEATSALDSATERLVQSAINKMQQGRTTIIIAHRLSTIQNADRIIVLKEGKIIEQGPHKELINASGEYAKLNRQQFQ

SEQ ID NO: 39854 - protein, 474 aa, Clostridium perfringens str. 13
MQKTKMIFTIGPSSDSEEILREFIRIGMNAARLNFSHGDHASHKEKIELIKRLRKEEKSATAILLDIKGPKIRTYNFKNGEAELKNGDEFTFSCGDEILGDNTKCSISYKELYEDIKPGGSILVDDGLLEFKVKEVRGTDIICEVIEGGTIKDHKGVNVPNVPIKLPAVTEKDRSDLIFGCEMEVDFVAASFIRKPEDVLEVREILDSHGGKDIKIISKIESQEGVDNIKEIIKVTDGVMVARGDMGVEIPIENVPIIQKNIIKKCNQAGKIVITATQMLDSMIRNPRPTRAEASDVCNAIFDGTDAIMLSGESASGSFPIEAAMTMSRIAKKAEANLDYNYLLRRLKDPNPNPDAFADAISYSASKTASKFPTKAIVAATQTGSTAKILSKYKPSCPIIAITPYEKVRRSLALNFGIISKKCAYFNSTDEIIEEARKVAKEFEIAETGDNIMVAAGFPTSITGGTNMLKIEKI

SEQ ID NO: 39855 - protein, 544 aa, uncultured bacterium 439
MTKYIFITGGVVSSLGKGIASASLASILENRGLNITLLKLDPYINVDPGTMSPFQHGEVFVTNDGAETDLDLGHYERFVRTQLGKKNNFTAGRVYENVIKRERKGDYLGATVQIIPHITDEIKRLTKEGAEGSDVALVEIGGTAGDIESLPFMEAIRQMSLELGRENTLFIHLTLVPYIKVAGELKTKPTQHSVKELRGIGIQPDILICRSEEPLADAERKKIALFTNVAENSVFVSLDQDSIYKIPEVLHEQGLDDIVVAKLGLDCKAADLTEWSNVISRLEMPKHSVDVAMVGKYMDLTESYKSLSEALIHAGIHTQTKVNIHYFDSEEIEKNSADCLSNMSAVLVPGGFGIRGIEGKVEAVRYARENNLPYLGICLGMQVAVIEFARHKANMKDANSTEFDQNTPFPVIGLITEWQDENGDTQKRNSDSHLGGTMRLGGQECELVKGSRSQKIYGTERVTERHRHRYEVNNNLIGKIEKAGLTISGRSHDGSLVEMIEISDHSWFVACQFHPEFTSTPRDGHPLFESFINAAKEAHNLILS

SEQ ID NO: 39856 - protein, 547 aa, Candidatus Blochmannia floridanus
MAAKDVKFGNDARVKMLRGVNVLADAVKVTLGPKGRNVVLDKSFGAPVITKDGVSVAREIELEDKFENMGAQMVKEVASKANDSAGDGTTTATVLAQSIVNEGLKAVAAGMNPMDLKRGIDKAVVAAVEELKKLSVPCSDPKAIAQVGTISANSDETVGKLIAQAMDKVGKEGVITVEEGSGLQDELDVVEGMQFDRGYLSPYFVNKPESGTVELEHPFILLADKKISNIREMLPILESVAKSGKPLLIIAEDVEGEALATLVVNNMRGIVKVTAVKAPGFGDRRKAMLQDIAILTSGTVISEEIGLELEKATLEDMGQAKRVLITKDATTIIDGVGNKSSIDSRVAQINQQRDEATSDYDREKLQERVAKLAGGVAVIKVGAATEVEMKEKKARVEDALHATRAAVEEGVVAGGGVALIRVANAIRNLCGDNEDQNVGIKVARRAMEAPLRQIMANAGEEPSVIANNVRSGEGNTGYNAATEKYGNMIELGILDPTKVTRSALQYAASIAGLMITTECMVTELPKEDKPDLGGGNPGGAGGMGGMM

SEQ ID NO: 39857 - protein, 237 aa, Lycopodiella cernua
ATKEYRSIVFKEPRFVEYFRLATPEMEYGRMNIGSRPSKRKPTGGIESLRAIPWIFAWTQIRFHLPVWLGFGAAFKHVVTEDSKNLNTLREMYNHWPFFRVTLDLIEMVFTKGDPRIAELYGRLLVSDELHAFGENLRAKYSETQELLLKVAGHSEILSGNPTLKQRLRLREPYITVLNVQQAHTLKKGRDVSLHGTYPGSANLSKPAAELVTLNPTSEYPPGLEDTLVLTMKGIAA

SEQ ID NO: 39858 - protein, 158 aa, Zea mays
MSLIRRSNVFDPFSLDLWDPFEGFPFGSGNSSSLFHSFPRTSSETAAFAGARIDWKETPEAHVFKADVPGLKKEEVKVEVEDGNVLQISGERNKEQEEKTDTWHRVERSSGRFLRRFRLPENAKTEQITAAMENGVLTVTVPKEDAKKPEVKSIQISG

SEQ ID NO: 39859 - protein, 248 aa, Corynebacterium diphtheriae
MTTGKLILLRHGQSEWNASNQFTGWVDVNLTEKGEAEAKRGGELLKAQGVLPSVVYTSLLRRAIRTANIALNAADRHWIPVVRDWRLNERHYGALQGLNKAETKEKYGDEQFMAWRRSYGTPPPELEDSSEFSQANDPRYANLDVVPRTECLKDVVERFVPYFKEEILPRVKNGETVLIAAHGNSLRALVKHLDNISDADIAELNIPTGIPLVYELDEAGTVLNPGGTYLDPEAAAAGAAAVAAQGAK

SEQ ID NO: 39860 - protein, 482 aa, Vibrio vulnificus YJ016
MTQPLRRTKIVTTLGPSTDKDNVLEEIIRAGANVVRMNFSHGSAEDHKTRAEKVRNIAARLGRQVAILGDLQGPKIRVSTFKEGKIFLSVGDLFTLDSDLPKGEGDQKSVGLDYKALPQDVGPEDILLLDDGRVQLQVLTVDGNKVNTRVIVGGPLSNNKGINKKGGGLSADALTEKDKQDILLAAEIKVDYLAISFPRNGADMDYARRLARDAGLEAKLVAKVERAETVRNDENIDDIIMASDVIMVARGDLGVEIGDPELIGVQKKLIKRAKELNRVVITATQMMESMIENPMPTRAEVMDVANAVLDGTDAVMLSGETAAGKYPVETVRSMAEVCIGAEKTWEPGSQNYRIDKSFVTAEETIAMSTIYAANHMEGVKAMVTLTESGRTALMTSRLNSTLPIFALSPNERTLNRCSLYRGVTPVFFDTKVETGFDVAMAALSTLRKKKLLDFGDLVIITQGDIMDVEGSTNCMRILPVFD

SEQ ID NO: 39861 - protein, 362 aa, Cupressus sp. HHG-2001
  misc_feature (202)..(203): Xaa can be any naturally occurring amino acid
  misc_feature (205)..(207): Xaa can be any naturally occurring amino acid
  unsure (1)..(362): unsure at all Xaa locations
SDSGKDAGRLSAAWQLYKAQEDLIKVAKDFGVKLTMFHGRGGTVGRGGGLTHLAILSQPPDTIHGSLRVTVQGEVIEQSFGEEHLCFRTLQRFTAATLEHGMRPPISPKLEWRKLMDEMAVIATEEYRSIVFKESRFVEYFRSATPELEYGRMNIGSRPSQRKPSGGIESLRAIPWLFAWTQTRFHLPVWLGFGAAFKHVIXXDXXXLHTLRQMYNELPFFRVTIDLVEMVFAKGDPGITSVYDKLLVSEDLWSFGEKLRAIYLETKDLLLKVAGHKDLLEGDPYLKQRLRLRDSYITTLNVCQAYTLKRIRDPNFHCQQRPHLSKESSTKPADELVKLNPTSEYAPGLEDTLILTMKGIAA

SEQ ID NO: 39862 - protein, 185 aa, Oryza sativa (japonica cultivar-group)
MAEQTEKAFLKQPKVFLSSKKSGKGKKPGKGGNRFWKSIGLGFKTPREAIEGTYIDKKCPFTGTVSIRGRIIAGTCHSAKMNRTIIVRRNYLHFVKKYQRQVNNYGFYLCFFSFFFPISDLGCRYEKRHSNIPAHVSPCFRVKEGDHVIIGQCRPLSKTVRFNVLKVIPAGSTGGSGGKKAFTAA

SEQ ID NO: 39863 - protein, 256 aa, Triticum aestivum
MEPSSQPEPVVGVATAGSQAYPPPAAYPAPAMPAAIPPGSQPAVPFPANPAQLSAQHQLVYQQAQQFHQQLQQQQQQQLREFWATQMEEIEQATDFKNHTLPLARIKKIMKADEDVRMISAEAPVVFAKACEVFILELTLRSWMHTEENKRRTLQKNDIAAAITRTDIYDFLVDIIPRDDMKEEGLGLPRVGLPPAALGAPADAYPPYYYVPAQQVPGVGMMYGGQQGHPVAYAWQQPQGQQAEEAPEEQQQSPSN

SEQ ID NO: 39864 - protein, 270 aa, Pseudomonas syringae pv. tomato str. DC3000
MSRLEQRFAQLKTEGRAVLVTFITAGDPGYDTSLKVLKGLPAAGADVIELGMPFTDPMADGVAIQLATLRALDAGQTLLKTLQMVSEFRVDDQTTPIVLMGYYNPIHRFGVEAFVAQAKEAGVDGLIIVDLPPEHDAELATPAQASGIDFIRLTTPTTDDARLPRVLERSSGFVYYVSVAGVTGAGSATTEHVTEAIARLRRHTSLPISVGFGIRTPEQAAAIARLADGVVVGSAFVDKIATAESPEQAIDGVLTLCAALAEGVRNARVS

SEQ ID NO: 39865 - protein, 466 aa, Sinorhizobium fredii
MSKRFRSRSAARAARHRLRRGEQDMSNRLNTTPNDLSAFWMPFTANRQFKKEPRLFVGAKDMYYTTHDGRTVLDGTAGLWCVNAGHCRPKITEAIREQAGELDYAPAFQLGHPKAFELANRLVDIAPEGLNHVLYTNSGSESVDTALKVALAYHRAKGNGSRFRLIGRERGYHGVNFGGISVGGIVANRKMFGTLLTGVDHLPHTHLPAKNAFTRGEPKHGGDLASELERIVTLHDASTIAAVIVEPVAGSTGVLIPPKGYLQKLREICTKHGILLIFDEVITGYGRLGTPFAAQYFDVKPDIITTAKGLTNGVIPMGAVFVTSEIHDAFMTGPEHLIEFFHGYTYSGNPIASAAALGTLDTYKEEGLLTRAAELASYWEEALHSLKDCPHVIDIRNIGLIGAVELEPIAGEPTKRAFSAFLKAYEKGLLIRTTGDIIALSPPLIIEKHQIDELIDKLRDVLKNNI

SEQ ID NO: 39866 - protein, 198 aa, Oryza sativa
MKRFAFEDSDMARVLMLMSSHGQQEQALALPVPVQLPLAAARGDRAPERAFVCKTCNRVFPSFQALGGHRASHKKPRLDGDGDLSLSKPKLHGCSICGLEFAIGQALGGHMRRHRAMTGGMPRAIVVDKKPDVVDVHVHGHDDDGGIKRGGLWLDLNHPPCDDAGDDDAECGHNAAGAGITFHQFLDTGAMAVDCVGY

SEQ ID NO: 39867 - protein, 324 aa, Methanosarcina barkeri str. fusaro
MNEYSHSSRIKPIKVLTFGEALFDIIRGSAHLGGAPLNLAAHLAKLGAKPAVITAVGRDELGKSLLSRAKAMGIDTSYILIDKKRPTGTVTVQLQAEGIPVFTINKGVAWDAITPDEKEFKALSGEEWDVFCFGTLAQRTEENRKTLERLFSEIKAKHFFYDVNLRTGNYKKEWILSSLEHTTILKLNEKEASTISCLLSGTSGTCKPLTSYKAFCRLVTEKYPEIFVICISRGPKGAAVCYKGVYEEVETTPIEVADTVGAGDAFSAGFLYTCLSGYGVSKAASIACILGTYVASKPGAVPDYSKELMEELKAQGLNLSFIKT

SEQ ID NO: 39868 - protein, 371 aa, Neurospora crassa
MCALAAIGQCRLMSLWDSLFNHLRQPIAQILLTRSDISDRSRYLNAQNTIHELLDMGVIPIVNENDTLAVSEIKFGDNDTLSAITAAMVHADLLFLMTDVDCLYDKNPRTNPDAQPIEVVEDIGALVADVSQAGSSLGTGGMSTKIVAARLATSAGVTTVITRSSNPGNIHKIVRHIQGSRSPASLTTQINHPSTASLASLTNNSDSVTGTSTPAVAVNPSSEQAPAVIDRSQIPLHTRFLPSPSPVRDRYFWILHGLRPHGTLYIDQGAYKALLGKAGLLPVGVVDVEGFFAQQEAVRLCVVDKRRSTPGPDGKMWEGEAVEVGRCLTNYASAEIARIKGHQSVEIGQLLGYADSEYVAQRESVSFYNTV

SEQ ID NO: 39869 - protein, 397 aa, Escherichia coli
METTSVIILNGFLGAGKTTLLKNLLIQAHEKQLSVSVIVNDMSELDVDGVLIANTDIVDAKDNNFVSITADSISSPAGLKKMDLAINHLLDHNKPDVMLIETSGSSHPLPLVKYLRRHSRVRLKAFLTLVDTVMLHEDYNDGKKLIPTLQENLRHNKRGLENLLAEQIMFCNRLLLTRNDRLPFDIISAVAKAIHPLNPSVDVLAVSWGNIELSTLLAIPDYNFDRVELLISELEALVGNMDTPCNNEELIWRVIRDDRPFHPQRLWDTCHRFMGMGVYRSKGFFWLPGRDDLALLWNQSAGSISLALIGYWKAGVLEHTDNNLTREERSALQRHIDTASGRFGDRCCQLTIIGNATEVNDFTHALSLCLLTEEEIQWWMSGGVFPDPWPQKVTRLS

SEQ ID NO: 39870 - protein, 345 aa, Glycine max
  misc_feature (267)..(267): Xaa can be any naturally occurring amino acid
  unsure (1)..(345): unsure at all Xaa locations
MAAEVYYQAIGTLQSHSYLNNLNHHQKHQNNLVTLVSRDFISSNGLSTRRSNCTGQRNCSVIRSLASQTSVVDPVLSPSRSNASDTYKKSNEAALILIRHGESLWNEKNLFTGCVDVPLSKKGIDEAIEAGKRISSIPVDVIFTSALIRAQMTAMLAMTQHRRGKVPIMMHNESEQARSWSQVFSEDTKKQSIPVIAAWQLNERMYGELQGLNKQETADRYGKEQVHEWRRSYDVPPPNGEGLEMCAERAVAYFRDQIGPRLLSGKXVMISAHGNSLTSIIMYLDKLTSQEVISLELSTGIPMLYIFKEGRFIRRGSPIGPSEAGVYAYTRRLALYKQKLDNMFQ

SEQ ID NO: 39871 - protein, 80 aa, Brassica rapa
MSCCGGNCGCGSGCKSGNGCGGCKMYPDLGFSGESTTTETFVFGVAPAMKNQYEASGEGVAENDACKCGSDCKCDPCTCK

SEQ ID NO: 39872 - protein, 561 aa, Vibrio parahaemolyticus RIMD 2210633
MAMTKHDESWWKTATIYQIYPKSFCDSGSKGTGDIKGIISKLDYLKHLGVDAIWLTPVYQSPMVDNGYDISDYYAINPQFGTMEDFDTLLAEAHQLGIRIIMDIVVNHTSTEHHWFQSALGDKNSPYRDYYIWKDPVDGAEPNNWQSKFGGNAWELDDATGQYYLHLFAKEQADLNWENPAVREEVKEVISFWADKGVDGFRLDVINLISKQQDFPSDDIGDGRRFYTDGPRVHEYLQEISEAVFQKYGSVTVGEMSSTTLEHCQQYSSLNGKELSMVFNFHHLKVDYPNGEKWTKAPFDFIQLKQIFNHWQTGLNGKGWGALFWCNHDQPRVVSRLGDDKQYRVESAKMLAASVHMMQGTPYVYQGEEIGMTNPGYTEISQYRDVESTNMYDIMVNRDGVSHEEMMAILAQKSRDNSRTPMQWNSQKHAGFTEGTPWLEVAQNYSEINAEAAVADLNSVFYFYKRLIELRKQVPVITDGRYEDLLPEHQRIFAYARQNDKQTLLCVNNYYAAEVECVLPERFELSKAKNLLSNYQNSASAVASNHQVLRPYETRILLIEE

SEQ ID NO: 39873 - protein, 623 aa, Streptomyces collinus
MSGIAGWVDFERDLTPEAPTVRAMAAALAHRGPDGFGEWIEGHAALAHRRLSLIGSEHAGQPAIVESEAGSPVAVLTLDGSVTNAVELRRELAAKGHRFTGDGDAEVALHAYLEWGAAFPERLEGLFALAVWDVRRQELLLVRDRLGVKPLCYFLTPSGVVFGSEPKALLAHPAVRPVVDADGLRELFAHSRKPGTGVFRGTREVLPGHTMTVRAPGTGHRRYWSLPARPHTDSLETTVATVRRLLSEAVATHLRADVPVGAMLSGGIDSSALTALAAHRRRAEGAGLRSFSVNFSGYAENFEPHPTMRATPDAPYAALAAEHIGTEHTEILLDTAALADPGTHAAALRSQDAPSPLGDMDVSLLLFFEALRGAGITAVLSGETADEVFNGYFWAYDPGHSNSTTFPWVSFERGHDAAAGGLGCSLVDRTLRKELDFMDYADQHYRDALTEVPQVAGESPAERRAREVTYLALTRWAPTHLDRADRMSMAHGVQLRPPFCDRALVEYVYNVPAELKRVNGQEKSLLRAAVADLLPERVLNRPKSAYPTVQEAAYGEFVRHRFEDVAADRTAPVAPLLDAEATRVALGAAAAPSGAFAWVERASMEMVLQLNTWLSEYGVELRV

SEQ ID NO: 39874 - protein, 102 aa, Kluyveromyces lactis
GSRRASVGSMARPAFVNKLWSMVNDKSNEKFIHWSTSGESIVVPNRERFVQEVLPKYFKHSNFASFVRQLNMYGWHKVQDVKSGSMLSNNDSRWEFENERHA

SEQ ID NO: 39875 - protein, 77 aa, Wolbachia sp. wSub
EEKQGGVVLPSSAEKKPTKGEVIAIGEGSRNSSGERVTLTVKAGDKVFYRQWAGTEIEHNNEKLIVMKESDILAVIK

SEQ ID NO: 39876 - protein, 136 aa, Polaromonas sp. JS666
MSTKIQKTDAEWKALLAEKGAEPVAFEVTRHAATERPFTGKYEDNYAQGTYRCICCDAELFDSSSKFDAGCGWPSFSQELNKGAIEEHVDRAHGMTRTETVCANCGAHLGHVFPDGPTPTGLRYCMNSASLDFKPK

SEQ ID NO: 39877 - protein, 160 aa, Triticum aestivum
NKFVQKSRLVPVRNSRDIVDPRVRLTSLAPATGTIYCCKHCDSHLAYAQHIISKMFRCKHGKAYLFDKVVNVVAGESEDDRMMTTGLHTVRDIFCVACGAILGWKYVSAFEKDQRYKEGKFILERCKIHSGGGGPPDRIQLWAEHDARISSSEDDDQGAV

SEQ ID NO: 39878 - protein, 686 aa, Bacillus circulans
APDTSVSNKQNFSTDVIYQIFTDRFSDGNPANNPTGAAFDGTCTNLRLYCGGDWQGIINKINDGYLTGMGVTAIWISQPVENIYSIINYSGVNNTAYHGYWARDFKKTNPAYGTIADFQNLIAAAHAKNIKVIIDFAPNHTSPASSDQPSFAENGRLYDNGTLLGGYTNDTQNLFHHNGGTDFSTTENGIYKNLYDLADLNHNNSTVDVYLKDAIKMWLDLGIDGIRMDAVKHMPFGWQKSFMAAVNNYKPVFTFGEWFLGVNEVSPENHKFANESGMSLLDFRFAQKVRQVFRDNTDNMYGLKAMLEGSAADYAQVDDQVTFIDNHDMERFHASNANRRKLEQALAFTLTSRGVPAIYYGTEQYMSGGTDPDNRARIPSFSTSTTAYQVIQKLAPLRKCNPAIAYGSTQERWINNDVLIYERKFGSNVAVVAVNRNLNAPASISGLVTSLPQGSYNDVLGGLLNGNTLSVGSGGAASNFTLAAGGTAVWQYTAATATPTIGHVGPMMAKPGVTITIDGRGFGSSKGTVYFGTTAVSGADITSWEDTQIKVKIPAVAGGNYNIKVANAAGTASNVYDNFEVLSGDQVSVRFVVNNATTALGQNVYLTGSVSELGNADPAKAIGPMYNQVVYQYPNWYYDVSVPAGKTIEFKFLKKQGSTVTWEGGSNHTFTAPSSGTATINVNWQP

SEQ ID NO: 39879 - protein, 77 aa, Wolbachia sp. wBre
EEKQGGIVLPPSAEKKPTKGEVIAIGEGSRNSSGERVTLTVKAGDKVFYRQWAGTEIEHNNEKLIVMKESDILAVIK

SEQ ID NO: 39880 - protein, 362 aa, Gnetum leyboldii
SDSGKDAGRLSAAWQLYKAQEELIKVAKQFGVKLTMFHGRGGTVGRGGGPTHLAILSQPPDTIHGSLRVTVQGEVIEQCFGEEHLCFRTLQRFTAATLEHGMHPPIAPKPEWRQLMDEMAVIATQEYRSYVFHEKRFVEYFRSATPELEYGRMNIGSRPSKRKPSGGIESLRAIPWIFAWTQTRFHLPVWLGFGAAFKHVIEKDIRNLHTLQQMYNEWPFFRVTLDLVEMVFAKHDPGIAALYDKLLVSEDLWSFGEQLRKNYVETKDLLLQVAGHKEVLEGDPYLKQRLRLRDSYITTLNVLQAYTLKRIRDPSYHVTLRPHLSKESSTKPAAELVKLNPTSEYAPGLEDTLILTMKGIAA

SEQ ID NO: 39881 - protein, 548 aa, Legionella pneumophila str. Paris
MAKELRFGDDARLQMLAGVNALADAVQVTMGPRGRNVVLEKSYGAPTVTKDGVSVAKEIEFEHRFMNMGAQMVKEVASKTSDTAGDGTTTATVLARSILVEGHKAVAAGMNPMDLKRGIDKAVLAVTKKLQAMSKPCKDSKAIAQVGTISANSDEAIGAIIAEAMEKVGKEGVITVEDGNGLENELSVVEGMQFDRGYISPYFINNQQNMSCELEHPFILLVDKKVSSIREMLSVLEGVAKSGRPLLIIAEDVEGEALATLVVNNMRGIVKVCAVKAPGFGDRRKAMLQDIAILTKGQVISEEIGKSLEGATLEDLGSAKRIVVTKENTTIIDGEGKATEINARIAQIRAQMEETTSDYDREKLQERVAKLAGGVAVIKVGAATEVEMKEKKARVEDALHATRAAVEEGIVAGGGVALIRAQKALDSLKGDNDDQNMGINILRRAIESPMRQIVTNAGYEASVVVNKVAEHKDNYGFNAATGEYGDMVEMGILDPTKVTRMALQNAASVASLMLTTECMVADLPKKEEGVGAGDMGGMGGMGGMGGMM

SEQ ID NO: 39882 - protein, 358 aa, Sticherus bifidus
SDSGKDAGRLSAAWQLFKSQEDLISVAKQFGVKLNMFHGRGGTVGRGGGPTHLAILSQPPDTIHGSLRVTIQGEVIEQSFGEEHLCFRTLQRFTAATLEHGMRPPVKPKPEWRALMDEMALVSTEEYRSIVFKEPRFMEYFHSATPVLEYGRMNIGSRPSKRKPSGGIESLRAIPWIFAWTQTRFHLPVWLGFGAAFQAVLKKDPNNLIVLQEMYNEWPFFRVTIDLVEMVFAKGDPRIAALYDELLVNDELKFFGTVLRAKYEETKELLLKVAGHEELLEGNPYLKQRLALRDPYITTLNLQQAYTLKKMREGHVGKSSSLLKARSSAAELVSLNTTSEYAPGLEDTMILTMKGIAA

SEQ ID NO: 39883 - protein, 360 aa, Sticherus bifidus
SDSGKDAGRLSAAWQVFKTQEDCVKVGHQFGIKLTLFHGRGGSVGRGGGPTHLAILSQPPDTIHGSLRVTIQGEVIEQSFGEEHLCFRTLQRFTAATLEHGMQPPRAPKPEWRALMDDITPIATDAYRGVVFQEPQFVQYFRAVTPELEYGRMNIGSRPSKRKPDGGIESLRAIPWIFAWTQTRFHLPVWLGIGSALKYALYKGQKNLHVLQGMYNGWPFFRATIDLIEMVFAKGDPRIAALYDKLLVSEDLQQFGDSLRARYEETRDLLLLVAGHSDLLQGNPTLKQRLKLREPYITVLNVQQVHTLRKIRDEEYQYNSSKSPVSQNKPAAELVSLNPTSEYAPGLEDTLILTMKGIAA

SEQ ID NO: 39884 - protein, 360 aa, Sticherus bifidus
SDSGKDAGRLSAAWQVFKTQEDCVKVGHQFGIKLTLFHGRGGSVGRGGGPTHLAILSQPPDTIHGSLRVTIQGEVIEQSFGEEHLCFRTLQRFTAATLEHGMQPPRAPKPEWRALMDDITPIATDAYRGVVFQEPQFVQYFRAVTPELEYGRMDIGSRPSKRKPDGGIESLRAIPWIFAWTQTRFHLPVWLGIGSALKYALNKDKKNLHVLQEMYNGWPFFRATIDLIEMVFAKGDPRIAALYDKLLVSEDLQQFGDSLRARYEETRDLLLLVAGHSDLLQGNPTLKQRLKLREPYITVLNVQQVHTLRKIREGGVPVNSSKSPVSQNKPAAELVSLNPTSEYAPGLEDTLILTMKGIAA

SEQ ID NO: 39885 - protein, 637 aa, Debaryomyces hansenii CBS767
MLKANNFNTRIAKTTKLGKIQIRSNSNGVNNSNSSIHTHTIKTPVGIKAAIASLKPKTTRLSIEGPIECDLQGFALLNAPGFNKGSAFSKEERQAFGLEGLLPSRINSLDEQVERAYRQFSYLKTPLAKNDFCTSMRIQNKVLYYELVRRHIREMIPIIYTPTEGDAIAAYSHRFRKPEGCFLDITEPDMIDKRLSAFGEDKDIDYIVVSDGEGILGIGDQGVGGVRIAIAKLGLMTLCGGVHPGRVLPIVLDVGTNNQELLHDELYMGNKFPRVRGKEYWDFIDKFINAVKQRFPNAVLHYEDFGVSTGRKMLQKYRESLPSFNDDIQGTGAVVMASMTAALQFSDRNLLDSKVLIYGAGSAGLGIADQIVNHMVSHGATEEQAVASIHCMDRRGLLLKSFDEMSDAQTKYADVDSEWEGVDTRNLVEVIRHVKPTVLVGCSTQAGAFTEQVIKEMYNHNKQPIVFPLSNPTRLHEAFPIDIMKWTDNKALIATGSPFEPVNGFAISENNNCFTFPGIGLGAVLSRCTTISDTMVSAAVDQLALLSPKMENPKNGLLPRLEQIDEVSAKVATAVILQSLKEGTARVESEEKPDGGFVEVPKDFNKCLKWVQSQMWKPIYRPLVKVKHVPEVHTYQH

SEQ ID NO: 39886 - protein, 432 aa, Bacillus licheniformis ATCC 14580
MQHTQSEKLHEEALQHIVGGVNSPSRSYKAVGGGSPVAMERGSGAYFWDVDGNKYIDYLAAYGPIITGHAHPHITKAIQTAAENGVLYGTPTKHEVTFAKMLKEAIPALDKVRFVNSGTEAVMTTIRVARAYTGRTKIIKFAGCYHGHSDLVLVAAGSGPSTLGTPDSAGVPKSIANEVITVPFNDIDSYKEALDKWGNDIAAVLVEPIVGNFGIVEPKSGFLEQVNELTHNAGALVIYDEVITAFRFMYGGAQDLLGVKPDLTALGKIIGGGLPIGAYGGRKEIMEQVAPLGPAYQAGTMAGNPASILSGIACLEVLKEKGTYEKLDRLGAMLEEGILAHAETHGIDITVNRLKGALTVYFTNEKVENYEQAENTDGDMFAAFFKLMLERGINLAPSKYEAWFITTAHTEEDIKDTLKAVDDSFKQLKQRM

SEQ ID NO: 39887 - protein, 279 aa, Ustilago maydis 521
MPLSNLIGRAQASKQASKQASTYSALTSLCSVPPSKAHLQSLPKLCGISLGTVFGLLAIIYLPLMSRFFSLFTRSSQPLIQHLGPPTTPTAQAAQEALKGSNAAMSAQETATVANGCFWGTEDIYRKAYGNGKGLLDAKVGFIGGQESSKNPSYEEVCTGRTGHAEAAQIVYDPSKVSYAEIIEFFYRTHDPTQLNQQGNDRGTQYRSAIFAHDQTQLDIAKKVTEEVQKKHFDPKGKKIVTQLEIRKKEDFFPADDYHQKYLINHPDGYHCSTHRYWW

SEQ ID NO: 39888 - protein, 344 aa, Glycine max
MGASSDPTQDGSDEQQKRSEIYTYEAPWHIYAMNWSVRRDKKYRLAIASLLEQYPNRVEIVQLDDSNGEIRSDPSLSFEHPYPPTKSIFIPDKDCHRPDLLATSSDFLRVWHISESSVELKSLLNGNKNSEYCGPLTSFDWNEAEPRRIGTSSIDTTCTIWDIEKETVDTQLIAHDKEVYDIAWGGVGVFASVSADGSVRVFDLRDKEHSTIIYESSEPDTPLVRLGWNKQDPRYMATIIMDSAKVVVLDIRFPTLPVVELQRHQASVNAIAWAPHSSCHICTAGDDSQALIWDLSSMGQPVEGGLDPILAYTAGAEIEQLQWSSSQPDWVAIAFSTKLQILRV

SEQ ID NO: 39889 - protein, 588 aa, Candida albicans SC5314
MQRVLELLLLSSTALAVIGDGFIALPVHKLQAGEGSAHFPNRLPIFDVVNGVAKSVEDDVNQIIQPIFGNGIFSGGSIQGTHSGNGHSVKYEVSLPSSSAQKGSNGPSSTDNKDTDPSKTGFSLDDLMNSISTDFWNLIGLNKAPTSSDNGSKDADFTPSAVSQVEQPTSKSVESTAPGPASSASSSSSSEAASSSQPSEDSQPSSSANKKTGAFFLSLDNTQTLYTATLKVGSPAQEVQVMIDTGSSDLWFISSGNSQCKVNGGSIDCDKYGVFDKSKSSTWHDNKTDYSISYYDGDKASGTMGQDNITFADGFSIENANFAVIDNTTSSIGVFGVGYPELEAVKSKYTNLPFAMKEQNLIAKVAYSLYLDSRDAVQGYILFGGIDHAKYTGDLKAFDIVQSNDKYVYSQIPLTSVASSLNNYTNAYGLPAGSNHPKVGAVIYNGTDSFNGGVDLKDTPTLLDTGTTYSYLSKDQVESIVGLYGNVTYNDAGKAYEVPCWVGNPGNYLEFNFKNEQYIKVPTSEFVISVGTYASGAELCVFGILPGTHSILGDNFMRSVYAVFDLEDHVISIAQAAYNDNHAVVPIE

SEQ ID NO: 39890 - protein, 321 aa, Parasitella parasitica
MAVDYLTLDRTGDKMPLRGFGCWKIEKKDAENTIYQAIKIGYRLFDGACDYGNEVEVGRGINKAIKEGLVKREELFIVTKLWNTFHSKQHVRTAFDRQLKDWGLEYFDLYLIHFPIPLQYVDPAVSYPPEWYVPHADKLNFERSPIHECWAEMEKLVQAKLTRNIGVANFNCQAILDLLSYSKIKPAVLQIEIHPLLPQERLVKWVQEQGIQVTAYSSFGPTSYVDLCESGKTYSSLLANADVKSIANKHNVNTGQILLRYALDRNIAVIPKSVHEDRMKSNLDILNIQLDQDDRKILNSLKTNQRFNDPMIFGFGLPLFD

SEQ ID NO: 39891 - protein, 474 aa, Zea mays
MEKKAATTEEPLLAPRSEHTVAAEAKRLLSLAGPLVASCILQNVVQLVSVMFVGHLGELPLAGASLASSLANVTGFSLLVGMASALDTLCGQAFGARQYGLLGLYKQRAMLVLALACVPIAAVWANAGRILILLGQDRDIAAEAGAYSRWLILSLVPYVPLACHVRFLQTQSIVVPVMASSGATALGHVLVCWALVFKAGMGSKGAALSGAISYSVNLAMLALYVRLSSACKRTWTGFSTEAFRDLLRFTELAVPSAMMVCLEWWSFELLVLLSGLLPNPKLETSVLSICLNTGALLFMVPYGLCTAISTRVSNELGAGEPQAARLAARVVMCIALSAGLLLGSTMILLRSFWGYMYSNEPEVVTYIARMMPVLAISFFTDGLHSCLSGVLTGCGRQKIGARVNLGAYYLAGIPMAVLLAFVLHLNGMGLWLGIVCGSLTKLVLLMWITLRINWEKEATNAKETVFSSSLPVAL

SEQ ID NO: 39892 - protein, 396 aa, Colwellia psychrerythraea 34H
MFGSLKALPADPILGLLAKYKKDNNPNKIDLGVGVFKNEAGHTAVLDCVKKAEQHRTNTEDSKVYIGPTGSPVFNDEMAKLIFGSEHKVLNENRARTISTPGGTGALRVAAEFIKSCKAGATIWVSNPTWANHTGLFAAAGLNVKTYPYYDYENKSLDFDGMLNALKEVSSDDVVLLHACCHNPSGMDLNNEQWQQVADVAKDVGFTPLIDMAYQGFGSGLDEDAYGLRLMAETVKEMIVCSSCSKNFGLYRERIGACTIIGESSISVDIANSVLLYVVRVIYSMPPAHGAAIVETILSSDELRNEWYVELKAMRDRINGNRQLIVDKLIENGVTRDFSFISRQSGMFSFLGLTPEQVQQLQDEYSIYLVGSSRMSIAGIANSNVDYLAKSIAKVL

SEQ ID NO: 39893 - protein, 405 aa, Streptococcus mutans UA159
MMKEFNKSAKLEHVAYDIRGPVLEEADRMIANGEKILRLNTGNPAAFGLTAPDEVIRDLIMNARESEGYSDSKGIFSARKAIMQYCQLKNIPDVDVDDIYIGNGVSEMITMSMQGLLDDGDEVLVPMPDYPLWTAAVSLAGGQAVHYVCDESSNWYPDIDNIKSKITSNTKALVVINPNNPTGALYPKDVLEDIVEVARQNDLIIFADEIYDRLVMDGGEHVAIASLAPDLFCVSMNGLSKSHRIAGFRVGWMVLSGPKKHVKDYIEGLNMLSNMRLCSNVLAQQVIQTSLGGVQSIDELLLPGGRIYEQRNFIYKAMNEIPGITAVKPQAGLYIFPKIDRNMYRIDDDEQFVLNFLKQEKILLVHGRGFNWMEPDHFRIVYLPRVEELSKIQEKMTRFLGQYRK

SEQ ID NO: 39894 - protein, 421 aa, Brucella melitensis 16M
MTTENLLESALVRLDEAASHINIDADVIEKLKFARETMKVRLMIRMDDGSRKSFIAWRCRYDDTRGPTKGGIRYHPDSTVEEVETPAFWMTFKCAVMNLPYGGGKGAIQVDPRQLSKAELERLSRAYIQAFSGIIGPDRDIPAPDVYTNSMIMGWMADEYSQIVGQSSPAVITGKPIALGGSLGRNDATARGGFYLVRHLSHDLGLASVLRVAIQGFGNAGQFMAKLMAGDGHKIVAVSDSAGAVYCADGLDVDLLLAAKADGKSVISTAGHKGHEAISADELVAADCDVLVPSAMENMIHAGNAASIRAKLIVELANGPVTGDADKILAEKGVMVLPDILANAGGVTVSYFEWVQNRQGYYWTLEEIHERLKTIMEREGRAIWNHARERGVTLRTAAYVHALERLAQAIEAHGTQNDFAA

SEQ ID NO: 39895 - protein, 133 aa, Marchantia polymorpha
MARTKQTARKSTGGKAPRKQLASKAARKSAPSTGGVKKPHRYKPGTVALREIGRYQKSTELLIRKLPFQRLIAQDFKSDLRFQSSAIGALQESVESYLVSFLEDTNLCAIHAKRVTIQSKDIQLARRLRGERN

SEQ ID NO: 39896 - protein, 149 aa, Brassica rapa
GTLLKPNMVTPGSDSAKVAPEVIAEHTVRALQRTVPAAVPAIVFLSGGQSEEEATKNLNAMNQLKTKKPWSLSFSFGRALQQSTLKTWAGKEENVKAAQEALYVRCKANSEATLGPYKGDAKLGDGAAESLSRQGLQVLENSLYMVSGL

SEQ ID NO: 39897 - protein, 3488 aa, Planktothrix agardhii
MVQNTDYKKLIATTLTKMEVMQARITELETGQREPIAVVGMGCRFPGGITSPEEYWNYCQAGLDAITEVPKSRWDSSKFYAKEPTPGKINTAYCGFIQQDITEFDARFFSISSREATSMDPQQRLLLEVTWEALENANLPPNNLANNTVGVFVGITSVDNAITVYNSSYDQIDSFFGTGNALSAAAGRLSYFFNLRGPCLSIDAACASSLVAVHQAIRSLRNRECEVALVAGVNLILNPAITINLSQSGMLSPDGRCKTFDASANGYGRGEGCGVLVLKTLSEAQKKGDRILAILRGSAVNHNGAAAGLTVPSGPAQQELLRQAIADARITPEDVGYIEAHGTGTSLGDPIEMNAIASVYGKRSQPLYVGSVKTNIGHLEAAAGMAGIIKTILVLQKGEIPAHLHFQTPNPLINWQDNSIKIPTQTIPWPNSNKIPMAGVSSFGFSGTNAHVIVEKAPDIKITEIKQPLPSHLLTISAHNKTALQELARRFSTRLESDPEIGDICYSVAVGRAKLSERLAIVANTLPELQQRLVAFADQNPLDNLTFYQRFTEEKQPKVVFLFTGQGACYPGMGDQLYQTEPTFRQYIDQCAEILARYLEYPLPEILFGKHTDLLNQTAYAQPAIFALEYAVAMLWKSWGITPSLLIGHSVGEYVAACIAGVFSLEAGLALIVKRGQLMQTTKIGKMASIFADEATVISLIQNYSNTVAIAAINHPQQIVISGESASIEEIIINCKQQKIAAQYLSVTQAFHSPLMESILNEFEQEAPGQISYHRPQILLLSGIDGKILENAPDASYWRQQCRQPVQFLASLNTALNKGYNLFLEVGSRPILAEQGRRYQDGAIWLSSLNRGLDIWQTILSALGQLYLNGVYFNPEKFNQNYGYKQVRLPNYPFQRKRFQFQPNIVEETTQITEIYPEPETNKITELKVQNMQKHQLEIRQQLKSILALLLKENQNDIRDDETLLNLGADSIILTDFSRKVEEKFKVKVKIDQLFTDLQTIADIAEYIYNSIEPKNLEPSSEKTKLNQAEIVNFDPEINNYIEVISQLQPIATAYIIKALETLGKKLNPGETWTTESIKQTLPIAPKYQVLVTRYLQDLEQANIIQNQGNIWTVKNLPASFSLPEAIENLQKTCPSAKPELEMLQRCGENLAEVLKGNIDPLTLIFPEGSVTHAESIYGNSPVSRLMNQRVAEAINLTLNNFSPSINPYKIIEIGGGTGATSETILNNLNLNRVSYSFSELSPFLLNQARQKFQSKYNLNFHQLDIEKSPISQGISSHSYHIVVAANVLHATQNITETLTNIRELLLPGGYLILLETVENNSWLNLTFGLTPGWWRFQDKELRSDTPLLSGESWCSVLKRCGFATANSFSKQNNISIYNGQELIIACAAAEILPIPQTPKATQFQAVTSGKEALMMAQLQSLKDLKDLHEKTIIKQLEILQSVGITPNIITEKPIIQTEIIPSQNYQIETVSPAQREQTKLPQKPSSPSLNPLALKLNESKSLTEKQQDFINNLQTIYNQKTAKSKAYSQNSRQTMVDVKPTIDFRMTLKEFQYPIVSESAQGACFRDIDGNDYIDLAMGFGVNFFGHSPDFVIAAVQEQMQQGIGLGMQSNLAAETAALISEMAGVERVAFSNTGTEAIMAAVRIARSRTKRPKIVIFSGSYHGTFDGILARVGEDSTSIPVSLGTPSGMVEDVIVLSYGVEESLEIIAAHSDDLAAVLVEPVQSRKPDLQPQEFLQKLRKLTQEKGIALIFDEIITGFRIAPGGAQQWFNIEADIVIYGKAIGGGLPISMICGKADFSDTVDGGFWKYGDDSHPQTELTAFGGTFCRHPLALAACRAVLLYLKEQSPTIQERVNQLTQRLATEVNQFFQEIGIPIRIVNFGSLFRFEPFGAYSLFLQPIELPLFYYLLNLKGIYTWEKRVCFLSTCHTNEDIDKVIATVKSAIIELQQGGFFENAKLLKVNKQDKNVEREDEDGRENLNPINQQFPTSEAQRQLWLLAELDRNASASYNVTASLELRGSLDISALQEAINQVINRHESLRTQILEQGEVQEVINSVKIQLTLINLNDEQNPQAMALGLRSQFSKKPFDLSIAPLFDVILIRLNSDHYLLSLKTHHIVVDGWSLGLILNEIGQLYSTQIGATTDPLEFPMQFRQYLALREQEAQSPQMLEHRDFWLKTYQGEIPAFELPTDFPRPAIKTYTGGQESKIVTPELWQNLQTVGRQNQATLFMTMFAAYTAFLSRISGHNDLVIGIPISGRQIEGSDQLVGFCSQFLPIRIKVDITHSFVEHLQRTKQTLIAAFRHQSYTLEDLLAALQLQRDFSRSPLISVSFNIDPSLTLPDFEGLKVSLPPEPIGYTPFDVGFNFIEVNNNLIIYCNYNTELFKQETIKQFLESFEILLDGVINNANSWLHQLPLLTKLQRENLLAELIGETRELPENATIIDDFVSQVNSTPNAPALVCGETTLTYQELNQKVNRLTHYLQHQYQLGAGKIMGLMMGRNQNLIISILAIFKTGATYVPIDAEYPNNRIDFIIKDSGCHVCLTESNLISRIPQEIETICLDKIDNILAKYGNQEPNIPPDSSQIAYIFYTSGSTGNPKGVMGRHLSILNVIQSLRLTFNLDKYPEWRYIFTAAVTHDPSIRNIFLPLTIGAPLYIYEVKYIGHLVSFLQENQINALHTTPSIYREILALLEPGETISSLKYISVGGEKLDRETALALRQLFPGEIVSNVYGSTETCVGVSQYKINENLDTDVPLGQVFHNNRLFLLDEFNNPVPLHIVGEICVEGAALASGYHNLPQITKEKFKPGFFDQKTTMFRTGDLGKQTAPGVIEFMGRKDNQVKVNGYRIDPEEIEYQLNRYPQIERAIILPISVNNQTQLSAYCQTDKQIEISEIREFLANFLPVYMIPSYFIFLKQFPLTKHGKLDLNSMIALNETGKSTQVNYVAPRNNLESNLVRIWEKILTKHPIGIFDNFFEIGGHSLMLSRIVTHVHKELNVSVKLADFFKVPTIAGLAVLVSKTEYDYQEPIPTIPLQKSYPMSHGQRRLWALEFLDQNHNAYGMPSVYQFNGNLNIAAFENAFQQLIQRHEILRTTFSLIDNQPRQVVHNQMNFGIKQIDLTNYLETEQAKLIAEAISHNAKTTFDLEVGPLLRVNLLKLSQENYIVLFNMHHIISDGWSAGVLIKDFLGHYHTYRQQNSELLPPLKIHYKDYTDWQENQLKTSKLQAQRDYWLTKLTPAPQHLNLPFDYPRPAVQSFQGNTVIWKPNSELIEHFQILIKDKEASLFMGLLTLVKSFLFRYTEQNEITVGSPIAGRNHPDLESQIGFYVNTLVLRDQIRADDSFLNVLTTVKTTTLEAYENQEYPFDKIVSDLNLPRDPSRNTLFDVAVALQNNQNVDLALEGITVNSIDPEMTTAKFDLEFIFVEEGELYLKLIYNTDIFINERILLMINLLENLMEQVIKYPDKPLIKLSLESSNFGQEYSDLFAEDFNF

SEQ ID NO: 39898 - protein, 426 aa, Escherichia coli O157:H7
MSSNKELMQRRSQAIPRGVGQIHPIFADRAENCRVWDVEGREYLDFAGGIAVLNTGHLHPKVVAAVEAQLKKLSHTCFQVLAYEPYLELCEIMNQKVPGDFAKKTLLVTTGSEAVENAVKIARAATKRSGTIAFSGAYHGRTHYTLALTGKVNPYSAGMGLMPGHVYRALYPCPLHGISEDDAIASIHRIFKNDAAPEDIAAIVIEPVQGEGGFYAATPAFMQRLRALCDEHGIMLIADEVQSGAGRTGTLFAMEQMGVAPDLTTFAKSIAGGFPLAGVTGRAEVMDAVAPGGLGGTYAGNPIACVAALEVLKVFEQENLLQKANDLGQKLKDGLLAIAEKHPEIGDVRGLGAMIAIELFEDGDHNKPDAKLTAEIVARARDKGLILLSCGPYYNVLRILVPLTIEDAQIRQGLEIISQCFAEAKQ

SEQ ID NO: 39899 - protein, 466 aa, Escherichia coli O157:H7
MGQSSQPHELGGGLKSRHVTMLSIAGVIGASLFVGSSVAIAEAGPAVLLAYLFAGLLVVMIMRMLAEMAVATPDTGSFSTYADKAIGRWAGYTIGWLYWWFWVLVIPLEANIAAMILHSWVPGIPIWLFSLVITLALTGSNLLSVKNYGEFEFWLALCKVIAILAFIFLGAVAISGFYPYADVSGISRLWDSGGFMPNGFGAVLSAMLITMFSFMGAEIVTIAAAESDTPEKHIVRATNSVIWRISIFYLCSIFVVVALIPWNMPGLKAVGSYRSVLELLNIPHAKLIMDCVILLSVTSCLNSALYTASRMLYSLSRRGDAPAVMGKINRSKTPYVAVLLSTGAAFLTVVVNYYAPAKVFKFLIDSSGAIALLVYLVIAVSQLRMRKILRAEGSEIRLRMWLYPWLTWLVIGFITFVLVVMLFRPAQQLEVISTGLLAIGIICTVPIMARWKKLVLWQKTPVHNTR

SEQ ID NO: 39900 - protein, 239 aa, Brassica oleracea var. botrytis
RGRVQLKRIENKINRQVTFSKRRSGLLKKAHEISVLCDAEVALIVFSSKGKLFEYSTDSCMESILERYDRYLYSDKQLVGRDISQIENWVLEHAKLKARVEVLEKNKRNFMGEELESLSLKDLQSLEHQLDAAIKSIRSRKNQAMFESISALQKKDKALQDHNNTLLKKIKEREKKTGHQEGQLNHCSNNSSIVQPQYCLTSSRDGFVGRVGGENGGASSLTEPNSLLPAWMLRPTTNE

SEQ ID NO: 39901 - protein, 296 aa, Pseudomonas putida
MAGKSPLINLNNGVKMPALGLGVFAASAEETASAIASAISSGYRLIDTARSYNNEAQVGEGIRNSGVDRAEMFVTTKLFNCDYGYERALRAFDESLGRLGLDYVDLYLLHWPTKDWNATIQSWKAAEKILGDGRARAIGVCNFLEDQLDELIAASDVVPAVNQIELHPYFAQKPLLAKNRALGIVTEAWSPIGGAINDGDGDNHGGRKHPLTDPVITTIAEAHGRSAAQVILRWHFQNDVVAIPKSVNPERIAKNIDVFDFALSDAEMAQLDELDTGVRIGPDPRDVDTSSFAEFV

SEQ ID NO: 39902 - protein, 159 aa, Brassica napus
  misc_feature (31)..(31): Xaa can be any naturally occurring amino acid
  unsure (1)..(159): unsure at all Xaa locations
MVAISEINPTVEATAANCLMLLSRVDQENVXGSAKRVFTCKTCLKEFHSFQALGGHRASHKKPNNESLSGLIKKSKAASSHPCPICGVEFPMGQALGGHMRRHRNESGGAGALVTRELLSEAALTTLKKSSSGRLACLDLSLGMVENLNLKLELGRPVC

SEQ ID NO: 39903 - protein, 241 aa, Brassica oleracea var. botrytis
MGRGRVQLKRIENKINRQVTFSKRRSGLLKKAHEISVLCDAEVALVIFSSKGKLFEYSTDSCMERILERYDRYLYSDKQLVGREISQSENWVLEHAKLKARVEVLEKNKRNFMGEDLDSLSLKELQSLEHQLHAAIKSIRSRKNQAMFESISALQKKDKALQDHNNALLKKIKEREKNTVQQGGQLIQCSNNASILQPQYCLTSSRDGFVGRVGEENGVASLLAEPNSLLPAWMLRPTTKE

SEQ ID NO: 39904 - protein, 358 aa, Sticherus bifidus
SDSGKDAGRLSAAWQLFKSQEDLISVAKQFGVKLNMFHGRGGTVGRGGGPTHLAILSQPPDTIHGSLRVTIQGEVIEQSFGEEHLCFRTLQRFTAATLEHGMRPPVKPKPEWRALMDDITPIATDAYRGVVFQEPRFMEYFHSATPVLEYGRMNIGSRPSKRKPSGGIESLRAIPWIFAWTQTRFHLPVWLGFGAAFQAVLKKDPNNLIVLQEMYNEWPFFRVTIDLVEMVFAKGDPRIAALYDELLVNDELKFFGTVLRAKYEETKELLLKVAGHEELLEGNPYLKQRLALRDPYITTLNLQQAYTLRQGREGHVGKSSSLLKARSSVEKLVSLNTTSEYAPGLEDTMILTMKGIAA

SEQ ID NO: 39905 - protein, 243 aa, Brassica oleracea var. botrytis
MGRGRVQLKRIENKINRQVTFSKRRSGLLKKAHEISVLCDAEVALVVFSSKDKLFEYSTDSSMERILERYDRYLYSDKQLVGRDISQSENWVLEHAKLKARVEVLEKNKRNFMGEDLDSLSLKELQSLEHQLDAAIKSIRSRKNQAMFESISALQKKDKALQDHNNTLLKKIKEKEKEKNTGQQEGQLIQCSNNSSVLQPQYCVTSSRDGLVERVGGENGGASSLIGPNSLLPAWMLRPATNE

SEQ ID NO: 39906 - protein, 492 aa, Mycobacterium tuberculosis H37Rv
MATIHPPAYLLDQAKRRFTPSFNNFPGMSLVEHMLLNTKFPEKKLAEPPPGSGLKPVVGDAGLPILGHMIEMLRGGPDYLMFLYKTKGPVVFGDSAVLPGVAALGPDAAQVIYSNRNKDYSQQGWVPVIGPFFHRGLMLLDFEEHMFHRRIMQEAFVRSRLAGYLEQMDRVVSRVVADDWVVNDARFLVYPAMKALTLDIASMVFMGHEPGTDHELVTKVNKAFTITTRAGNAVIRTSVPPFTWWRGLRARELLENYFTARVKERREASGNDLLTVLCQTEDDDGNRFSDADIVNHMIFLMMAAHDTSTSTATTMAYQLAAHPEWQQRCRDESDRHGDGPLDIESLEQLESLDLVMNESIRLVTPVQWAMRQTVRDTELLGYYLPKGTNVIAYPGMNHRLPEIWTDPLTFDPERFTEPRNEHKRHRYAFTPFGGGVHKCIGMVFDQLEIKTILHRLLRRYRLELSRPDYQPRWDYSAMPIPMDGMPIVLRPR

SEQ ID NO: 39907 - protein, 242 aa, Brassica oleracea var. botrytis
MGRGRVQLKRIENKINRQVTFSKRRSGLLKKAHEISVLCDAEVALVVFSSKGKLFEYSTDSSMERILERYDRYLYSDKQLVGRDISQSENWVLEHAKLKARVEVLEKNKRNFMGEDLDSLSLKELQSLEHQLDAAIKSIRSRKNQAMFESISALQKKDKALQDHNNTLLKKIKEKEKEKNTGQQEGQLIQCSNNSSVLQPQYCVTSSRDGLVERVGGENGGTSSLIEPNSLLPAWMLRPTTK

SEQ ID NO: 39908 - protein, 282 aa, Nicotiana sylvestris
MASPQENSTTLDLIRQHLLDDNVFLEHYCSETETTTLIYSQSSSSSESLDQSFSFEPTLNYATTAQSSNLEVSTFFNNSKTEFDSFEFGTIPNVSAARSSSLKQTSFKERKPSLNIAIPVKQEVVQKVELAPTEKKHYRGVRQRPWGKFAAEIRDPNRKGTRVWLGTFDTAIEAAKAYDRAAYKLRGSKAIVNFPLEVANFKQEFNNEIRPLVNSSRKRVRETVNEEQLVINKEMKIEEERVPTAPLTPSSWSAIWDSGDGKGIFEVPPLSPFGAYSQLVMI

SEQ ID NO: 39909 - protein, 227 aa, Nicotiana sylvestris
MAVKNKVSNGDLKGGNVKTNGVKEVHYRGVRKRPWGRYAAEIRDPGKKSRVWLGTFDTAEEAAKAYDTAAREFRGPKAKTNFPLPSENQSTSHSSTMESSSGETGIHAPPHAPLELDLTRRLGSVAADGGDNCRRSGEVGYPIFHQQPTVAVLPNGQPVLLFDSLWRPGVVNRPQPYHVMPMAMGFNGVNAGVDPTVSDSSSVVEENQYDGKRGIDLDLNLAPPTEF

SEQ ID NO: 39910 - protein, 237 aa, Nicotiana sylvestris
MYQPISTEFPVYHRTSSFSSLMPCLTDTWGDLPLKVDDSEDMVIYGLLSDALTTGWTPFNLTSTEIKAEPREEIEPATSPVPSVAPPAETTTAQAVVPKGRHYRGVRQRPWGKFAAEIRDPAKNGARVWLGTYETAEEAALAYDKAAYRMRGSKALLNFPHRIGLNEPEPVRLTVKRRSPEPASSSISPASENSLPKRRRKAVAAKQAELEVQSRSNVMQVGCQMEQFPVGEQLLVS

SEQ ID NO: 39911 - protein, 394 aa, Legionella pneumophila str. Paris
MLERFINYLQNELETLKADGLYKSERVISSQQQADVKVNEREVINLCANNYLGLANDPELIAEGQAALAKYGYGMASVRFICGTQTPHKQLEQKISHFLSQEDTILYSSCFDANTGLFETLLTEEDAIISDALNHASIIDGVRLCKAARYRYANNDMKALEEQLIAAKNARFRLIATDGVFSMDGILANLPAICELADKYDAMVMVDDSHAVGFMGKTGRGTPEHFGVSDRIDIVTGTLGKALGGASGGYTASNQVVIDWLRQRSRPYLFSNTLAPVIAHTSCVVLDKLSTNNSLAEKLKRNSHYFREGMTQLGFELIPGEHPIIPVMLGDASLAGRIANRLLDLGVYVVGFSYPVVPKGLARIRTQMSAALELHHLDKALKAFETVGKEFSVI

SEQ ID NO: 39912 - protein, 340 aa, Legionella pneumophila str. Paris
MKSLVKAKKEPGIWMQDIPVPEYGVNDVLIKIKRTAICGTDIHIYSWDEWAQATIPVPMTVGHEFYGEIVEVGKEVQGLKVGQRVSGEGHITCGFCRNCRAGKRHLCRNTLGVGVNRPGCFAEYLALPATNVIALPDNITEEQAAILDPFGNAAHCALAFDVVGEDVLITGAGPIGIMAAAIVRHIGARHVVITDVNDHRLELARQMGVSRAVNVKYQKLIDVANELGMLEGFDVGLEMSGNPMALNDMMKAMNHGGHVALLGIPPQETPIDWNQVIFKGLVIKGIYGREMFETWYKMIAMLQSGLNISPVITHNFPVDEYQHAFQIMASGQSGKVILNW

SEQ ID NO: 39913 - protein, 133 aa, Oryza sativa
MKTRSQTAPKPLKTVRLPPVKPRPKPPPPQPQPPPSRKKGQPLVDRRRPKKPPTAFFYFMEDFRKTYKEENPSVKSMQEVGKACGEKWNTMTFEERVKYYDIATEKRAEYEKAVAEFDKKKESGELSEESDYD

SEQ ID NO: 39914 - protein, 113 aa, Brassica rapa
LVDKLTADNRVYHKACFRCHHCKGTLKLSNYNSFEGVLYCRPHFDQNFKRTGSLEKSFEGTPKIGKPDRPLEGERPAGTKVSNMFGGTREKCVGCDKTVYPIEKVSVNGTLYP

SEQ ID NO: 39915 - protein, 765 aa, Sclerotinia sclerotiorum
MNRYDDGELEISLAPSANHRAQHRSSEASSNPRRDSQNGGNRRMESAPQKKTEQRVGAYSVVRTLGEGSFGKVKLAVHRVTQQQVALKIIARRKLISRDMAGRVEREIEYLQLLRHPHIIKLYTVIKTPHEIIMVSEYAGNELFDYIVQHGKMREDEARRFFQQIICAVEYCHRHKIVHRDLKPENLLLDENLNVKIADFGLSNIMTDGNFLKTSCGSPNYAAPEVINGKLYAGPEVDVWSCGVILYVLLVGRLPFDDEHIPSLFAKIARGQYNVPSYMGREAAALIKKMLAVNPVYRATIAEIRDDPWFTTNLPAYLQPPVEEFIDTGVDPAKAINPRAIAPHASPAIQEKLHVQVTEKISKTMGYGIKDVQEALAAEEPSAIKDAYLIVRENKLMQANPNLTDDKNQLLFQIPSPPTYDSTIPPSMPDSPSPLVKERPGNIPPTAPPFQPRPSPLLDAVSPRSSSSIGTDRSFVRPYVSKIGILPSSIPQYHKEFMETHKSGHQESTLSNSHSETIEPSPQTEAEKAETVRRLNPHSRSLAKLDEGKKPAGMTPVPVKKAKPTKWQFGIRSRNQPLEAIGCIYRALQKLGAEWLVGDEWTPGQSENNGNKRNDDNDDNDDPNGSGASLHRETSMNDNSKKNRFSGIDKKGNYKLPEDPWVLHVRWKKTDIRRHSIASLNSSTSSPAHPSSMPKDEGLDSIDGGVIMHLDIQLYEMEPGVYLVDFKCAGYETADGMMCEEKDVTSPFPFLDLASKLIIQLAEAD

SEQ ID NO: 39916 - protein, 332 aa, Burkholderia sp. 383
MTQPVTAIRIGIDRYGDAGVLRRVDAPVAPPGAGEVRIRQTAIGVNFVDIYFRTGAHALPALPDALGVEAAGVIDAVGPGVTDLVPGQRVAYAGMPTGSYASLRTMPAERVLPIPDGLSDEAAAAGLLKGITVYMLLHHVRQVGAGDTVLVHAAAGGVGLLATQWARALGARVLGTVGSAAKAALARTHGAEAVVDYREEDFVAAARAFGGGAGVDFAIDGIGGDVLTRTLGAVRPFGMVASIGQVAAIGVRQTFDLDELGPVRSIALARPSVLGFIARDVVGYREAARATLERLAGGMHVEIGARLPLEEAADAHRLMESRATKGGVVLVP

SEQ ID NO: 39917 - protein, 285 aa, Oryza sativa (japonica cultivar-group)
MGRGRIEIKRIENTTSRQVTFCKRRNGLLKKAYELSVLCDAEVALIVFSSRGRLYEYSNNNNYLKKDYSVLIFLVLCVKATIDRYKKAHACGSTSGAPLIEVNAQQYYQQESAKLRHQIQMLQNTNKHLVGDNVSNLSLKELKQLESRLEKGISKIRARKNELLASEINYMAKREIELQNDNMDLRTKIAEEEQQLQQVTVARSAAMELQAAAAAQQQQQNPFAVAAAQLDMKCFFPLNLFEAAAQVQAVAAQRQQIIPTELNLGYHHHLAIPGAAAADAPPPHF

SEQ ID NO: 39918 - protein, 137 aa, Marchantia polymorpha
MARTKQTARKSTGGKAPRKQLASKAARKTAPVTTGGVKKPHRYKPGTVALREIRRYQKSTELLIRKLPFQRLVREIAQDFKSDLRFQSSAIGALQESVESYLVSLFEDTNLCAIHAKRVTIQSKDIQLARRLRGERN

SEQ ID NO: 39919 - protein, 159 aa, Triticum aestivum
  misc_feature (55)..(55): Xaa can be any naturally occurring amino acid
  misc_feature (74)..(74): Xaa can be any naturally occurring amino acid
  misc_feature (89)..(89): Xaa can be any naturally occurring amino acid
  misc_feature (110)..(110): Xaa can be any naturally occurring amino acid
  misc_feature (129)..(129): Xaa can be any naturally occurring amino acid
  unsure (1)..(159): unsure at all Xaa locations
MVWVFSVCKHCLKFYWMSPECMVTPSMQVVVDVCAVPRHPILGGAMHNVINRHTXLGKATRLMVAAWGLNTCSXSRNTSETRSLVVSVXPPYNVSSKIVNHVCHRYSLSXLGLGINKVAGSVFSIGHLXVLSKLQCLGCLNGVKMVLKHIGYAVKLDNG

SEQ ID NO: 39920 - protein, 136 aa, Marchantia polymorpha
MARTKQTARKSTGGKAPRKQLASKAARKSAPSTGGVKKPHRYKPGTVALREIRRYQKSTELLIRKLPFQRLVREIAQDFKSDLRFQSSAIGALQESVESYLVSLFEDTNFCAIHAKRVTIQSKDIQLARRLRGERN

SEQ ID NO: 39921 - protein, 194 aa, Leptolyngbya boryana
MMKFLKQVGDYTKEAIQAGKYIGQGLSVTFDHMRRRPITVQYPYEKLILSERFRGRIHFEFDKCIACEVCVRVCPINLPVVDWEFNKETKKKKLNHYSIDFGVCIFCGNCVEYCPTNCLSMTEEYELSTYDRHELNYDNVALGRLPYKVTNDPMVTPLREFAYLPKGAIDPHDLPAGSRRAGLRPEEIVEQSQQ

SEQ ID NO: 39922 - protein, 411 aa, Glycine max
MVTMEESPRSPEAKLGLRVEDLWDIQEPQLSPDEKLNACFESIPVSAFPPPPSNQEVEIKSDATLAEAVKLLAEHSILSAPVVDVDAPEDASWIDRYIGIVEFAGIVVWILHQSEPTSPRSPSSGAANTAAVTGVAYEALGLESAATTSGNFFEDLTSSQLYKNTKVRDISGSFRWAPFLALERSNSFLTMLLLLSKYKMKSIPVVDLGAGRIDNIITQSSVIHMLAECAGLQWFESWGTKKLSEVGLPMVTPNHIIKVYEDEPVLQAFKLMRKKRIGGLPVMERGGSRAIGNISLQDVQFLLTAPEIYHDYRSITAKDFLTAVRSYLEKHEGAFPMSGDLITCNKNCTIKELIQLLDHEKNHRVYVADNEGNLEGLITLRDIISRLVHEPRGYFGDFFDGVLPMPPNSRV

SEQ ID NO: 39923 - protein, 136 aa, Marchantia polymorpha
MARTKQTARKSTGGKAPRKQLASKAARKSAPSTGGVKKPHRYKPGTVALREIRRYQKSTGLLIRKLPFQRLVREIAQDFKSDLRFQSSAIGALQESVESYLVSLFEDTNLCAIHAKRVTIQSKDIQLARRLRGERN

SEQ ID NO: 39924 - protein, 260 aa, Neurospora crassa
MDPQNPSSAGHNQQQRQQPVYDTSQGGHYGFAPSDLYTGTWANVHQGLQGNYKEILTAYWQQTINHLENDTHDYKLHQLPLARIKKVMKADPEVKMISAEAPILFAKGCDIFITELTMRAWIHAEENKRRTLQRSDIASALSKSDMFDFLIDIVPREEASTHAKRATGQSAAAAAQAAQNAAQQAQGMPGVAAPNHGGQHPMAAPDYTLGGHAIAPEADYRQQNMYSGQVQPGAPAPYGQPQPPMYDVDGMYYSTMPPQQ

SEQ ID NO: 39925 - protein, 136 aa, Marchantia polymorpha
MARTKQTARKSTGGQGPRKQLASKAARKSAPSTGGVKKPHRYKPGTVALREIRRYQKSTELLIRKLPFQRLVREIAQDFKSDLRFQSSAIGALQESVESYLVSLFEDTNLCAIHAKRVTIQSKDIQLARRLRGERN

SEQ ID NO: 39926 - protein, 178 aa, Triticum aestivum
  misc_feature (145)..(145): Xaa can be any naturally occurring amino acid
  misc_feature (151)..(151): Xaa can be any naturally occurring amino acid
  unsure (1)..(178): unsure at all Xaa locations
MAPTVMASSATSVAPFQGLKSTAGLPVSRRSNGASLGSVSNGGRIRCMQVWPIEGIKKFETLSYLPPLSTEALLKQVDYLIRSKWVPCLEFSKVGFIFREHNASPGYYDGRYWTMWKLPMFGCTDATQVINEVEEVKKEYPDAYXRIIGFXNMRQVQSSVHAFSTGCKIGRLTVTTAI

SEQ ID NO: 39927 - protein, 399 aa, Bordetella bronchiseptica RB50
MFEHVQAYPGDPILSLNEDFQKDPRAGKVNLTIGIYFDEAGRIPVMAAAREAEAALLADIGPRPYLPMAGLPAYRDLVQELVFGAGSAARRAGRIATVQTLGGSGALKVGADFLKRYFPKSEVWVSDPSWENHRTIFEGAGFAVHTYPYYDDASGGLRFDEMLATVGGLPAGSVVLLHACCHNPTGVDLDRAQWDALIPVLRERGLIAFVDMAYQGFGDGLDDDAYAVRAIAEAGVTCVVANSFSKNFSLYGERCGGLSVVCETAEQAGCVLGQLTSTIRAIYSNPPTHGARIVAQVLGTPALRQSWEAELGAMRERIQAMRRAIHDGLAGRVEPRMLQRYLSQRGMFTYTGLGAEQVETLRRDQGVYLLRSGRMCVAGLNRDNVAVAADAIASVLARG

SEQ ID NO: 39928 - protein, 256 aa, Brassica oleracea var. botrytis
MGRGRVQLKRIENKINRQVTFSKRRAGLMKKAHEISVLCDAEVALVVFSHKGKLFEYSTDSCMEKILERYERYSYAERQLIAPESDSNTNWSMEYNRLKAKIELLERNQRHYLGEDLQAMSPKELQNLEQQLDTALKHIRSRKNQLMYDSINELQRKEKAIQEQNSMLSKQIKERENVLRAQQEQWDEQNHGHNMPPPPPPQQHQIQHPYMLSHQPSPFLNMGGLYQEEDQMAMRRNDLDLSLEPVYNCNLGCFAA

SEQ ID NO: 39929 - protein, 270 aa, Thermobifida fusca YX
MTVLRRKLAEAKAEGRAALVGYYPAGFPDVASSIRVVQAMVAGGCDVIEVGFPYSDPTMDGPVIQQAADRALAAGTTPKDVLAVVRAVADAGAAALVMSYWNPIEKYGVDAFAADLAAAGGSGLITPDLIPEEAEPWIKASDAAGIDRIFLVAPSSTDERLAKTCAASRGFVYAASLMGVTGTRDKVAATARRLVERTRAVTRDSGLPICVGLGISNGAQAAEVASYADGVIVGTGFCQRVLDAPDVDTACQQVRDFAAELAAGVRAAAR

SEQ ID NO: 39930 - protein, 256 aa, Brassica oleracea var. botrytis
MGRGRVQLKRIENKINRQVTFSKRRAGLFKKAHEISVLCDAEVALVVFSHKGKLFEYSTDSCMEKILERYERYSYAERQLIAPESDVNTNWSMEYNRLKAKIELLERNQRHYLGEDLQAMSPKELQNLEQQLDTALKHIRSRKNQLMYDSVNELQRKEKAIQEQNSMLSKQIKEREKVLMAQQEQWDQQNHGQNMPSPPPPQQHQIQHPYMLSHQPSPFLNMGGLYQEEDPMAMRRNDLDLSLEPVYNCNLGCFAA

SEQ ID NO: 39931 - protein, 232 aa, Streptococcus agalactiae NEM316
MDIFGEFLGTALLVLLGNGVVAGVVLPKTKNHNSGWIVITFGWGLAVAIAVLVSGNISPAHLNPAVSLAFAIKGDLAWGTAILYMIAQIIGAMLGSLLVYLQFRPHYEAAENKADILGTFATGPALKDNFSNFLSEVLGTLVLVLTIFAIGKYNMPPGVGTMSVGMLVVGIGLSLGGTTGYAINPARDFGPRLLHALLPMKNKGDSDCTYSWIPIVGPMVGAILAALIFAMM

SEQ ID NO: 39932 - protein, 368 aa, Enterococcus faecalis V583
MEKETSKKYEAAVAAFIKENKPKGTVVYDDLANQLATPYTLDAEAMEKLIQKVEDAGISVVDENGDPSEHSLKKDEKEAEKAQAEDLSAPTGVKINDPVRMYLKEIGRVQLLTAAEEVELALKIEEGDQEAKQRLAEANLRLVVSIAKRYVGRGMQFLDLIQEGNMGLMKAVEKFDYRKGFKFSTYATWWIRQAITRAIADQARTIRIPVHMVETINKLIRIQRQLLQDLGREPTPEEIGAEMDLPTEKVREILKIAQEPVSLETPIGEEDDSHLGDFIEDQDATSPAEHAAYELLKEQLEDVLDTLTDREENVLRLRFGLDDGRTRTLEEVGKVFGVTRERIRQIEAKALRKLRHPSRSKQLKDFLE

SEQ ID NO: 39933 - protein, 472 aa, Bartonella birtlesii
LREVASKTNDIAGDGTTTATVLGQAIVQEGVKAVAAGMNPMDLKRGIDSAVAEVVESLFKKAKKIQTSAEIAQVGTISANGASEIGKIIADAMDKVGNEGVITVEEAKTAETELEVVEGMQFDRGYLSPYFVTNAEKMVADLDDPYILIHEKKLSNLQSLLPVLEAVVQSGKPLLIIAEDVEGEALATLVVNKLRGGLKICAVKAPGFGDRRKAMLEDIAILTSGQVISEDVGIKLENVTLDMLGRAKKVHISKENTTIVDGSGQKAQISARVSQIKAQIEETTSDYDREKLQERLAKLAGGVAVIRVGGATEVEVKEKKDRVDDALNATRAAVEEGIVAGGGTALLRAANAITVKGSNADQEAGINIVRRALQAPARQIATNAGEEAAIIVGKVLENNSDTFGYNTATGQFGDLISLGIVDPVKVVRSALQNAASIASLLITTEAMVAELPKKETPMPPMGGGRNGWNGRN

SEQ ID NO: 39934 - protein, 333 aa, Mycobacterium avium subsp. paratuberculosis
MFYDDDADLTIIQGRKVGVIGYGSQGHAHSLSLRDSGVQVKVGLKEGSKSRAKVSEQGLDVDTPAAVAKWADVIMLLAPDTAQADIFKNDIEPNLSDGDALFFGHGLNIHFGLIKPPAEVTVAMVAPKGPGHLVRRQFVDGKGVPCLIAVDQDPTGKGEALALSYAKAIGGTRAGVIKTTFKDETETDLFGEQAVLCGGTEELVKAGFDVMVEAGYPPEMAYFEVLHELKLIVDLMYEGGIARMNYSVSDTAEFGGYLSGPRVIDAGTKDRMREILRDIQNGDFVKKLVANVEGGNKQLEQLRKENAEHPIEVVGKRLRDLMSWVDRPITETA

SEQ ID NO: 39935 - protein, 334 aa, Glycine max
VLFLDSPAGVGFSYSNKTTDLYTFGDQKTAEDAYTFLVNWFERFPQYKHREFYIAGESYAGHYVPQLAQIVYEKNKGIKNPVINFKGFMVGNAVTDDYHDYVGTFEYWWTHGLVSDSTYRMLKIACNFGSSQHPSVQCMQALRVATVEQGNIDPYSVYTQPCNNTASLRRGLKGRYPWMSRAYDPCTERYSDLYFNRPEVQKALHANVTGIPYAWKACSDIVGNYWTDSPLSMLPIYQELISAGLRIWVYSGDTDAVVPVTATRYSIDALKLPTIINWYPWYDNGKVGGWSQVYKGLTLVTVRGAGHEVPLHRPRQAFILFRSFLENKSMPSTS

SEQ ID NO: 39936 - protein, 329 aa, Oryza sativa (japonica cultivar-group)
MDLSGAQGELPLPMHAAASPYLGLHHDHHHHHGGGGGGGGMNGRHMSPPTPPAAAEESKAVVVVSSSATAAARYRECLKNHAAAIGGSATDGCGEFMPGGEEGSLDALRCSACGCHRNFHRKELDAAAAPPLHHHHHQLLGVGAHPRGHGHHHHHLLVAALPPPTRMVMPLSAMHTSESDDAAARPGGGAAARKRFRTKFTAEQKARMLGFAEEVGWRLQKLEDAVVQRFCQEVGVKRRVLKVWMHNNKHTLARRHLHPSPAAAAGDDDDDGAPPPHPDPRRRELAAAAAPPPAPVTQHIKKSVDNKSLISSLAALHCIALLLFHQIDA

SEQ ID NO: 39937 - protein, 191 aa, Medicago sativa
FPFEKRSDSIPLSISQLPSVLKLFSIPEDSPQAKSMRETLEQCQAEPVAGESKTCANSIESMLEFVDKIIGSDSKHNVLTTSHPSPSAIPLQKYTILKVSHDISAPKWVSCHPLPYPYAIYYCHYIATGTRVFKVSLVGDVNGDKIEAVGMCHLDTSDWNPDHMIFRTLRIKPGKNVPVCHLLSINHLLWV

SEQ ID NO: 39938 - protein, 339 aa, Arabidopsis thaliana
MCNLLNIEKDPIRVLITGAAGNIGYAIAPMIARGIMLGPDQPMILHLLDIEPASSSLEAVKMELQDSAFPLLKGVIATTNVVEACKDVNIVIMIGGFPRIAGMERKDVMSKNVVIYKAQASALERYASDDCKVLVVANPANTNALILKEFAPSIPEENITCLTRLDHNRALAQLADKLSVPVSSVKNVIVWGNHSSTQYPDTNHATVSTKTGDRPLKELVTDHNWLKNEFIVEVQQRGAAVLRARKQSSAFSAAGAACDHIRDWFLGTPKGTWVSMGVCSDGSYGIPPGLVYSFPVICEKGSWKIVQGLSIDEFSREKMDDSARELAEEKDLAYSCLNV

SEQ ID NO: 39939 - protein, 313 aa, Sulfolobus solfataricus P2
MVDVIALGEPLIQFNSFNPGPLRFVNYFEKHVAGSELNFCIAVVRNHLSCSLIARVGNDEFGKNIIEYSRAQGIDTSHIKVDNESFTGIYFIQRGYPIPMKSELVYYRKGSAGSRLSPEDINENYVRNSRLVHSTGITLAISDNAKEAVIKAFELAKSRSLDTNIRPKLWSSLEKAKETILSILKKYDIEVLITDPDDTKILLDVTDPDEAYRKYKELGVKVLLYKLGSKGAIAYKDNVKAFKDAYKVPVEDPTGAGDAMAGTFVSLYLQGKDIEYSLAHGIAASTLVITVRGDNELTPTLEDAERFLNEFKT

SEQ ID NO: 39940 - protein, 514 aa, Ipomoea batatas
MGNRTSRHKHGEKHRSEAGSHQTHIEYTKSPGQGAGLPVRPPSIPKSVSKSDAILGKAYEDVRAHYSLGKELGRGQFGVTYLCTEIRTGKQYACKSISKKKLVTKGDKDDMRREVQIMQHLSGQPNIVEFKGAYEDANSVYLVMELCAGGELFDRIIAKGHYSERAAASLCRSIVNVVHTCHFMGVMHRDLKPENFLLSDKTENAALKATDFGLSVFIEEGRVYKDLVGSAYYVAPEVLGRKYGKEADVWSAGVMLYILLSGVPPFWAETERGIFNAILKGELDFQTKPWPSISSIAKDLVRGMLAPDPKRRLTAAQVLEHPWMREDGEASDRPLDSAVLSRMKQFRAMNKLKKLALKFIAENLSEEEIHGLKAMFTNIDTDNSGTITYEELKKGLAQLGANLTEAEVKQLMEAADVDGNGSIDYIEFITATMHKHRLEREENLYKAFQYFDKDSSGFITRDELETAMKEHGIADAATIKEIISEVDADHDGRINYEEFCTMMRSGTKQQAKLF

SEQ ID NO: 39941 - protein, 496 aa, Methanothermobacter thermautotrophicus str. Delta H
MSELQKRAMRFLEDKNPVIVSNRGPVEFFKENDETVMKRGAGGLVSTLLPLVERFSGVWISSAMTVEDARVASGYPENRVPLPEDDPRFTVSFVIVDRERYESYYSIISNPLLWFVQHYMWNTPYDPQIDDKVYRAWEDGYVHVNKKFGDKVISEIERNEKDSLIMLQDYHLYLCPFFIKKEIGDVFLSHFIHIPWPQRDYFNILPERMRADIIGGLLSNTILGFHIERYCANFFECCEDLGYEVDGDRGIVRNGDEKTLVKSYPISVDPESMERTVSSPTFMEKDEFVRKLKGNMFLIYRTDRADLSKNIIRGFRAYELFLRDHPEFHGKVKFLATGKPTRQQIREYRNYSEEVKDTVEEINEKYGTDEWKPIEYIYRADYELVAAAFKNYDCLIVNPIADGMNIVPKEAAIINREDGALILSERAGCYDELAEHVIGVNPFDIKETADAIYSAMKMSPGKRKKLSEGLKSRVLKRTIYHWINEQFDDFEDLWES

SEQ ID NO: 39942 - protein, 385 aa, Methanothermobacter thermautotrophicus str. Delta H
MFMTSVVVMAGGKGTRIRPLTFSRPKPLVPVANRPILDYIIHRVLDSGYSKVVMTLGYLKDQIRSHVLAEYPEIDFRFSVEKKPLGTAGGVKAAASEINETFIVLSGDVIFDLDLREMVKFHRKKNALVTVALTPVEDPSHYGIAVLDDDGKIKRFHEKPRPEEVFSKIANAGIYVMEPEVIEHIPQGSSDFSADIFPVLIERDAGMYGFLFDGYWNDAGKPNTFLRANHDVLNGTVTPEPDGEIAEEVPGRFGKIWIGRDVVIGDRVRIVGPAVLGDGSRVDDGAYIGKNTVIGSRVNVGENSFIRGSVILDGCVIGRGSQLLNCVVDEDCEIGAGCAIDRCAIIGRGAFIGPSTVIRSHCSVSNRLRILSGSLVDSDYPLVPE

SEQ ID NO: 39943 - protein, 264 aa, Methanothermobacter thermautotrophicus str. Delta H
MPDYLFDFLDELKFLRNGRKTAIITDIDGTISEIAPTPEEAVVDDEMRDVLRDLASRYRVLAFISGRPVREALRMVGVPGAVYVGNHGLEYIINGNYQRFSEVEEYIPLIKKCALELRDKIDEENVIFEDKGICYSIHYRQCTDPELSRKRILKNLQEIPESKGLKVDHGRMLVELKPPLHYNKGFIVRKILEDSDVSSAVYLGDDITDADAFREIRKLESERGMKNVPILVLSKEIPPEVKNSARFFVYGISEVLRFFRWLLK

SEQ ID NO: 39944 - protein, 141 aa, Polaromonas sp. JS666
MAIERTLSIIKPDAVAKNVIGQIYARFEAAGLKVVAAKMAHLSKGEAEAFYAVHKERPFFKDLVSFMISGPVMIQALEGEGAILKNRDLMGATDPKKAAAGTIRADFADSIDANAVHGSDAVETAQAEIAFFFPGMNIYSR

SEQ ID NO: 39945 - protein, 661 aa, Streptococcus agalactiae NEM316
MTFDTIDQLAVNTVRTLSIDAIQAANSGHPGLPMGAAPMAYVLWNKFLNVNPKTSRNWTNRDRFVLSAGHGSALLYSLLHLAGYDLSIDDLKQFRQWGSKTPGHPEVNHTDGVEATTGPLGQGIANAVGMAMAEAHLAAKFNKPGFDLVDHYTYTLHGDGCLMEGVSQEAASLAGHLKLGKLVLLYDSNDISLDGPTSQSFTEDVKGRFESYGWQHILVKDGNDLEAIAAAIEAAKAETDKPTIIEVKTIIGFGAEKQGTSSVHGAPLGAEGITFAKKAYGWEYPDFTVPAEVVARFASDLQARGAKAEEAWNDLFAKYEVEYPELAAEYKEAFAGQAETVELKAHDLGSSVASRVSSQQAIQQLSTQLPNLWGGSADLSASNNTMVAAETDFQASNYAGRNIWFGVREFAMAAAMNGIALHGGTRVYGGTFFVFSNYLLPAVRMAALQNLPTVYVMTHDSIAVGEDGPTHEPIEQLASVRSMPNLNVIRPADGNETNAAWQRAVSETDRPTMLVLTRQNLPVLEGTSELAQEGVNKGAYILSEAKGELDGIIIATGSEVKLALDTQDKLESEGIHVRVVSMPAQNIFDEQEASYQEQVLPSAVTKRLAIEAGSSFGWGKYVGLNGLTLTIDTWGASAPGNRIFEEYGFTVENAVSLYKEL

SEQ ID NO: 39946 - protein, 163 aa, Glycine max
MQTHDATLSNLRSRLTKLQVVRHFWERNDIKGATNALRKLPDHSVQADVISVLVERMEIFTLDLFSCLLPVLTGLLDSKIERHVKVSLDMLLKVVAVFGPTVLATVSAPPSVGVDLHQEERRECCNKCFMELQKIQMTLPILIRKGGILARSALELNLVLQQS

SEQ ID NO: 39947 - protein, 320 aa, Colwellia psychrerythraea 34H
MTNSSSQLAQLKQMTTVVADTGDIEAIAKFQPQDATTNPSLLLKAASLPNYQGLVKDSVAWAKTQSDNAEQQVIDAADKISVLIGLEILKIVPGRISTEVDARLSFDTSASITKAHKLIAMYNEAGISNDRILIKLASTWEGIKAAEQLEQEGINCNLTLLFSFAQARACAEAGAYLISPFVGRILDWYKKDTGRNDYASNEDPGVVSVTSIFNYYKLQGFNTVVMGASFRNIGEILELAGCDRLTISPQLMEELANSTDTVIQKLTACEATAEKEAALSQAEFRWQMNEDPMATEKLAEGIRNFTIDQVKLEKQLTDLL

SEQ ID NO: 39948 - protein, 259 aa, Brassica oleracea var. botrytis
MGRGRVEMKRIENKINRQVTFSKRRNGLLKKAYELSVLCDAEVALIVFSSRGKLYEFGSVGVERTIERYHRCYNCSVTNNRPEESKQNWCQEVAKLKAKYESLVRTNRHLLGEDIGEMGVKQLQALERQLEAALTATRQRKTQVMMEEMEDLRKKERQLGDINKQLKIKFEAGGHAFKSFQDFWPNSAASMAGDPNNSKFPVQPSHPDSVDCNTEPFLQIGLVLVYIRFQQHYYVQGEGSSVPKSNVACETNFVQDWFL

SEQ ID NO: 39949 - protein, 254 aa, Symbiobacterium thermophilum IAM 14863
MQLFSLEGRVALVTGAGRGIGRALALGLADAGADVVCLARTGSEVEAAAEEVRARGRRALAVTADVTSQAQVTEAVEAALDRFGKIDILVNNAGINIRKPALEVAEADWDRVVQTNLKGPFLVAQTVGRHMCERGYGRIINVASVGGAVALRTGVAYGASKAGLMHMTRILAMEWARYGVTVNGIGPWYFRTPLTEKLLQDEQYVAEILARTPMRRIGDLAELVGPVVFLASDASSYVTGQVLMVDGGMSVYGF

SEQ ID NO: 39950 - protein, 254 aa, Symbiobacterium thermophilum IAM 14863
MGMLDGKVAIITGAAMGMGAATAELFAREGARVVIADLNEELGRAQARKIQDAGGAAAFVRADVSRAGDVEAMVQFAVDTFGRLDVAVNNAAHSPDTRPLADLDEAVWDAVIGVDLKGVALCLKYELRQMLKQGGGGSIINISSVSGIRPQPGTPAYVAAKHGVIGLTKQAAMDYSPHGIRVNAVAPGAVDTPMLQKALVEFNLEPVSYAKQLSLLGRFAQASEVAEVNLWLASDRSSYVTGAVYTVDGGYTAM

SEQ ID NO: 39951 - protein, 476 aa, Thermobifida fusca YX
MLHVTRRAKIVATLGPATSSPEVLRKLVDAGLDVARLNLSHGTHDDHQTMYRNVRAAAEASGRNVGILADLQGPKIRLGTFVDGSVTLSPGDEFTITIDDVPGDRHRVSTTYKGLPGDVRPGDRVLIDDGRVVLECVKSTSTDVHTRVIVGGPVSNHKGLNLPGVSVAVPALTEKDERDLRWALEQGVDMVALSFVRSPADAEDVHRVMDEMGVHVPLIAKIEKPQAVERLQDIIEAFDGVMVARGDLGVELPLENVPMVQKRAIERCRDKAKPVIVATQMLESMIHNPRPTRAEASDVANAVLDGADAVMLSGETSVGKYPVETVQTMARIIAAAEQESLRASHILHRVPETVGGSIARAAAEVGATVGAKALVAFTSSGETARRLARYRSPIPLLAFTTEPATRAQLSLTWGVETHLVPWVDNTDDMVRQVENELLDMDYQKGDKVVIVAGSPPGTRGSTNMLRVHRMGDAISN

SEQ ID NO: 39952 - protein, 267 aa, Streptococcus agalactiae NEM316
MKRHFETTRRIVIKVGTSSLVQTSGKINLSKIDHLAFVISSLMNRGMEVILVSSGAMGFGLDILKMDKRPQEISQQQAVSSVGQVAMMSLYSQIFSHYQTHVSQILLTRDVVVFPESLQNVTNSFESLLSMGILPIVNENDAVSVDEMDHKTKFGDNDRLSAVVAKITKADLLIMLSDIDGLFDKNPNIYDDAVLRSHVSEITDDIIKSAGGAGSKFGTGGMLSKIKSAQMVFDNNGQMILMNGANPRDILKVLDGHNIGTYFAQGK

SEQ ID NO: 39953 - protein, 417 aa, Streptococcus agalactiae NEM316 [sequence omitted]

SEQ ID NO: 39954 - protein, 337 aa, Thermus thermophilus HB27
MKIYYEHDADLGFILGKKVAVLGFGSQGHAHALNLKDSGVDVRVGLRKGSRSWEKAEAAGLRVLPVAEAVREADVVMVLLPDEKQAQVYREEVEPNLKEGGALAFAHGFNVHFGQIKPRKDLDVWMVAPKGPGHLVRSEYQKGSGVPALVAVHQDASGSAFPTALAYAKAIGAARAGVIATTFKDETETDLFGEQAVLCGGLTRLIRAGFETLVEAGYPPEMAYFETVHEVKLIVDLIYEAGLKGMRYSISNTAEYGDYTRGDLAVPLEETKRRMREILRQIQSGEFAREWMLENQVGSPVLEANRKRWAAHPIEEVGSRLRAMMPFLKARVMEEVG

SEQ ID NO: 39955 - protein, 916 aa, Zea mays
MASTSTFLSTLASRSAAADSLRSAVPSFAKIVRFLPAQAQISRRRRAAVLPTPRAAVSGTEKAPSSKHERVVRVHSTQEFDDALKAAKNRLVVVEFAASDSEDSSQIYPTMVQLSRTCGDVDFLLVLRDDESEATEELFRREGVTKVPHFNFYKGAEKVHEEEAIGPERLAGDVLYYGDSHSAVVQLHSREDVEALIDEHRGDKGKLVVLDVGLKHCGPCVKVYPTVLKLSRSMVDNTVFARMNGDENDSCMEFLRAMKIVEVPTFVFIRDGQIVGRYVGSGKGELVGEILRYNGVRVIKNGGSTEDFLPASACSVLEGRLVKEQNAEGRVAVSKVKELVEGFSSGSVSRDFISSRVGQMIFDESEVLFMSGPYGDSVQYKNGEPTKQFAKCDGVRILSNSSMIVIHRVSVFITSSVGIGNKIPAALLYNVRDHYGRQNKGSVQLGITGLTQWWLNAFSSGNSGMAVQSQPNIQRNSMNKLRGLSFRMVYDKGKENIVADTFSQGGSLMATYGDLAIQIDIPKSIVTNSYALDKLPIVTIHSPHGVVYSVQWGKVKRLHQFGKQCLVSEQAKEEQQLFGGFWHLFSVLQGIWEGLKSDFLEDFLIPEGYDFIMMLQCVAQDHLPRWKTLLPFVELWYRPDKNASNPEASELFKEVAYSYNILSDPEKQRQYDNVEFEALENEGVDMEIELSHLGTVRQRAHVPTTIAGGQGCDRPRSARLWGEVPLWYLVAKDQSDPLVAGRSVINSHRKMERSGWWGDHEGQSTSVPSIVSGHEGALETRLGRAVRSIEQQQRRCLHLVKSAVGKQGTTPIHGGGSTTSDRAVAGSRTLATGLQPATTKAVTPVNQDMALVVVAALLGPTPRSPPVRRTRSGSNVARVSLVWCFLAWRQHAKGGVQRHEHLAADDVRHSKTERRK

SEQ ID NO: 39956 - protein, 525 aa, Solanum chacoense
MASSGGNMNSFMNSFNSFSSSQFMTSSFSDLLSDNNDNNNKNWGFSDDRIKSFPMINSSSSPASPSSYLAFPHSLSPSMLLDSPVLFNNSNTLSSPTSGSFGNLNSKEGNSRSSEFSFQSRPATSSSIFQSSAPRNSLEDLMTRQQQTTEFSTAKTGVKSEVAPIQSFSQENMPNNPAPVHYCQPSQYVREQKAEDGYNWRKYGQKQVKGSENPRSYYKCTFPNCPTKKKVERNLDGHITEIVYKGSHNHPKPQSTRRSSSQSIQNLAYSNLDVTNQPNAFHENGQRDSFAVTDNSSASFGDEDVDQGSPISKSGENDENEPEAKRWKGDNENEVISSASRTVREPRIVVQTTSDIDILDDGYRWRKYGQKVVKGNPNPRSYYKCTFTGCPVRKHVERASHDLRAVITTYEGKHNHDVPAARGSGSYAMNRPPTGSNNNMPVVPRPTVLANHSNQGMNFNDTFFNTTQIQPPITLQMLQSSGSSSYSGFGNSSGSYMNQMQHTNNSKPISKEEPKDDLFFSSFLN

SEQ ID NO: 39957 - protein, 312 aa, Symbiobacterium thermophilum IAM 14863
MTVAMRDAYGEALAQLGGLRPDVVVLDADLGNSVRCDGFGRLYSDRYIQVGIAEQNMVGVAAGLAACGLVPVVNSFAAFAVCRALDQIRVSVCQTGLPVKVVGSYSGLAVSKGGSTHASVEDIAVMRALPGMTVIVPGDAEEAAQVTRMLPDIPGPVYLRLYRNAVPPVVPAGYRFRPGKAVLLRPGTDVAIVSTGTMTARALEAAGRLAGRGVGAAVLHVPTVKPLDEEAVVDVAARCRAVVTAEEHSVIGGLGAAVAECLGERHPMPVHRVGVPDRFGESGPDDELLAHLGVDEAAIERRVLAALGEGGG

SEQ ID NO: 39958 - protein, 210 aa, Schizosaccharomyces pombe
MLENNGSVILMEPDHLRTAVNRSMTSREGRTKNRFNPITGARLAAGVVALSADKRKVLLVSSAKKHPSWVVPKGGWEADESVQQAALREGWEEGGLVGHITRSLGSFKDKRPTDTIDRRKKYLKQLMSKSSGNDVSTNTELGAEAEKLLLPPRAECEFFEVIVERLEDNYPEMRKRRRKWMSYQEAKEALTSRKDILAALEKSSIIKEEN

SEQ ID NO: 39959 - protein, 273 aa, Symbiobacterium thermophilum IAM 14863
MTAPDVPLLTEIAKRIRVHVIRTVLRLGSGHLGGSLSAAEILSVLYFHTLRIRPEEPDWPGRDRFILSKGHAALAYYAALAERGYFPPDELAGFGALGSRLQGHPDMRRTPGVDMSTGSLGQGLSAGVGMALAARIRGEGWRTYVLLGDGEIQEGQVWEAAMLAGELRLTGLTAILDFNRLSQTRSTTGAHPPDLLPGRWRGFGWEVREVDGHDVSALAAALDRPADGRPLLVVAHTVKGRGVSFMEGRPEWHSHPLTREQAEQALAELGVRP

SEQ ID NO: 39960 - protein, 226 aa, Schizosaccharomyces pombe
MTVEQKIIFFDLDNCLYPKSYKIHNMMAARITAFFSDKLGIPTEEAERLREVYYRHYGIAIRGLVLHHEIDAVDYDQRVDQSLPLEKVIKKDEVLREMLLELRKKYKCWIFTNAYIVHANRVLKYLGIEDCFDGITYCDYNAKDLIAKPMPEMYERVMREAGVTDKDKCIFVDDSYGNILGAREFGWKYTVQLVEHGDPLPQPQAGSHVIRDIHKFKHLLDEIDGE

SEQ ID NO: 39961 - protein, 455 aa, Photobacterium profundum SS9
MLSLALSHLRGEFLRRLLLIALPIALQSMLFSSRSLVDILMLGQLGELEVAAMGIAGKALFVAVIMLFGVSTGGALLTAQYWGAGNREGVKQGTALTWVMSTITAVILGCVFFWMPEKVIGLATQSPGVITLGAKYLAITSFSMFAMAWVISMAVGLRAMHQPGVSTFFSAIGIGLNIFLNWVLIFGKFGFSEMGIVGAAWATLISGLVEVSLLYAYLYSRKHLLAFTTKTLIAVCEWQRVKRFLSLSLPTTFNHLAWSSGIFVYHAIIGQAGVEGLAALSIMTPIESLSLAMLIGISNASAVLIGNQLGANNMEEAYQQAWAVSIFNLLCSIILAIGMLLIQDSILDLFSAISSDTRELAEHFFVVLAVSIVLKSIPMTMIVGVLRAGGDIRFCLYQDLIAQWAIGIPVTAFCALVLKLPLEWIYALLALEEVIKWFGSTIRVRSKAWMNNLVA

SEQ ID NO: 39962 - protein, 354 aa, Mesorhizobium sp. BNC1
MSEQNSQIPVTVLTGYLGSGKTTLLNRILAEDHGKRYAVIVNEFGEIGIDNDLIVESDEEIYEMNNGCVCCTVRGDLVRVVEGLTRRPGRFDAIIVETTGLADPAPVAQTFFMDDDVRAKTKLDAVVALVDAKHLPLRLKDSREAADQIAFADVVVLNKTDLVSPEELATVEAAVRQINPSARIHKTERAGVALSDVLDRGAFDLQRALDNDPHFLDHDDPDHVCGPDCDHDHHHHHHDHDHDHHHHAHGGLSPIHDVGVTSISLRAGEMDPKKFFPWIQKTTQMDGPNILRLKGIIALKDDPDRYVVQGVHMIVEGDHQRAWKEGEKRESRLVFIGRDLETERLKRTFEACQA

SEQ ID NO: 39963 - protein, 368 aa, Pseudomonas fluorescens Pf-5
MSTLHSTPRADGFYMPAEWATQTQAWMIWPERPDNWRLGGKPAQAAHAAVAKAIARFEPVTVAVSAAQYENARARLDVPNIRVVEMSSDDAWVRDTGPTFVINASGEVRGVHWGFNAWGGFEGGLYSPWNRDEQVASKVLEIERCQEYRTEGFVLEGGSIHVDGEGTLITTEECLLNHNRNPHLSREEIEAVLREHLAVEQIVWLPDGLYNDETDGHVDNFCCYVRPGEVLLAWTDDPQDPNYPRCQAALQVLENTRDAKGRTFKVHKMPIPGPLYATEEECAGVDAVEGSQERNPSVRLAGSYVNFLIVNGGIIAPSFDDPMDAQAKAILQQLFPEHEVVMVPGRELLLGGGNIHCLTQQQPAPQRI

SEQ ID NO: 39964 - protein, 431 aa, Photobacterium profundum SS9
MVQRITFDEQALSQRLMNYRRELHRYPEAAWCEFFTTSRIAGHLENLGFELFFSDQIIASDTIMGRDESAIEKEQQRALNWGTDENTISKMQGITGVGALLDTGREGPVYVFRFDIDAVEVMESQNDSHRPCFLGFSSLSPGVAHACGHDAHAAMGLGLAEVLAENIELLNGKIKLLFQPAEEGCRAGKAIAESGWLDDADYFIAAHIGMNVPSGTLVCDPQHFLCSSKFDLHFKGKPAHAGIEPNVGRNALAAACTSVTQMLAIPRHRDGMTRVNIGQLTSGEGRNVIPERAVLKGETRGENRELNSFMYQQVEQIAQASAMMHGVHVEIQAQGEAIGLHNDPEMVDILESVGYDSGFIHVVRQKDFGASEDAGYLVDRVQSKGGKAVYCLVGSDLTAGHHNGDFDIDESRMLSGVKLFASVIEKIQAQQ

SEQ ID NO: 39965 - protein, 392 aa, Triticum aestivum
MDSARSCLVDDVSSGASTGKKASPSPAAPATKPLQRVGSGASAVMDAPEPGAEADSGRVGRLPSSKYKGVVPQPNGRWGAQIYERHQRVWLGTFTGEAEAARAYDAAAQRFRGRDAVTNFRPLTESDPEDAAELRFLAARSKAEVVDMLRKHTYPDELAQYKRAYFAAAAASSPTSSSVPPASSPSSAASPSPAARREHLFDKTVTPSDVGKLNRLVIPKQHAEKHFPLQLPSAGAAVSGECKGMLLNFDDSAGKVWRFRYSYWNSSQSYVLTKGWSRFVKEKGLHAGDAVGFYRSASGSNQLFIDCKLRSKTTTMTTTFVNAAAAPSPAPVMRTVRLFGVDLLTAPAPSHAPEHEDCSMVPKTSKRSMDANAAATPAHAVWKKRCIDFALT

SEQ ID NO: 39966 - protein, 226 aa, Candida albicans SC5314
MDIAALIQPIAVSWHAVKVSNFKPGSNALILGGGPIGLTTIFALKGNQVSQIVLSEPALARRQLAEKLGVITYDPTGKSIEQCVEDLKKLSPGGYGYEYSYDCSGVKATFETGLKTLKIRGCATNVAIWAHKSIPLYPMEITLSEKMLTGSICFVKKDFEESIKAIENGLISIDELKMLITSKIHLQDGIEKGFLELINHKEKHIKILFSPKSEYLLSNGVNDSNK

SEQ ID NO: 39967 - protein, 460 aa, Mycobacterium bovis AF2122/97
MSRSHPSVPAHSIAPAYTGRMFTAPVPALRMPDESMDPEAAYRFIHDELMLDGSSRLNLATFVTTWMDPEAEKLMAETFDKNMIDKDEYPATAAIEARCVSMVADLFHAEGLRDHDPTSATGVSTIGSSEAVMLGGLALKWRWRQRVGSWKGRMPNLVMGSNVQVVWEKFCRYFDVEPRYLPMERGRYVITPEQVLAAVDENTIGVVAILGTTYTGELEPIAEICAALDKLAAGGGVDVPVHVDAASGGFVVPFLHPDLVWDFRLPRVVSINVSGHKYGLTYPGVGFVVWRGPEHLPEDLVFRVNYLGGDMPTFTLNFSRPGNQVVGQYYNFLRLGRDGYTKVMQALSHTARWLGDQLREVDHCEVISDGSAIPVVSFRLAGDRGYTEFDVSHELRTFGWQVPAYTMPDNATDVAVLRIVVREGLSADLARALHDDAVTALAALDKVKPGGHFDAQHFAH

SEQ ID NO: 39968 - protein, 240 aa, Glycine max
  misc_feature (153)..(153): Xaa can be any naturally occurring amino acid
  unsure (1)..(240): unsure at all Xaa locations
MRKFTTIFSHIKSTKMNFSVSLLHRSSPFCPNQPPHPNFKNLTWQNRDSLLLFPLLCSRHFASTTAQNPSTLNALQDHYQAIDFPGGAVQFIPEMRFISESPKERIPCYRVLDDNGQPILGHNFVQVSKEVAVKMYTDMVTLRSMDTIFYEAXRQGRISFYVTAIGEEAINVASAAALAMDDVVFPQYREAGVLLWRGFTLQEFANQLFSNIYDYGKGRQMPAHYGSKKHNYFTVASTIA

SEQ ID NO: 39969 - protein, 124 aa, Frankia sp. BMG5.4
PLMRSKTRIVKGGKEPEIWGFDGSSTNQAPGSNSDCVLQPVFTCPDPLRGGDNVLVLCEVQLTDFTPHPTNTRAAARAVAEKYADMSPMFGIEQEYTFFQNGRPLGWPEVRLPRGAGPVLLRRR

SEQ ID NO: 39970 - protein, 480 aa, Deinococcus radiodurans R1
MPLWRGGTLRSDMDTFDVLVIGGGPAGYVAAIRAAQLGFKTACVDAFERGGKPSLGGTCLNVGCIPSKALLDSSERFEMISHDTAEHGIQVAQPQIDVSKMLARKDGVVDKLTGGVAFLFRKNKVTSFHGYGKLVRQDGQEWVVDAAGTEVKAKNVIVATGSNPRALPGVPFGGHIVENSGALQIDQVPGKLGVIGAGVIGLELGSVWRRLGAQVTILEAMPGFLMAADDAIAKEALKQFQKQGLDFHFGVKIGEIKQDDSGVTVTYEENGSQVTAQFDKLIVSIGRVPNTGGLNADGVGLALDERGFVKVDQHYRTNLPGVYAIGDVIGGAMLAHKAEEEGVALAEMIAGQAGHVNYDVIPWIIYTSPEIAWAGLTEKQAKERGLNVKTGQFPFSANGRALGHGDPRGFVKVVADAQTDKLLGVHMIGGGVSELIGEIVAIMEFGGSAEDLARTIHAHPTLSEVVKEAALAVDKRAIHM

SEQ ID NO: 39971 - protein, 602 aa, Daucus carota
MGICVSKPSPEPDLHNHHTSIPVNDTSLPPQDNSIPPKDIAIPAQDNNKPPGKKSPFLPFYSPSPAHFLFSKKSPAVGSPAAGSSNSTPKRLFPFPPPSPAKHIKAAWARRHGSVKPNEAAIPENNEVDGGAGLDKSFGFSKKFGSKFEVGEEVGRGHFGYTCRAKFKKGEFKGQDVAVKVIPKAKMTTAIAIEDVRREVKILRALTGHNNLVQFYDAFEDHTNVYVVMELCEGGELLDRILSRGGKYTEDDAKAVMIQILNVVAFCHLQGVVHRDLKPENFLFKSKDEDSQLKAIDFGLSDYVKPDERLNDIVGSAYYVAPEVLHRSYSTEADVWSIGVISYILLCGSRPFWARTESGIFRAVLKANLSFDEPPWPSVSSEAKDFVKRLLNKDPRKRMTAAQALCHSWIKNSNDIKFPLDILVFKLMKVYMRSSPLRKAALRALSKTLTVDELFYLKEQFVLLEPTKNGTISLENIKQALMRNSTDAMKDSRVLDLLVSLNALQYRRMDFEEFCAAALSVHQLEALDRWEQHARCAYDLFEKDGNRAIMIEELASELGLGPSIPVHAVLHDWIRHTDGKLSFLGYVKLLHGVSTRAIAKAQ

SEQ ID NO: 39972 - protein, 122 aa, Triticum aestivum
  misc_feature (16)..(16): Xaa can be any naturally occurring amino acid
  misc_feature (67)..(67): Xaa can be any naturally occurring amino acid
  unsure (1)..(122): unsure at all Xaa locations
ERTSGGYFELVGFDPXEVQQEIYKFVSIGLCAPVVAQCLVELMVNPPREGSPSYELYRQEYDGIFNXLKTRAFALYEAFKEMEGVECDEPQGSMYLFPTIKLSSKAVEAAKKEGRSPDEYYA

SEQ ID NO: 39973 - protein, 644 aa, Brucella melitensis 16M
MNVVMKPSQKNTAVADFLADQEHKSLLRFLTCGSVDDGKSTLIGRLLYDTKLIFEDQLASLKNDSRKFGTTDDDFDFALLVDGLEAEREQGITIDVAYRFFSTPRRKFIVADTPGHAQYTRNMATGASTADLAVVLVDARQGVLTQTRRHSFIAAALGIRHIVLAVNKIDLVDFSQDRFDGIVADYLSFAQDLGFTSIQPIPLSARFGDNVTASSPRIGWYEGPHLLEHLETVRIDTEAAAKPFRFPVQYVNRPNLDFRGFSGTVASGSIHVGDPVVVAKSGKQSRVKRIATYDGDLQRASEGQAVTLVLEDEIEVSRGNMLAGVELRPEVADRFAADIVWFGEDPLLPGRSYLLRTETDQTPVTVNAIRHRTDVNTFIQEETARLDLNEIGRCHLQTVDPIAFDPYGENRATGAFVLIDRLTNATVGAGMIDAALRQATNVHLQAFDLNKQARAAQKFQKPAVLWFTGLSASGKSTIANRLEQRLHALGKHTYLLDGDNVRHGLNSDLGFSDADRVENIRRVGEVARLMADAGLITPVSFISPFREERDQVRARLPEGEFIEIFIDTPIEECMARDPKGLYAQALRGEIKAFTGIDSPYEPPVAPELRLNTAGRTVDELIAEVENYLAERGVIGSYGSDSWSI

SEQ ID NO: 39974 - protein, 411 aa, Thermosynechococcus elongatus BP-1
MPGGVSSPVRAFKSVGGQPIVFDHVKGAHIWDVDGNQYIDYVGSWGPAIVGHAHPEVIDALHAALEKGTSFGAPCLLENILAEMVIAAVPSVEMVRFVNSGTEACMAVLRLMRAYTQREKVIKFEGCYHGHADMFLVKAGSGVATLGLPDSPGVPKATTAATLTAPYNDLEAVSRLFEQYPNDIAGVILEPVVGNAGFIPPDAGFLEGLRELTKQYGALLVFDEVMTGFRIAYGGAQEKFGVTPDLTTLGKVIGGGLPVGAYGGRAEIMKMVAPAGPVYQAGTLSGNPLAMTAGIKTLEILSRPGSYEHLDRITGKLVQGLLDAAREFGHEVCGGHISGMFGLFFTAGPVTNYEQAKQSDLKKFAAFHRGMLEQGIYLAPSQFEAGFTSLAHTEADIERTIAAARTVLSQL

SEQ ID NO: 39975 - protein, 474 aa, Synechocystis sp. PCC 6803
MVSPISIWRSLMFGGFSPQEWGRGSVLHRLVGWGQSWIQASVLWPHFEALGTALVAIIFIAAPFTSTTMLGIFMLLCGAFWALLTFADQPGKGLTPIHVLVFAYWCISAIAVGFSPVKMAAASGLAKLTANLCLFLLAARLLQNKQWLNRLVTVVLLVGLLVGSYGLRQQVDGVEQLATWNDPTSTLAQATRVYSFLGNPNLLAAYLVPMTGLSLSALVVWRRWWPKLLGATMVIVNLLCLFFTQSRGGWLAVLALGATFLALCYFWWLPQLPKFWQRWSLPLAIAVAVILGGGALIAVEPIRLRAMSIFAGREDSSNNFRINVWEGVKAMIRARPIIGIGPGNEAFNQIYPYYMRPRFTALSAYSIYLEILVETGVVGFTCMLWLLAVTLGKGVELVKRCRQTLAPEGIWIMGALAAIIGLLVHGMVDTVWYRPPVSTLWWLLVAIVASQWASAQARLEASKEENEDKPLLAS

SEQ ID NO: 39976 - protein, 589 aa, Flaveria pringlei
MESILKQMKEGESVVDPSSAVGGGVDDVYGEDRASEDQLITPWTVSVASGYTLLRDPHHNKGLAFTERERDSHYLRGLLPPAVATQELQEKKLMQNIRSYEVPLHRYVAMMELEERNERLFYKLLIDNVEELLPVVYTPTVGEACQKYGSIFKRPQGLYISLKEKGKILEVLRNWPERNIQVIVVTDGERILGLGDLGCQGMGIPVGKLALYTALGGVRPSACLPITIDVGTNNQKLLDDEFYIGLRQKRATGKEYYDLLEEFMSAVKQNYGEKVLVQFEDFANHNAFELLAKYRTSHLVFNDDIQGTASVVLAGLVASLKLLGGSLADHTFLFLGAGEAGTGIAELIALEISTKANIPIDEARKKIWLVDSKGLIVSSRKETLQHFKKPWAHEHEPLSTLLDAVKAIKPSVLIGTSGVGQTFTQNVVEAMAAFNERPLIMALSNPTSQAECTAEQAYTWTQGRAIFSSGSPFDPYEYNGNLFIPGQANNAYIFPGLGFGLVISGAIRVHDEMLLAASEALANQVTQEHYDKGMIYPPLTNIRKISAHIAANVAAKAYDLGLATRLPRPTDLVKYAESCMYTPNYRSYR

SEQ ID NO: 39977 - protein, 716 aa, Debaryomyces hansenii CBS767
MNYDYLTDEQKQQLYFHQMQAEQQQHQQQLHYKQQQHIQQQQQHQQNQQNQQQQPQPPRQPFSTFLQNNGSNSDLPQMGTFQQDLQRQNIPNLRFSQQNQPSDLGQEFQDDDSFMDEDLTEIHEQPPMQELNSSPMTHPHSFQQNFQTPTKNDDANLRNQQFQSVDSERSLDFKPPVTFTKLNNNSNADLSSPTESSFLKSNLNLPNSNIPPAGASNDPNAQKSNYIYFNRQPNSLNKIAQDKASSIKLKLENYYQMSVAHAIERNQRRLDLEHKLLNEESGSSEERKNRQLQNLGKKESQFLRLRRTKLSLEDFNTVKVIGKGAFGEVRLVQKRDTGKIYAMKTLLKSEMYKKDQLAHVKAERDVLAGSDSPWVVSLYYSFQDAQYLYLIMEFLPGGDLMTMLIRWQIFTEDITRFYMAECVLAIEAIHKLGFIHRDIKPDNILIDIRGHIKLSDFGLSTGFHKTHDSNYYKKLLEKENPHHTNPQNGNLQAPSMATNNRNSMMVDAIHLTMSNRQQMQTWRKSRRLMAYSTVGTPDYIAPEIFVHQGYGQECDWWSLGAIMFECLIGWPPFCSETPHETYRKILNWQETLQIPDDIHLSPESEDLIRKLLTNAENRLGRYNGADELKLHPFFRGVDWDTIRKVDAPFIPKLRSITDTRFFPTDELENVPDSPALSKAMEQRDQVLQNGGNVKEDLPFIGYTYSRFDYLTRKNAL

SEQ ID NO: 39978 - protein, 589 aa, Flaveria pringlei
MASTLKQMKEGESVVDHSSAVGGGVDDVYGEDRASEDQLITPWTVSVASGYTLLRDPHHNKGLAFTQRERDSHYLRGLLPPAVATQELQEKKLMQNIRSYEVPLHRYVAMMELEERNERLFYKLLIDNVEELLPVVYTPTVGEACQKYGSIFKRPQGLYISLKEKGKILEVLRNWPERNIQVIVVTDGERILGLGDLGCQGMGIPVGKLALYTALGGVRPSACLPITIDVGTNNQKLLDDEFYIGLRQKRATGKEYYDLLEEFMSAVKQNYGEKVLVQFEDFANHNAFELLAKYRTSHLVFNDDIQGTASVVLAGLVASLKLLGGSLADHTFLFLGAGEAGTGIAELIALEISTKTYIPIDEARKKIWLVDSKGLIVSSRKETLQHFKKPWAHEHEPLSTLLDAVKAIKPSVLIGTSGVGQTFTQDVVEAMAAFNERPLIMALSNPTSQAECTAEQAYTWTQGRAIFSSGSPFDPYEYKGNLFIPGQANNAYIFPGLGFGLVISGAIRVHDEMLLAASEALANQVTQEHYDKGMIYPPLTNIRKISAHIAANVAAKAYDLGLATRLPRPADLVKYAESCMYTPNYRSYR

SEQ ID NO: 39979 - protein, 331 aa, Clostridium acetobutylicum ATCC 824
MSETIRFGIVGTSSITEKFLDGSNHVKDFSLTAVYSREESKARDFAKKYGAENIFTDLEKMAKSDLIDAVYIASPNAMHAKQAEVFLKNKKHVLCEKAFASNVEEVNKMISVSKENKMVLMEAMKTEYLPGFFAVKENLHRIGKVRKYFGNYCQYSSRYDKFKQGIVLNAFKPELSNGSIMDIGVYCIHPMVYLFGEPNKLKANAVLLESGVDGEGSILFNYDNMEAVVMYSKITNSRVSSEIQGEEGNIVIDNINTFEKVKIVFRNGEEEDLSRVHIEDNMCYELEEFIRLVKEQDTKKALQRLKVSKSVMEIMDEARKQIGLVFPADKN

SEQ ID NO: 39980 - protein, 1175 aa, Coprinopsis cinerea
MAYDDYYTSTQQYNSSSGSAFSFLDSDPPIIDTTSIASGHHVPQSHQDLFSEPVTFQMPAFMQETNTVPSLASGGGALFYPFGPPPTTGKDWMPYSVYQDEPSCKTAAAAPVIHTQIYDPASAQQQTGVVAFDNPGAAPFEYEPIPAPLPTNPARDTHLDSFLSNSGALMQTQASNEGQQSQQGFDEAPLEQPQQPHPQLELVEGSQMGDGVVHPTPAAAQNSVHHHPNNALQALPNHEHGIPSLAPPPPPPPPPLPLAPPSSLVSTSFSTAASTLGLPIYSASGFDLLSILARVATRPYPRVQLGPVDLTCSFVVVDTRRQDHPIVYCSPSFLKLTGYPEDEVIGRNCRFLQSPTGKMEQGEPRPDPATQTAAAQMKKCLNADKECQLVLTNYRKDGTPFTNLVTVIPIPGGLTGAAHEENEVVFHVGFQVDMTQQPNVILEKLRNGSYLIDYSSQSFLQPPVPRGHTGAVATRERRSTNIPKIVISKELKKLLNDPTFVRSIPITTTTNHPPPTSSALDMQDVYGGNHPLHMMLLEMGPDFIHVVSLKGSFLYVAPSVRRVLGYEPDDLVGKSISDLAHPEDVVPLMRELKESSSTGLTTATTTTTEGAMGLSGTHAAPTIGQPRTVDLLFRARTKNGCYVWVESRGRLHVEPGKGRKAIILSGRAREIPKMSWGLVIKTGGLAKMVKAQRRVVGSGGVEQVEEVDQFQEWWGTMSPQMVMLMIGKGFPDVMGYSQSEFHGRNFKLLLDSSSSSSVSLSDVVQQLGTLSKSKEDCVEKVESVKCRVRHRDGHLLDVVVNVYRPERDVRVLEATRNLGGVLPAHLIYQVRKIGAETYPLTDTSSSSALSSPSSTSSLTSSSSHPSLSKRFTIDPGANMFEELEVSRGSSWQYELQQLKFANQRLRDDIKMLEAAVRAHKGRKNLGKAMSSSSSSTSGSSSVSPPASAPPTQQHFAQQQMYGGGGGGGMYSHQPFVSGAVPYFVQSAGSGVGLGGAALPSRTSSLGRRQSISGPPSHLGLQPLHPSYMQPLRRPGAGMMATPPPNSSTPSANANGNGKGRSLPPVPLAMDWTSGSGGWVQRIQQEARYQAAQQVQQAQEYSGSQHGQHSTTRQLQHGHGHGNGGGSGSGQGHGLGHGHYQQQQQQHHSQMMHQQQHQHQQRVGVGMKRPWGAVDR

SEQ ID NO: 39981 - protein, 373 aa, Arabidopsis thaliana
MDRVVFFFLIAATLLAGSLGSTVISGEVTDGFVNPIRQVVPEENDEQLLNAEHHFTLFKSKYEKTYATQVEHDHRFRVFKANLRRARRNQLLDPSAVHGVTQFSDLTPKEFRRKFLGLKRRGFRLPTDTQTAPILPTSDLPTEFDWREQGAVTPVKNQGMCGSCWSFSAIGALEGAHFLATKELVSLSEQQLVDCDHECDPAQANSCDSGCSGGLMNNAFEYALKAGGLMKEEDYPYTGRDHTACKFDKSKIVASVSNFSVVSSDEDQIAANLVQHGPLAIAINAMWMQTYIGGVSCPYVCSKSQDHGVLLVGFGSSGYAPIRLKEKPYWIIKNSWGAMWGEHGYYKICRGPHNMCGMDTMVSTVAAVHTSPK

SEQ ID NO: 39982 - protein, 100 aa, Bdellovibrio bacteriovorus HD100
MAKNEIGVRPLHDRILVRRMAEEEKTAGGLFIPDTAKEKPQKGEIIATGKGRVTEDGKILPLEVKVGDKVLFGKYAGTELKLDGAEYLMMREEDILGVFN

SEQ ID NO: 39983 - protein, 546 aa, Bdellovibrio bacteriovorus HD100
MSKVITFSEDARTHILKGVNTLANAVKVTLGPKGRNVVIDKSFGSPLITKDGVTVAKEIELENKFENMGAQMVKEVASKTNDEAGDGTTTATVLAQAIYREGAKLVSAGHNPMSIKRGIDKAVGIIIEELKSMSKPVKGSNEVAQVGAISANNDKEIGQMLADAMDKVGREGVITIEESKTAKTEVTVVEGMQFDRGYLSPYFVTNAERMEAVLENAYVLVYDKKISSMKDMIGILEGVAKQGRQLLIIAEDVEGEALATLVVNKLRGTLHIAAVKAPGFGDRRKAMLEDIAILTGAKVISEDVGLKLEAATVADLGVAKRIVVDKDNTTIIDGAGKKNDINGRVGQIKAQIEETSSDYDKEKLKERLAKLAGGVAVIHVGAPSEVEMKEKKHRVEDALNATRAAVEEGIVAGGGTALLRASTKIDKSKFSEEEQFGATIIKRACEEPIRQIAANAGLDGAIVLDRILQNKSTTWGFNAYSDEYTDLIKDGVIDPVKVVRCALTNAASVSSLMLTTETMIAEAPKKESAAPAMPGHDGMGGMGGMM

SEQ ID NO: 39984 - protein, 722 aa, Zea mays
YVLANKFFFEKVVEVINPEDDYVWVHDYHLLALPTFLRRRFNRLRIGFFLHSPFPSSEIYRTLPVRDEILKALLNCDLIGFHTFDYARHFLSCCSRMLGIEYQSKRGHIGLDYFGRTVGIKIMPVGVHMGQLESGLRLPDREWRLSELQQQFQGKTVLLGVDDMDIFKGINLKLLAFENMLRTHPKWQGRAVLVQIANPARGRGKDLEAIQAEIEESCQRINGDFGQSGYSPVVFIDRDVSSVEKIAYYTIAECVVVTAVRDGMNLTPYEYIVCRQGAPGSESVSEVGGPKKSMLVVSEFIGCSPSLSGAIRVNPWNIEATAEAMNEAISMPEQEKQLRHEKHYRYVSSHDVAYWSKSFILDLERACRDHFKRTCWGIGLGFGFRVVALDAHFRKLNMDSIVNAYEISGSRAILLDYDGTLVPQTSINKEPNSEVLNIINTLCSDSRNIVFLVSGRDKDMLGKWFSSCPKLGIAAEHGYFLRWSSEEEWQTCTQAMDFGWMQMAKPVMNLYTEATDGSYIETKESALVWHHQDADPGFGSSQAKELLDHLESVLANEPVSVKSGQFIVEVKPQAVVTLPPFLPYAKNFLQVVSTSGKGVSKGIVAERILASVKERGKQADFVLCIGDDRSDEDMFENIADIIKRNMVAPRTSLFACTVGQKPSKAKFYLDDTFEVVAMLSALADATGAELESDSADELAASISSLDIGDEQSETSDTPIGGS

SEQ ID NO: 39985 - protein, 152 aa, Debaryomyces hansenii CBS767
MSNNERTFIAIKPDGVQRGLINSILGRFENRGYKLVGIKLVQPTESLLREHYDDLQSKPFFPSLLSYMLSGPVLATVWEGKDVVKQGRAILGATNPLQSAPGTIRGDFAVDMGRNVCHGSDSVESAEKEIGLWFKKEELVDYKPALFGWIYE

SEQ ID NO: 39986 - protein, 324 aa, Oryza sativa
  misc_feature (125)..(125): Xaa can be any naturally occurring amino acid
  misc_feature (244)..(244): Xaa can be any naturally occurring amino acid
  unsure (1)..(324): unsure at all Xaa locations
MQIFVKTLTGKTITLEVEFSDTIDNVKAKIQDKEGIPPDQQRLIFAGKQLEDGRTLADYNIQKESTLHLVLRLRGGMQIFVKTLTGKTITLEVESSDTIDNVKAKIQDKEGIPPDQQQLIFAGKXLEDGRTLADYNIQKESTLHLVLRLRGGMQIFVKTLTGKTTTLEVESPDTIDNVKAKIQDKEGIPPDQQRLIFAGKQLEDGRTLADYYIQKESTLHLVLRLRGGMQIFVKTLTGKTITLXEVESSDTIDNVKAKIQDKEGIPPDQQRLIFAGKQLEFFIFFFDNIIDWYRCTVKQIVLVWIIVSTQLRDSKPEHNTTMTR

SEQ ID NO: 39987 - protein, 384 aa, Xylella fastidiosa 9a5c
MTGTPPPSRFPEQPIPPWRRAVLKVGSSLLAAAGGGLSPRFALDLAHFVSANITAGRQLVIVSSGAVAAGRALIPPLPESGGALAARQALAALGQAQLIALWQRFFDRPVAQVLLTHDDLRNRRRYLNARATLRELLHLGTLPVVNENDTVSVDELKLGDNDNLAAIVAALIDAQALFIATDIDGLYTTDPRHHPDAQPLHEVRTLTPEHLAMAGDSSSTVGTGGMRTKLEAALKAGAAGIDTYLFNGRSSDVVRGLAQHRLRGTRIHPTCTPIAARKYWLRHAPVEPGAILIDAGAAAALAQQGASLLPGGVLSAEGDFRRGDMIQIATRSPDHPPHPLARGLVQYSAADVRRIAGCHSRDIQPLLGYTYGDTIVHRDDLVLL

SEQ ID NO: 39988 - protein, 493 aa, Zea mays
MSADASAAMEKIRAAGLLKTQGLIAGQWVDAYDGKTIEVQNPATGEVLANVSFMGSRETSDAIASAHSTFYSWSKLTASERGKALRKWYDLIISHKEELALLMTLEQGKPMKEALGEVNYGASFIEYFAEEAKRIYGDIIPPTLSDRRLLVLKQPVGVVGAITPWNFPLAMITRKVGPALACGCTVVVKPSELTPLTSLAAADLALQAGIPAGALNVVMGNAPEIGDALLQSTQVRKITFTGSTAVGKKLMAESANTVKKVSLELGGNAPCIVFDDADIDVAVKGSLAAKFRNSGQTCVCANRILVQEGIYEKFASAFIKAVQSLKVGNGLEESTSQGPLINEAAVQKVEKFINDATSKGANVMLGGRRHSLGMSFYEPTVVGNVSNDMLLFREEVFGPVAPLIPFKTEEEAVHMANDTNAGLAAYIFTKSIPRSWRVSESLEYGLVGVNEGIISTEVAPFGGVKQSGLGREGSKYGVDEYLELKYICMGNLG

SEQ ID NO: 39989 - protein, 484 aa, Xylella fastidiosa 9a5c
MHPLPTTTVDAPRLQNISHRLPSHPLSTSSTATTHPPHHLLTSQPLRCPVPHCQHPPPTPIPLHPRPYLMSHIRHLAQQCRDAARRLATLSTDAKRRLLETMATALNTDAATILAANAADLDAARTQQVGTAMLDRLALDPQRLAAMADALRDIAALPDPVGQVTRDDQRPNGIHVQKIRVPLGVIAMIYEARPNVTADAAALCIKAGNGIILRGGSEAIRSNIAIATALQRALRLASLPETALILVQDMARHTMLELLQLSDLIDLVIPRGGEGLIRFVAEHARIPVIKHYKGVCHQFVDASADIEMAIRLLIDGKTTRPAACNALETLLVHTDIAPRFLPAAAAALRPYGVQLRGDHATCTLLPDVVLATDADYAAEYLDLILAIRIVPNVDAALEHIRRYGSDHTEVIVTADPAHADTFVQQLYSAVVMVNASSRFSDGGALGLGAEIGISTTRLHAYGPMGLDALTVERFVVRGQGQVRH

SEQ ID NO: 39990 - protein, 406 aa, Zea mays; identical to SEQ ID NO: 903

SEQ ID NO: 39991 - protein, 178 aa, Oryza sativa (japonica cultivar-group)
MFPMVTGFMGQQTIRAARYIGQSFIITLSHTNRLPITIHYPYEKSITSERFRGRIHFEFDKCIACEVCVRVCPIDLPLVDWRFEKDIKRKQLLNYSIDFGVCIFCGNCVEYCPTNCLSMTEEYELSTYDRHELNYNQIALSRLPISIMGDYTIQTIRNSTQSKIDEEKSWNSRTITDY

SEQ ID NO: 39992 - protein, 117 aa, Frankia sp. BMG5.6
TRIVKDGKEPEIWGFDGSSTNQAPGSNSDCVLRPVYTVPDPIRGGDNVLVLCEVELTDFTPHPTNTRAKAPLVAEKYADMAPHFGIEQEYTVLPERSSARLAGSRLPGAAGPVLLRR

SEQ ID NO: 39993 - protein, 169 aa, Oryza sativa
MAANGSNVVSRGAVRFTEEQEALVLKSWAIMKNDSAHIGHRFFLKIFEVAPSARQLFSFLRNSDVPLEKNPKLKIHAMAVFVMTCEAAAQLRKTGRVTVRDTTIKRLGSTHFKNGVSDAHFEVAKFALLETIKEAVPASMWSPAMKGAWGEAYDHLVAAIKQGMKPAAA

SEQ ID NO: 39994 - protein, 114 aa, Frankia sp. BMG5.3
IVKGGKEPEIWGFDGSSTNQAPGSNSDCVLQPVFTCPDPLRGGDNVLVLCEVQLTDFTPHPTNTRAAARAVAEKYADMSPMFGIEQEYTFFQNGRPLGWPAAGYPEAQGPYYCG

SEQ ID NO: 39995 - protein, 455 aa, Schizosaccharomyces pombe
MREVISVHVGQAGVQIGNACWELYCLEHGIGPDGFPTENSEVHKNNSYLNDGFGTFFSETGQGKFVPRSIYVDLEPNVIDQVRTGPYKDLFHPEQMVTGKEDASNNYARGHYTVGKEMIDSVLERIRRMADNCSGLQGFLVFHSFGGGTGSGLGTLLLERLNMEYGKKSNLQFSVYPAPQVSTSVVEPYNSVLTTHATLDNSDCTFMVDNEACYDICRRNLDIERPTYENLNRLIAQVVSSITASLRFAGSLNVDLNEFQTNLVPYPRIHFPLVTYSPIVSAAKAFHESNSVQEITNQCFEPYNQMVKCDPRTGRYMATCLLYRGDVIPRDVQAAVTSIKSRRTIQFVDWCPTGFKIGICYEPPQHVPGSGIAKVNRAVCMLSNTTSIAEAWSRLDHKFDLMYSKRAFVHWYVGEGMEEGEFSEAREDLAALERDYEEVGQDSMDNEMYEADEEY

SEQ ID NO: 39996 - protein, 113 aa, Frankia sp. BMG5.10
PLMRSKTRIVKGGKEPEIWGFDGSSTNQAPGSNSDCVLQPVFTCPDPLRGGDNVLVLCEVQLTDFTPHPTNTRAAARAVAEKYADMSPMFGIEQEYTFFQNGRPLGWPAAGYP

SEQ ID NO: 39997 - protein, 90 aa, Frankia sp. BMG5.11
SKTRIVKGGKEPEIWGFDGSSTNQAPGSNSDCVLQPVFTCPDPLRGGDNVLVLCEVQLTDFTPHPTNTRAAARAEAEKYADMSPMSGIEQ

SEQ ID NO: 39998 - protein, 103 aa, Frankia sp. BMG5.12
IVKSGKEPEIWGFDGSSTNQAPGSNSDCVLQPVFTVPDPLRGGDNVMVLCEVQLTDFTPHPTNTRAAARKVAEKYADMTPNFGIEQEYTFFQNGRPLGWPATG

SEQ ID NO: 39999 - protein, 395 aa, Porphyromonas gingivalis W83
METTQLSPLRKSIVGVQFLFVAFGATVLVPLLVGLDPSTALFTAGIGTLIFHLVTKGKVPIFLGSSFAFIAPIIKATEMYGLPGALSGMVGVALVYYLMSALVKWQGVRVIQRLFPPVVIGPVIILIGLSLAGAGVDMAQSNWILATISLATAVLVTMLAKGLFKLIPIFCGIVVGYVIAVVFYEVDLNPVREAAWLSLPQFSFPKFSLPPILFMLPVAIAPVIEHIGDVYVVNTVTGKDFVKDPGLHRTLLGDGLACMVAGLLGGPPVTTYSEVTGAMALTRVTDPMVIRIAAVTGIVFSAVGKVSALLKSIPPAVLGGIMLLLFGTIASAGIANLVNHKVDMSRTRNIIIVSITLTLGIGGAVVSFGGFTMAGIGLAAIVGVVLNLILPQEQE

SEQ ID NO: 40000 - protein, 349 aa, Thermosynechococcus elongatus BP-1
MSNKGSSDLRLLLSTLVISGLVAGLAYWQLSQHWTRSPDQNAGSPLHTPTSKWQKIALAMTLRGHEDEVNAIALSPDGNFLVSAGDDRRLYFWNLATGTALGQAKGHTDWIYALVMTPDGQTVISGSKDKTIKLWGVGDRQLQATLSGHQDFVNGLALSPDGRTLASASYDHTVKLWNVPSRQEITTLKANEGIMLSVAISRDGRFLATGGVDKLIRIWDLPSRRLLRTLEGHTSDVNSLAFTPDSSQLVSGSDKDGIKLWNLTTGELQQQFGTEGGQVFSVAVSPDGSTLASGHGDQTVKLWSLSGQLLRNLKGHSGAVYSVVFGQDQLISASEDKTIKVWRLFPETP

SEQ ID NO: 40001 - protein, 664 aa, Zea mays
  misc_feature (533)..(533): Xaa can be any naturally occurring amino acid
  unsure (1)..(664): unsure at all Xaa locations
MSMPETFTLKVGEATPAAAGRPSAGPVYRSIYAKDGLMDLPQDIQSPWDLFSGAVKKYPTNRMVGQRQVTDGKAGEYVWQTYEEVCQKVMRIGSAIRSLGVEPGAHCGIYGSNCPEWVMAMQACNSQGICYVPLYDTLGAKAVEFIMYHAEISIAFVQESKIKSILAVLPKCTAHLRAIVSFGDFASEMKAEAERLGVSCFSWEEFSSMGKQDYQLPNKRKEDICTIMYTSGTTGDPKGVIITNKAIVAGVMTTEHLLKETDKVITEEDSYFSYLPLAHIFDQVIENYCISKGASIGFWQGDIRYLMEDVQVMKPTIFCGVPRVYDRIYTGINMKIQSGGMIARHLFQYAYNYKLANMRKGLKQHEASPFFDKIVFSKIKEGLGGRIRLMIAGAAPLPGQIEEFMRVTTCSVVVQGYGLTESCAGCFTSIANIFSMIGTVGPPVTTIEARLESVPEMGYDALSDTPRGEICLRGHTMFSGYYKRPSLTEEVFSDGWFHTGDIGEWQSNGTMKIIDRKKNIFKLSQGEYVAVRXLERAYLQSPLVASVWVYGNSFESFLVAVAVPERQALEEWAAANSKAGDFAELCADPKARSYVRDQLNQTGKKLGLRGFEMLKAVYLEPVPFSIEKDLVTPTFKLKRPQLLKYYKDPVDQMYKDAKEGRAAP

SEQ ID NO: 40002 - protein, 328 aa, Xylella fastidiosa Ann-1
MKALVRVAVTGAAGQIGYSLLFRIAAGEMFGKDRSVILQMLELPDEKAQAALKGVMMELEDCAFPLLAGMVVTDNPDIAFKDADAALLVGSRPRGPGMERKDLLMENAKIFTAQGAALNKVARRDVKVLVVGNPANTNAYIAMKSAPDLNPKHFTAMLRLDHNRALSQLSTKLSKPVANIEKLIVWGNHSPTMYPDYRFATADGTPIIEAINDQAWNANSFIPTVSKRGAAIIEARGLSSAASAANAAIDHMRDWLLGSNGKWITMGVPSDGSYGIPEGMIFGFPVTTTNGEYSIVKDLPIDTFSKTYIDKTLAELEEERASIAHLLR

SEQ ID NO: 40003 - protein, 581 aa, Cryptococcus neoformans var. grubii
MANAPHGGVLKDLLVRDAALHDSLLEEARSLNDIFLTERQLCDLELILNGGFSPLEGFMDEQDYTSVVETLRLAPFNGHKYGHVFPIPITLDVSQEDINTLGLKQGARVALRDPRDDAALAILTVSDIYRPNKATEAEKVMGADDIAHPSVAYLRNNVKEFYVGGKVQAIQAPTHFDYVPLRYTPAELRAHFHKLAWRKVVAFQTRNPMHRAHRELTVRAARQRRANVLIHPVVGLTKPGDVDHYTRVRAYQALMPSYPEGMAHLALLPLAMRMAGPREAVWHAVIRKNFGANHFIVGRDHAGPGKNSQGKDFYGPYDAQELVTQFKDELQIEMVPFQAMTYLPGSDEYQPVDEVPKGTPTADISGTELRKRLRTGASIPDWFSYTGVVKVLRESYPPRPQQGFNILLTGLHNSGKDTIARALQVTLQQQGSRSVSLLLGEELRSDLDPQIGRAITPEQKHINLERIGFVAAELTKAGAAVIAAPTAPYERSRQAFKKQVVGSGGGNYFLVHVATPLEWCEKVDRRGLYKAARAGEIKNLTGVDDVYEAPENADLVCDLRIDTVPEIVHSIIMILESQNLV

SEQ ID NO: 40004 - protein, 150 aa, Zea mays
MSSPSRRSSSPESNIDGGSGSGSAGDERKRKRMLSNRESARRSRARKQQRMEELIAEASRLQAENERVEAQIGAYTTELSKVDGENAVLRARHGELAGRLQALGGVLEIFHVAGAPVDIPEIPDPLLRPWQSPFAPQLAAAGGMPDAFQF

SEQ ID NO: 40005 - protein, 156 aa, Proteus mirabilis
DRCRSILKNVVFQILALLRDSILVKSDRCSMLNSIEARAPILDYRIIEFAFNEVPDNFKIRNGMKKFLLKDISKKILPNEFDFQRKLGFNLPLGMMIREGKWKEFFGDILNSKSDIINYYFYTKMFDEHLSGKERADRLFGVVLFLIWAKHNKVSL

SEQ ID NO: 40006 - protein, 273 aa, Oryza sativa
  misc_feature (209)..(209): Xaa can be any naturally occurring amino acid
  misc_feature (224)..(224): Xaa can be any naturally occurring amino acid
  unsure (1)..(273): unsure at all Xaa locations
MKIQCDACESAAAAVVCCADEAALCAACDVEVHAANKLAGKHQRLPLEALSARLPRCDVCQEKAAFIFCVEDRALFCRDCDEPIHVPGTLSGNHQRYLATGIRVGFASASPCDGGSDAHDSDHHAPPMGSSEHHHHHQQPAPTVAVDTPSPQFLPQGWAVDELLQFSDYETGDKLQKESSPPLGFQELEWFADIDLFHNQAPKGGAAAXGRTTAEVPELFASQXAANDVAYYRPPTRTAAAAFTAATGFRQSKKARVELPDDEEDYLIVPDLG

SEQ ID NO: 40007 - protein, 225 aa, Xylella fastidiosa Ann-1
MVSAPLSFMPEAVIFDMDGLMLDSERVSIECRCRAAFDLEQQIEPDYWLQMVGVSDIACHAQLSARIGAVSATALLARSDALYEAVVMKGVPHRPGIVTLLEWLFARGIPCAVGTSTRRPLALRKLNTAGLLSRFDVVCTASEVAQAKPAPDIYLLAAHTLGIVPGRCLVVEDSPIGVRAALAAGMTPIQVPDLLMPDAQVSALGHRIVASLTEVQSLLEACFDV

SEQ ID NO: 40008 - protein, 535 aa, Clostridium perfringens str. 13
MSKNTKYVFVTGGVVSSLGKGITAASLGRLLKNRGLSVSIQKFDPYLNIDPGTMSPYQHGEVFVTDDGAETDLDLGHYERFIDENLTQNSNVTSGRVYWSVISKERKGEYLGGTVQVIPHITNAIKDRVHRVGKERDVDVVITEIGGTIGDIESLPFLEAIRQIKYDVGKENVCFIHVTLVPYLGKAGELKTKPTQHSVKELRSIGIQPDIIVCRSEKELSEDIKKKIGLFCNIDASEVIQNLDAEHLYAVPLMLHKEGLDRLVCEKLGLGCRDIDNAEWIDMVHRITHLTHTTKIALVGKYVELHDAYISVVEALNHGGLSNDTNVEIEWINAEDVTKENVDELLSGVDGVLVPGGFGDRGVEGKIEAIRWARENKKPFLGICLGMQCAVIEYARNVLGLEGAHSSELNPETPFPVIDLMPEQKDVEDLGGTMRLGLYPCKLEDNTFCKDVYASDLIYERHRHRYEFNNEYRTQLIESGLTIAGTSPDGRLVECVEVKDHPWFVAVQYHPELKSRPNRPHPLFVGFVGAALNNK

SEQ ID NO: 40009 - protein, 347 aa, Zea mays
MAFAPKTSSSSSLSSALQAAQSPPLLLRRMSSTATPRRRYDAAVVVTTTTTARAAAAAVTVPAAPPQAPAPAPVPPKQAAAPAERRSRPVSDTMAALMAKGKTAFIPYITAGDPDLATTAEALRLLDGCGADVIELGVPCSDPYIDGPIIQASVARALASGTTMDAVLEMLREVTPELSCPVVLLSYYKPIMSRSLAEMKEAGVHGLIVPDLPYVAAHSLWSEAKNNNLELVLLTTPAIPEDRMKEITKASEGFVYLVSVNGVTGPRANVNPRVESLIQEVKKVTNKPVAVGFGISKPEHVKQIAQWGADGVIIGSAMVRQLGEAASPKQGLRRLEEYARGMKNALP

SEQ ID NO: 40010 - protein, 132 aa, Brassica napus
KNVVEFLGAMNEKKALGMKATLESKGEGEFYGCPLGKNVGIKKTLVSISKEKKKEPHRVLTPPVIDPSFGFGRIIYGLYKLCLSPRPSKAGDEQWNGFRFPPLGAPIKGTVFPLVQNQQFGEAPKVFFKELT

SEQ ID NO: 40011 - protein, 119 aa, Medicago sativa
MGKSYPTVSADYQKAVEKAKRKLRGFIAEKKCAPLMLRLAWHSAGTFDSKTKTGGPFGTIKHQAELAHGANNGLDIAVRLLEPLKEQFPIISYADFYQLAEVVAVGITGWNLEIPFHPR

SEQ ID NO: 40012 - protein, 449 aa, Schizosaccharomyces pombe
MREIISIHVGQAGTQIGNACWELYCLEHGIQPNGYMNPETASQNSDGGFSTFFSETGQGKYVPRSIYVDLEPNVIDQVRTDPYRDLFHPEQLITGKEDASNNYARGHYTVGKELVDEVTDKIRRIGDNCSGLQGFLVFHSFGGGTGSGFGALLLERLAMEYTKKSKLQFSVYPAPQVSTSVVEPYNSVLTTHATLDLADCTFMVDNESCYDICRRNLDIERPSYENLNRLIAQVVSSITASLRFEGSLNVDLAEFQTNLVPYPRIHFPLVTYAPIVSAAKAFHESNSVQEITNQCFEPYNQMVKCDPRAGRYMATCLLYRGDVIPRDVQAAVTTIKAKRTIQFVDWCPTGFKIGICDRPPQHIEGSEIAKVDRAVCMLSNTTSIAEAWSRLDHKFDLMYSKRAFVHWYVGEGMEEGEFSEAREDLAALERDYEEVGQDSMEVDYMEEEY

SEQ ID NO: 40013 - protein, 100 aa, Brassica napus
MEKNTPVRKPHTSTADLLTWPDNQPFESPSAVPTRSHQPSDGIRKVVFGGQVTDEEVESLNKRKPCSNYKMKEITGSGIFSVYEQNDALETGTRTYRQAE

SEQ ID NO: 40014 - protein, 448 aa, Schizosaccharomyces pombe
MREIVLIQAGQCGNQVGAAFWSTIADEHGLDSAGIYHGTSEAQHERLNVYFNEAAGGKYVPRAVLVDLEPGTMDAVKSGKFGNLFRPDNIIYGQSGAGNIWAKGHYTEGAELAVAVLDVVRREAEACDALQGFQLTHSLGGGTGSGMGTLLLSKIREEYPDRMMATFSVAPAPKSSDTVVEPYNATLSMHQLVENSDETFCIDNEALSSIIANTLKIKSPSYDDLNHLVSAVMAGVTTSFRFPGELNSDLRKLAVNMVPFPRLHFFMVGFAPLAAIGSSSFQAVSVPELTQQMFDANNMMVAADPRHGRYLTVAALFRGKVSMKEVDEQIRSVQTKNSAYFVEWIPDNVLKAVCSVPPKDLKMSATFIGNSTSIQEIFRRLGDQFSAMFRRNAFLHWYTGEGMDEMEFTEAESNMNDLVSEYQQYQEAGIDEGDEDYEIEEEKEPLDY

SEQ ID NO: 40015 - protein, 230 aa, Beta vulgaris
  misc_feature (199)..(199): Xaa can be any naturally occurring amino acid
  misc_feature (212)..(212): Xaa can be any naturally occurring amino acid
  unsure (1)..(230): unsure at all Xaa locations
MGRGKIEIKRIENTTNRQVTFCKRRNGLLKKAYELSVLCDAEVALIVFSSRGRLYEYANHSVKGTIDRYKKACSNQSGAGSVAEANAQYYQQEAAKLRNQIRTATENNRLLSRHMMGEGLSSLSMKELKNLETKLERGISRIRSKKNELLFAEIEFMQKREIELHNNNQFLRARISENERAQQSMSLMPGGSDYDLVPXQSFDSRNYFQVNXLQPSSQYARQDQTPLQLV

SEQ ID NO: 40016 - protein, 279 aa, Pseudomonas aeruginosa
MTTAAPTPSLFGQCLSEFLGTALLIFFGAGCVAALKVAGASFGLWEISIIWGVGVSMAIYLSAGVSGAHLNPAVSIALWLFAGFEGRKLPFYITAQVAGAFCAAALVYTLYSSLFIEFEQAQNIVRGSQDSLALASVFSTYPHPALSVGQAFLVEVVITAILMAVIMALTDDGNGLPRGPLAPLLIGLLIAVIGSAMGPLTGFAMNPARDFGPKLMTYLAGWGPIAFTGGREIPYFLVPIFAPILGACLGAGGYRVLIARHLPSAAAPAEAEPEKVRAS

SEQ ID NO: 40017 - protein, 417 aa, Salvia splendens
MNINQINTKLIKPITPTPQNLKNYHISFLDQHVVKKYIAVVLYYQSAPDNGRLEDSLAETLVHFYPLAGRYIKTDLTVDCSDQGAEFIEAEARGDVRVTDLIGKTDTIHLCPEQYFGLDEGVDDPLLSIQVTRFSCGGATIAVSVSHRVFDVSSLETFLSAWSSASKTGGGVAPVIPSFALASLLPNKDEKFGLDSNKCQGKEQKIAVKRLLFEKRALTRLTSERTSGVRAACAVIAKALIRLDRTTHGKSRDFVVFQPINMRGRTGVPSPKNACGNMSFGSFTRRVSAKEEVGIGELVGLIGDGVRRGIAEYTEILCPDRDGRDVIIHVRNKNIKEVFKSETFVVSFTDWSKFGFYEVDFGWGRPIWSGVGPQRPRGNQTIMMRSKEGDGIEAWVHLNEDDMDLFEQDVEIKLFLS

SEQ ID NO: 40018 - protein, 124 aa, Frankia sp. BMG5.2
PLTRSKTRIVKSGKEPEIWGFDGSSTNQAPGSNSDCVLQPVFTVPDPLRGGDNVLVLCEVQLTDFTPHPTNTRAAARKVAEKYADMTPNFGIEQEYTFFQNGRPLGWPATGFPEPQGPYYCGVG

SEQ ID NO: 40019 - protein, 522 aa, Triticum aestivum
MSSMQFSSVLPLEGKACISPVRREGSASERLKVGDSSSIRHERASRRMCNGGRGPAATGAQCVLTSDASPADTLVLRTSFRRNYADPNEVAAVILGGGTGTQLFPLTSTRATPAVPIGGCYRLIDIPMSNCFNSGINKIFVMTQFNSASLNRHIHRTYLGGGINFTDGSVEVLAATQMPGEAAGWFRGTADAVRKFIWVLEDYYKNKSIEHILILSGDQLYRMDYMELVQKHVDDNADITLSCAPVGESRASEYGLVKFDSSGRVVQFSEKPKGDDLEAMKVDTSFLNFAIDDPAKYPYIASMGVYVFKRDVLLNLLKSRYAELHDFGSEILPRALHDHNVQAYVFTDYWEDIGTIRSFFDANMALCEQPPKFEFYDPKTPFFTSPRYLPPTKSDKCRIKEAIISHGCFLRECKIEHSIIGVRSRLNSGSELKNAMMMGADSYETEDEISRLMSEGKVPIGVGENTKISNCIIDMNARIGRDVVISNKEGVQEADRPEEGYYIRSGIVVIQKNATIKDGTVV

SEQ ID NO: 40020 - protein, 96 aa, Frankia sp. BMG5.5
KTRIVKSGKEPEIWGFDGSSTNQAPGSNSDCVLQPVFTVPDPLRGGDNVLVLCEVQLTDFTPHPTNTRAAARKVAEKYADMTPNFGIEQEYTFFHN

SEQ ID NO: 40021 - protein, 355 aa, Streptomyces fradiae
MKALVLAGGSGTRLRPFSYSMPKQLIPIANTPVLVHVLRNLRELGVTEAGVIVGNRGPEISAVLGDGAEFGMRVTYIPQDAPRGLAHTVAITRDFLCDDDFVMYLGDNMLPDGVVDMRGGIHRPSAGGQVVVYKVPDPRSFGVAELGPQGEVLRLVEKPRDPRSDMALVGVYFFTAAIHDAVAAIEPSARGELEITDAIQWLVSSGADVRASQYDGYWKDTGNVEDVLECNRHLLDGLGARMDGTVDAASVLTGEVVIEPGAKVVRSRIMGAAIIGAGTVVQDSHVGPHASIGRRCTVTDSRVENSIALDEASVTGVRGLRNSLIGRSASVGGTGQENERYRLVVGDHTRVEVAA

SEQ ID NO: 40022 - protein, 307 aa, Arabidopsis thaliana
  misc_feature (18)..(18): Xaa can be any naturally occurring amino acid
  unsure (1)..(307): unsure at all Xaa locations
MQIFVKTLTGKTITLEVXESSDTIDNVKAKIQDKEGIPPDQQRLIFAGKQLEDGRTLADYNIQKESTLHLVLRLRGGMQIFVKTLNGERRLPLEVESSDTIDNVKAKIQDKEGIPPDQQRLIFAGKQLEDGRTLADYNIQKESTLHLVLRLRGGMQIFVKTLTGKTITLEVESSDTIDNVKAKIQDKEGIPPDQQRLIFAGKQLEDGRTLADYNIQKESTLHLVLRLRGGMQIFVKTLTGKTITLEVESSDTIDNVKAKIQDKEGIPPDQQRLIFAGKQLEDGRTLADYNIQKESTLHLVLRLRGGF

SEQ ID NO: 40023 - protein, 422 aa, Zea mays
LAQLCCSIHRSRRRRRIRGGEMMREQSLLEATCGDLFDHIDDLLDFPKEDSAADVLLLDAPAPGSPLSSARIIDVGRAGSAPAPPALAPSLPAQQDTTAFFATAGPDVFDPRDVGAHLGSCDDIDMDMAQLEWLSGLFDDASIPHEPAFPGAAPIIKSSALAAGALLPPDKMGDALLFRSSSPISVLEHGSFNNANGGGGGCSASSESSSASSSSESFSGSGSGEGHAWSAPVSPPPVLVIPARARSKRSRPSAFTRAGAEAPTILVPTPMYSSGPSHSDPESIAESSPHPAPPMKKKKKAKKPPAPPAPASSDDNDGDADYEEGGERTEPQGCAVRRCTHCQIEKTPQWRAGPLGPKTLCNACGVRYKSGRLFPEYRPAASPTFVPSIHSNSHKKVVEMRQKAVRSGDPSCDLLHFIRRRD

SEQ ID NO: 40024 - protein, 558 aa, GIBBERELLA ZEAE PH-1
MSTSTPSLEMSDEQKAERGDEETQNPQVQKPAFNKDYRFWMIMVTLILATILASLESTVVITSLPTIVNDLKLGSSYIWVTNVFFLTTACVQPLFAQLCNIWGRKKVMMFIFALYTLGSGIAGGANGGAMLIAGRTIQGIGSGGITMANDVIISDLVPLRYRGNYIAILLLVMTVGFAIGPFLGGVIVENTTWRWVFYLNLPLGGIAIIVTYFFLNLQYDRTQSTMEKLKRIDYIGNAILIGSSISILIALTWAGPVHPWSDARILLPLILGILGLVGFIIYEGSGIPSEPVMPIRLFPSRTSYIVYANTFLNQLLIMWLYYFLPLYFQAVKMSTPSRSGVQMLPVALIAVPGAALSAFMLSRWGKYKGLHVSGFLIMTVGVGLFGLLDEDSPPVAWVLLQFLPAIGSGFLLNTLLPAFQASTEEIDQAAATGTWSFIRSLGTVWGVAIAGTVFNSYTKQYAHMIGNEVAREALRSGDSYQSATRAFILQFDEEAQGQLRHVFMLSLRKVYVISVAFGGLAFVLSLLEKEIPLREELDTQYGLEEKGSSHLLHLLNII

SEQ ID NO: 40025 - protein, 381 aa, Nostoc sp. PCC 7120
MAINHLLEIKEYGQMYWMDNLSRDIIQSGELKNLVENQGICGITSNPAIFEKAIANNVIYDADIEAGVRAGLPTYKIYESLIFADIRNACDILRPVYEASNKLDGYVSIEVPPTIAHDTQATINEARRYYQEIGRENVMIKIPGTEAGLPAVEQVIAEGINVNVTLLFSVQSYINTIWAYIRGLEKRLAEGKDISQIASVASFFLSRIDINIDGKIDAKLARGVDDISLEAKLMVVKGKVAIANAKIAYQEYKKIIESDQWQALAAKGAKVQRLLWASTSTKDPNYSDVMYVDELIGPDTVNTLPPATITACADHCEVANRVETGVAEAYQLIESLKDPDINIDINAVMDELLIEGINKFVQPFQSLMNSLEGKVKLLSPV

SEQ ID NO: 40026 - protein, 509 aa, Bacillus sp. F5
MSQWWKEAVVYQIYPRSFYDSNGDGFGDLQGVIQKLDYIKRLGADVIWLCPVFDSPQDDNGYDISDYRSIYEKFGTNDDMFQLIDEVHKRGMKIIMDLVVNHSSDEHAWFAESRKSKDNPYRDYYFWKDPKADGSEPNNWGAIFSGPAWSAMSTAQYYLHYFSKKQPDLNWENEAVRREVYDLMTFWMDRGVDGWRMDVIGSISKFVDFPDYETDDSRPYVVGRYHSNGPRLHEFIQEMNREVLSRYDCMTVGEAGGSDVEEAKKYTDPSRHELNMIFTFEHMDIDTKQHSPNGKWQMKPFDPIALKKTMTRWQTALMNVGWNTLYFENHDQPRVISAGAMTRELRKQSRQSISNSSARHEGNPFIYQGEEIGMTNSEMPLEMYDDLEIKNAYRELVIENKTMTEEDFRKAVAKKGRDHARTPMQWDDGKYAGFTDGEAWLAVNPRYQEINVKESLADEDSIFYYYQKLIGLRKQNKVIVYGDYRLLLEEDPRIFAYIREYRGEKLLVP

SEQ ID NO: 40027 - protein, 411 aa, Nostoc sp. PCC 7120
MGLGINLFGHNPPFIQTAISEQLQQGMHIGVQNTLAGEVAQLISELTGAERVTFSNTGTEAVMTAVRIARAATKRPKIAIFTNSYHGHFDSVLVRATMTEYAKKAARRIIAAKSGSFIGRLAQPIQALFTANLNPKAVPAAPGIPNSAAADVLILEYGNEHSLKLIRKHRRELAAVLVEPVQSRCPELQPREFLQQLRQITQELGIVLIFDEMVTGFRIHPGGAQAHFGVKADIATYSKIVGGGLPLSVIAGKASYMNYIDGGQWQFGDDSTPQVPTTFFAGTFCKHPLALAAARATLQHLKISGIELHNELNQRTTQLVNDLNTHMTQQGIAIKFTSFGSFFAVAASQSAVPPMAINLLSYHLITKGIHLRQGDKGGFLSTAHTEEDINLIKKAFIDSINELRNEGFINN

SEQ ID NO: 40028 - protein, 562 aa, Geobacillus thermoglucosidasius
MERVWWKEAVVYQIYPRSFYDSNGDGIGDIRGIIAKLDYLKELGVDVVWLSPVYKSPNDDNGYDISDYRDIMDEFGTMADWKTMLEEMHKRGIKLVMDLVVNHTSDEHPWFIESRKSKDNPYRDYYIWRPGKNGKEPNNWESVFSGSAWEYDEMTGEYYLHLFSKKQPDLNWENPKVRREVYEMMKFWLDKGVDGFRMDVINMISKVPELPDGEPQSGKKYASGSRYYMNGPRVHEFLQEMNREVLSKYDIMTVGETPGVTPKEGILYTDPSRRELNMVFQFEHMDLDSGPGGKWDIRPWSLADLKKTMTKWQKELEGKGWNSLYLNNHDQPRAVSRFGDDGKYRVESAKMLATFLHMMQGTPYIYQGEEIGMTNVRFPSIEDYRDIETLNMYKERVEEYGEDPQEVMEKIYYKGRDNARTPMQWDDSENAGFTAGTPWIPVNPNYKEINVKAALEDPNSVFHYYKKLIQLRKQHDIIVYGTYDLILEDDPYIYRYTRTLGNEQLIVITNFSEKTPVFRLPDHIIYKTKELLISNYDVDEAEELKEIRLRPWEARVYKIRLP

SEQ ID NO: 40029 - protein, 178 aa, Brassica napus
  misc_feature (23)..(23): Xaa can be any naturally occurring amino acid
  misc_feature (32)..(32): Xaa can be any naturally occurring amino acid
  unsure (1)..(178): unsure at all Xaa locations
STHASVLKEGDFCGDELLTWALXPKSGSNLPXSTRTVKALTEVQAFALIADELKFVASQFTRLHSRQVQHTFRFYSHQWRTGAACFIQAARRRYTKRKKLEELTKEEEMEEESSAARLIAGGSSPFSIRATFLASRFAANALRGVRKNPTAKLLALSQPTKELLKVQRPPEPDFSADC

SEQ ID NO: 40030 - protein, 408 aa, Cotylidia sp. MB5
VIGHVDSGKSTTTGHLIYKCGGIDKRTIEKFEKEAAELGKGSFKYAWVLDKLKAERERGITIDIALWKFETPRYMVTVIDAPGHRDFIKNMITGTSQADCAILIIAGGTGEFEAGISKDGQTREHALLAFTLGVRQLIVAVNKMDTTKWSEERFNEIVKETSTFIKKVGYNPKAVAFVPISGWHGDNMLEESPNMPWYKGWTKEGKGGTVIKGKTLLDAIDGIEPPVRPDDKPLRLPLQDVYKIGGIGTVPVGRVETGTIKAGMVVNFAPSNVTTEVKSVEMHHEQLDAGRPGDNVGFNVKNVSVKDIRRGNVASDSRNDPAKEAASFNAQVIVLNHPGQIGAGYAPVLDCHTAHIACKFAELIEKIDRRTGKVMEASPKFVKSGDACIVKLVPSKPMCVETYNEYPP

SEQ ID NO: 40031 - protein, 375 aa, Thermosynechococcus elongatus BP-1
MLSCPMVAIPIQPLSERPLTTDLVRQYLQEIGRVPLLTPSEELRLAEQVQQYQALLAVRDQSDDPQLKRYVAAVRERDRLRPLLGRPLSRAQWAAGLKMSVAELQTCVQAGRQAWAKAANITLSELQHIERQGQRAKNQLLQANLRLVVNIAKKYQHHGVEFLDLIQEGSLGLERAVEKFDPTKGFRFSTYAYWWIRQSITRAVASQSRTIRLPIHMVEKLNKIKRAQRRLAAQRGAMPSLADIAQELNLEVSQVRQVLMAVPKSVALEQRVGSDQETELQELIESPAPTPDEVIMRESLRTTLKQLLSDLSPRERQVMELRYGLGEQPALELAEVAVLLGLSRERIRQIEHRALQKLRQPQRRREIQDYLEEFA

SEQ ID NO: 40032 - protein, 398 aa, Ehrlichia canis str. Jake
MTNYEEIFDNKIKRIKEEGRYREFTGFSRIPGQFPYAIECNVNNVVTLWCSNDYLGMGQSEHVMLAIKNYSSSVGAGGTRNISGTTKEIIELEESLADLHKKPAALTFVCGYVANQTTISTLLSVIPDIVVFSDEKNHSSMIEGIRGSNRAKHIFKHNDVKHLEALLKSVDRSLPKIIIFESLYSMDGDIAPIAEICDLADEYGAMTYLDEVHAVGMYGNHGGGISEQENISDRITIIQGTLSKAFGVMGGYITGSKSLIDVVRSFAPGFIFTTALSPLIASSARISVEHLKNSSVEREKQREVVNKVKESFSRTGINFLKTDTHIIPIIIGDPVACKDISKILLNDYKIYIQSINYPTVPVGTERLRITPTPYHTDEMIDILTQALVDVLGRFKIVC

SEQ ID NO: 40033 - protein, 343 aa, Deinococcus radiodurans R1
MTDASFPALPPPLVSLGDLAWDVLAKPDTLLLPGGDTTGRLELSGGGSAANLAVWAARLGAPTTFVGKIGQDRFGELATAELRAEGVRAEVLASAAHPTGVILALIDRRGQRAMLTGQGADWELLPEELPRDVLSSAGHLHLTAWSLFRDPPRAAALEAARIAKAGGATLSLDPGSFQMIQQLGREAFLNIVDALPFDVMFPNDDEARAMSGERDNEAALTWLRARYPRALIALKMDEDGALIEGPQTARVQVPATRDPLVDATGAGDAFGGAFLSQWLRHHDAERAARVAVQVGGWVVSRFGARPPADPDLTRRLASVGADLLTPDPAAAPDPSQDSPEVNA

SEQ ID NO: 40034 - protein, 260 aa, Oryza sativa
MGRSPCCEKAHTNKGAWTKEEDQRLIAYIRAHGEGCWRSLPKAAGLLRCGKSCRLRWMNYLRPDLKRGNFTDDEDELIIRLHSLLGNKWSLIAGQLPGRTDNEIKNYWNTHIKRKLLARGIDPQTHRPLLSGGDGIAASNKAAPPPPHPISVPAKAAAAAIFAVAKPPPPPRPVDSSDDGCRSSSGTTSTGEPRCPDLNLELSVGPTPSSPPAETPTSARPVCLCYHLGFRGGEACSCQADSKGPHEFRYFRPLEQGQYI

SEQ ID NO: 40035 - protein, 256 aa, Mycobacterium marinum
MRYPDLAGKATIVTGAGAGIGLAIAERLAAEGAAVLCADIDGASAEQAAAKIGSGAVGYQVDVSAEEQVAGMVEACVTSFGGLDKLVANAGVVHLAPILDTAVEDFDRVIGINLRGAWLCTKHAAPKMVERGGGAIVNMSSLAGHIGVGGTAAYGMSKAGISHLSRVTAAELRSANVRSNALLPAFVDTPMQQSAMAMFDEALGTGGANTMIARLQGRMARPEEMASIVAFLLSDDSSMITGTTQIADGGTIAALW

SEQ ID NO: 40036 - protein, 687 aa, Xanthobacter flavus
MTAHAAALAAADAPAPVDRSPGALGWPVTAALRALAMDGVEQAKSGHPGAPMGMAEIAAVLWREHLRHNPADPSWPDRDRFVLSNGHGSMLIYALLHLTGYDLPIAELKRFRQLHSRTPGHPELGMTPGVETTTGPLGQGLANAVGMAIAEKTLAAQFNRPGLSIVDHRTFVFLGDGCLMEGVSHEACSLAGRLGLGKLVAFYDDNGISIDGKVEEWFPDDTPARFAAYGWHVIRNVDGHDPAMLRDAVEAALSETGKPTLICCKTTIGRGAPTKEGHQDTHGAPLGAEEIARTRAAMGWDHAPFEVPEDIYALWDARRSGAARQSAWDARMEAYERAYPAEAAEFRRRLKGDLSPAFAATYAAALKATVEKAETVATRKASQLALAALAPAVPEFLGGSADLAHSNLTTFPGAVPITRDPAGNQIFYGVREFGMSAIANGIALHGGFIPFVATFLVFSDYARNAMRMSALMGQRVIYILTHDSIGLGEDGPTHQPVEHVESLRLIPNLDVWRPADTVETLAAWHAALTRTNGPSAFILSRQNLPCWPRDAAQIEGIEAGAYVLRESEGLARAVLVATGSEVKLAAAAADLLDTAGIPTRIVSMPCRERFEALTETERAALFPKGVPVVAVEAGVTRGWRGLSGTRADGIIAIGIDRFGESAPEKDLWPLFGFTPEAVADAVRRAVG

SEQ ID NO: 40037 - protein, 121 aa, Arabidopsis thaliana
LMQTVVLKVGMSCQGCVGAVNRVLGKMEGVESFDIDIKEQKVTVKGNVEPEAVFQTVSKTGKKTSYWPVEAEAEPKAEADPKVETVTETKTEAETKTEAKVDAKADVEPKAAEAETKPSQV

SEQ ID NO: 40038 - protein, 149 aa, Medicago sativa
YMSSERKLAADLGYASPIHNTIKDTHKCFNDCSNYMLEKIANGPGGVVLATHNIESGKLAAAKAHELGIGKVNHKMEFAQLYGMSEALSFGLSNAGFQVSKYMPFGPVETVMPYLLRRAEENRGVLAASGFDRQLMRKELVRRVKASVL

SEQ ID NO: 40039 - protein, 541 aa, Pseudomonas fluorescens Pf-5
MRHFVLQVSRPVTKWRNAIVLNDLGFPSVGSPTLVARGSVTFWRNSCVRYKERPVGFFLRERMQTGWSYSFFVAKVLFMSGTQLSNDLEQGLKPRHVTMLSIAGVIGAGLFVGSGHAIAEAGPAVLLAYAAAGTLVVLVMRMLAEMAVASPDTGSFSTYADRAIGHWAGFTIGWLYWWFWVLVIPLEANAAATILHAWFPNVAIWVFTLVITLLLTATNLFSVKNYGEFEFWFALIKVVAIIGFVILGLAAICGLLPNSQVSGVSHLVDTQGFMPNGMGAVLAAMLTTMFSFMGTEIVTIAAAESHNPGKQISKATNSVIWRIGLFYLVSIFIVVALVPWNDPSLAQVGSYQTVLDRMGIPNAKLIVDLVVLVAVTSCLNSALYTASRMLFSLGKRGDAPAAAKRTNASGTPYWAVILSTAAAFLAVFANYVAPAAVFEFLLASSGAIALLVYLVIAVSQLRMRHKRMAAGEKIAFRMWLFPGLTYAVIVFIVAVLGIMLFQEEHRVEILATGLLSVIVIAAGLMVARRRKAERNGALALN

SEQ ID NO: 40040 - protein, 449 aa, Methanococcoides burtonii DSM 6242
MATDIEQKVMEAKMASIVLASVDTQTKDNALEAMAKALDANRNKILEANKADLEEAERMKNEGKLSQALVDRLKVTDPKIDGMISGIRDVIKLEDPSGRTINTLELDKGLELYQVSSPIGLIGVIFESRPDVVPQVMSLCLKSGNATVFKGGSEALNSNRVIFNILVEALEDTPGIPKGAFQLMETREEVMDILALDEYIDLLIPRGSNDFVKFIQDNTKISVLGHADGICHVYVDTNADLNKAYDVCFDSKVQYPAVCNAMETLLINREIAEEFLPEMVRRYEEVGVELRFDEGSYAIAEKLGSANIAKATEDDWKTEYNDFILSIKLVDSIEEAIDHINKYGSHHTDAIITENKTKRKQFIALVDSSSVMVNASTRFADGFRYGKGAEVGISTNKIHARGPVGMEGLVIYKYVLLGNGDKVATYAGDTPRPFTHKELDSKLSDIINE

SEQ ID NO: 40041 - protein, 590 aa, Schizosaccharomyces pombe
MLDNSQVNDLYPIAVLIDELKHDEITYRLNALERLSTIALALGPERTRDELIPFLDESIDDEDEVLSALADQLGNFVDYVGGPEYAHVRLSPLENLAATEETVVRDKAVDSLNKVCICLSQEQLEQYFVPLVQRLSTAEWFTSRASSAGLYCAAYSQSENPAVKVSLRQSFSHLCHDEAPMVRRPAATNCAKFVFLVTKQEAIDEFIPLFNSLSNDDQDSVRLLSFDIMVSLAEVLKSDSEIRHYLLQPLRSFVSDSSWRTRYMVAANFVKLAKVVGPSLIKDELIKPFVLLMKDTEQEVRRAIATQIPGFCELLDKRIVLEEIIPVIQELINDPAQHVRAALGMNIGALAPQLGKEKTTEYLLPMFLELLKDENPEVRLNIISKLEVVNKVVGIELLSQSLLPAIVTLAEDKQWRVRLAIIDYIPLLAQQLGVEFFNEKMGNLCMSWLEDHVYSIREAAIKNLRKLTEIFGLEWATETIIPKFLAMRSHPNYLYRMTTIFAISEIAPALNAEVIEKQILPTLEQLVNDPIPNIRFNVAKAFEVLKPVLAAGGDSTVYEQQIIPLLEQLTKDNDPDVQYFATQALEQTND

SEQ ID NO: 40042 - protein, 82 aa, Triticum aestivum
MALSGRMAASALLLLVLLVATEMGAPTRKVAEARDCLSKSHKFKGACLSSSDCPSICRTENFPGGECKLDSFARKCFCKRVC

SEQ ID NO: 40043 - protein, 286 aa, Vigna radiata
MCLVLVSLASSALCAAPRRPVDVPFGRNYIPTWAFDHIKYFNGGSEIQLHLDKYTGTGFQSKGSYLFGHFSMNIKMVPGDSAGTVTAFYLSSQNAEHDEIDFEFLGNRTGQPYILQTNVFTGGKGDREQRIYLWFDPTKAYHRYSVLWNMYQIVFLVDNIPIRVFKNLKELGVKFPFDQPMKVYNSLWNADDWATRGGLEKTDWSKAPFVAEYKGFHVDGCEASVNSRFCATQGKRWWDQTEFRDLDSFQWRRLKWVRQKFTIYNYCTDRTRYPQLPPECRRNRDI

SEQ ID NO: 40044 - protein, 449 aa, Pseudomonas putida
NMPEHAGASLASQLKLDAHWMPYTANRNFLRDPRLIVAAEGSWLVDDKGRKVYDSLSGLWTCGAGHTRKEIQEAVAKQLSTLDYSPGFQYGHPLSFQLAEKITDLTPGNLNHVFFTDSGSECALTAVKMVRAYWRLKGQATKTKMIGRARGYHGVNIAGTSLGGVNGNRKLFGQPMQDVDHLPHTLLASNAYSRGMPKEGGIALADELLKLIELHDASNIAAVFVEPLAGSAGVLVPPEGYLKRNREICNQHNILLVFDEVITGFGRTGSMFGADSFGVTPDLMCIAKQVTNGAIPMGAVIASTEIYQTFMNQPTPEYAVEFPHGYTYSAHPVACAAGLAALCLLQKENLVQSVAEVAPHFEKALHGIKGAKNVIDIRNFGLAGAIQIAPRDGDAIVRPFEAGMALWKAGFYVRFGGDTLQFGPTFNSKPQDLDRLFDAVGEVLNKLLD

SEQ ID NO: 40045 - protein, 185 aa, Listonella anguillarum
MSKRRVVVTGMGMLSPVGNTVESSWKALLAGQSGIVNIEHFDTTNFSTRFAGLVKDFNCEEYMSKKDARKMDLFIQYGIAAGIQALNDSGITVTPENAPRIGVAIGSGIGGLDLIETGHHALVEKGPRKVSPFFVPSTIVNMVSGNLSIMRGLRGPNIAISTACTTGLHNIGHAARMIAYGDARC

SEQ ID NO: 40046 - protein, 607 aa, Porphyromonas gingivalis W83
MAVTIYHPAELPQRQAEKSPNKTIIKYYDRESKQWRNISWSKFAAGVMNAAKALAEIGLESGERIGIYSPNMVHCLYTELGAFAMRGVVVPLYATSSPEQLRFIVEDSSMETLFVGEQFQYNNAYRVQKEYGTLKRIVVFDERVVLNPEDKTSKYFSEFVRLGDSMPNETKVKVSSREAIPSDPALIIYTSGTSGRSKGVLLLHSNLMYQMKVHSEHIPVYGPGELSIAFLPMSHIFEKAWTLFCLTTGTRIAILRDPKKVLEALPQIRPSLMCNVPRFWEKVYQGVNEKMASSPRILKGVYRRAMAVGQRYRLDYWNEGKRAPLLLSMQYAFYNCTIFTLLKRVLGLQRGRYFPTAGAPLSDEINIFLQSVNIPIIVGYGLSETTATVSFYPQRGFKIGSMGKVMPGLDARIDPDNNEILVKGESVMSEYYNLPEETAGAFTPDGYFRTGDAGRMDPDGTLYFLERIKDLYKTANGKYIAPQMIEGMLTKDPIIEQIAVIGDRFKYVSALVYPNWELVRQAAIKRGLEQARTMSVDEMAANPEINRLMMARIEAAQDSLAAYEKVKYITLLAEPFTLEKGELTETMKLKRRVINEHYAEAIEKMYL

SEQ ID NO: 40047 - protein, 908 aa, Porphyra yezoensis
  misc_feature (612)..(612): Xaa can be any naturally occurring amino acid
  unsure (1)..(908): unsure at all Xaa locations
MTPGPITTDAAAGVGVDTMDGTMKWELFEENRTLTTRSGQMIVNDGEFGKWNDTDEGRVKCFLTPDEGFGDAIESLVIVLYRLPIIAKRDATTGAWSFKWDDDALYLTSTGLRKGLEQLKVAPLWVGILNSDDEVPRQEREGVADRLLEEFNCVPVFIPHDTLKQLYQGFCKGTLWPLFHMVSSATDHTEHTTRFDDRLWRVYMNVNRMFRDKVVEVYDGDRTLIWVHDYHLMLLPQALRSRLSGVKIGFFLHIPWPSSEVYRVLPWRNELLKGMLSATLLGFHLFDYARHFLSACVRLLNLEHEANRGSLGLEYDGRHVMLRVSHIGVDPERFSEGLSAPSLTDRVAEFKERFADCTVLGAVDDLDLIKGIALKLMGFQRYLDSAPKMRGKVVLVQVAIPKAARVKESVRNEIRELVAAINNKHGDGSGRRPVWYLEESISFESRLALYSIMDALVVTPIRDGLNLIPYEYIVSTSEGKGQLILSEFTGCSRALSSAERVNPWDLEKLSNVLDMVVQKAIAAAPEVELKRRADKAYVSAHSSQQWAQSFLHDLKEASEPAQVVVKVGPLAGLPGVLAYDEFTLLNRSAVLRAYKAAKRRLFLFDYDGTLTXITDQSSQMAHAWARPSEAVAANLDTLSKDPLNDVYIMSGRKTEVLEAGLNNSPTIGIAAEHGFFYRKKNSKEWNRLLEDADLSWMELALRIMLMYTDRTDGSYVEQKKAGLVWHYLDADREFGSWQAKEMRDHLESLLSPFSVQVVTGYGWLQVRMAAMNKGVMVETILRDMPEPPDFVLCCGDDRTDEDMFAYLDTHLDPSVKQFTCTVGVKPSHARYYLHSSNEVGALLETLVTGSYPRGVRPRPRGGSVSLADLVPDDEGSSSTPAVPQRTNGPRTGASGQKRRGLASSLPSQ

SEQ ID NO: 40048 - protein, 250 aa, Frankia sp. EAN1pec
MTATGDLEGKVAIVTGAANGIGVAIATRFVTEGAKVVIADIDAGGQGVAAELGERATFFSTDVSDPVQTQALVDFTIRHFGGLHVLCNNAGVSGGLRRFLDDDLRDFERVVAVDLYGVMACSRSAARHMVDHGGGAIVNIASGAGITPGIGMLPYRAAKAGVVQFTRCLAVEVGEHGIRANCIAPANISTDINAAFDKATVIRLQPLPHQGRTGDIAEAALYLASDRAAHVTGLVLAVDGGMSLGTPPRR

SEQ ID NO: 40049 - protein, 572 aa, Frankia sp. EAN1pec
MNESEPFAEQPLRETAAEGGDTGTSQDPLWFKRAVFYEVLVRGFADSNGDGTGDLAGLVSKLDYLEWLGVDCLWLLPIYSSPLRDGGYDISDYFQILPEFGDLGDFINLVDEAHRRGLRIIADLVMNHTSDEHPWFQASRSDPDGPYGDFYVWSDTDEKYPDARIIFVDTEKSNWTWDPVRGQYYWHRFFSHQPDLNYDNPDVQEAMLEVLRFWLDLGLDGFRLDAVPYLYVREGTNGENLPETHEYLRRVRKEIDAKYADRVMLAEANQWPSDVVQYFGNDDECHMAFHFPLMPRIFMAVRRESRYPISEILAQTPEIPPNCQWGIFLRNHDELTLEMVTDEERDYMYAEYAKDPRMKANIGIRRRLAPLLDNSRDQMELFTALLLSLPGSPVLYYGDEIGMGDNIYLGDRDGVRTPMQWSPDRNAGFSTTDPARLYLPVIMDPVYGYQALNVEAEQRMPTSFLSWTRRMIEVRKRHPVFGLGTYEELGASNPSVFAYVREFGDDRVLCVANLSRFAQPVELDLRRFAGLVPVELLGRVHFPPVGELPYLLTLPGHGHYWFALSNPGEFTQ

SEQ ID NO: 40050 - protein, 630 aa, Bradyrhizobium sp. BTAi1
MIAFPYDYYLIGWFVLAAAATAYVAYDQFAGNPEPTVMKCGFILVTLYMGPFGLLLYVLADKEPRPGEHEKFTSPLWKQGVGSTIHCVAGDATGIILAAVVTASLGLPMWIDLIVEYVAGFSFGLFIFQSLFMKRIMGGTYWQNVKMSFMPEFISMNAMMAGMAPTMSLLMMGRDMRAMDPFELVFWGVMSFGVMVGFATAYPFNVWMVKKGIKHGLMTEPPKPQKHGSGHQDGGRGAQHGAEGPDDHGASGHGSHGGHGMKPEATTPQLAALAGVTGFLLISGMVLPGFSVNLRLSARDVQGAIMPPGMIKTFDLPAEAMKDMAAVPPRQVSYDAPADARGDRALEPRIENGLKVFDIEASVIRWHILPDVAVEAYAYNRQIPGPRLELTEGDHVRINFHNSLPESTTVHWHGLIVPNEMDGPAEITQKPIPSGGSYTYEYTVGQHGTYFYHSHDHPDRQQALGLYGALLIAPKDPSTEVRADVDYTIQLQEWLKREWLTYPAMLMEGEIPNYFTINGKAYPSTDTIPMKVGQTVKLRFIGTNNNFVHPMHVHGGPFEVVAVDGVTLQDSARYQADTVNVGPGQRYDVIWTARKPGKWLVHCHIPHHTANNNVEQKGGGGLMLVLDVQS

SEQ ID NO: 40051 - protein, 427 aa, Neisseria meningitidis Z2491
MNRNEILFDRAKAVIPGGVNSPVRAFGSVGGVPRFIKKAEGAYVWDENGTRYTDYVGSWGPAIVGHAHPEVIEAVREAALGGLSFGAPTEGEIAIAEEIAKIMPSVERLRLVSSGTEATMTAIRLARGFTGRDKIIKFEGCYHGHSDSLLVKAGSGLLTFGNPSSAGVPADFTKHTLVLEYNNIAQLEEAFAQSGNDIACVILEPFVGNMNLVRPSEAFVKALRELTEKHGAVLIYDEVMTGFRVALGGAQSLHGITPDLTTMGKVIGGGMPLAAFGGRKDIMECISPLGGVYQAGTLSGNPIAVAAGLKTLEIIRREGFYENLTARTEQLVQGFRTAADAAGIEFTADSVGGMFGLYFAAHAPRNYADMARSNIEGFKQFFHGMLDRGIAFGPSAYEAGFVSAAHTPELIDETVAVAVEVFKAMAA

SEQ ID NO: 40052 - protein, 337 aa, Acrosiphonia duriuscula
MPRNRDDSPDGAYLIHGRYEKIEKLGEGTYGKVYKARDSKTDQVVALKKCRLQLDAEGVPPTTIREVSLLQVLSRSNHVVKLLGVEQIEEDGKVVLYLIFEYLQHDLKKFMDFKKKEKHNPLQPELVKPYLFQLIRGMAFMHQHGVMHRDLKPQNLLVDPKTNVLKIADLGLGRVFALPCKAYTHEIVTLWYRAPEVLLGTKIYSLPVDVWSIGCIFAEMVKGIPFFPADCEIAQLFMIFQVLGTPNEEVWPGVTSLRDWHMYPQWQPMDLHTHLEGLLDHQGCDLLKKMLVYNPNKRIPAKQAMKHPYFDDLDMEVMDALENPEVLNAGMEYQENA

SEQ ID NO: 40053 - protein, 88 aa, Brassica napus
  misc_feature (16)..(16): Xaa can be any naturally occurring amino acid
  misc_feature (25)..(25): Xaa can be any naturally occurring amino acid
  misc_feature (37)..(37): Xaa can be any naturally occurring amino acid
  misc_feature (42)..(42): Xaa can be any naturally occurring amino acid
  misc_feature (46)..(46): Xaa can be any naturally occurring amino acid
  misc_feature (62)..(62): Xaa can be any naturally occurring amino acid
  misc_feature (72)..(72): Xaa can be any naturally occurring amino acid
  unsure (1)..(88): unsure at all Xaa locations
MASQQEKKQLDERAKXGETVVQGGXGGKSFEAQQHLXEGRSXGGNXRKEQLGTEGYQQMGRXGGTRTGKADXEDEGEEMDELTSRTRT

SEQ ID NO: 40054 - protein, 506 aa, Thermosynechococcus elongatus BP-1
MLLEAPTVPISPAALLHSLLELRQEITKEGEARFQEWQLKIKRSEFIPSARNLAYYLALRWRDLRAMQMALMPWGLSSLGRIESRVLPNLDAVINTLGALCHTHGSLPPRPPLDAFFAGDRQLRRQTEELFGPIRGKRHVRIMVTLPTEAATDRQWSITLLRKGMNCARVNCAHDDPATWEAMIEHLRAASHITGQPCKILMDLGGPKPRIADIFPETVRVHSGDRLRLTTEICPEGGEIPQFTCSLPEIVPQLEVGQRVWIDDGRTGGRIVSKDAQGVELTITHCKEGQRLKVAKGLNFPDSDLRLCPLTASDREHLAFACRYADIIGYSYVQSAEDIALLQRELAHCCGDCADQMGIIAKIETPKAIRALPEMIIQAAGRQPFGVMIARGDLAVEIGYQRLAEMQEEILWLCEAAHVPVVWATQVLENLVKKGVPSRAEITDAAMAERAECVMLNKGPYVGLAVDILDDVLARMEAHQQKKTPQLRALHSWHPDKTIGRPSICD

SEQ ID NO: 40055 - protein, 427 aa, Streptococcus pyogenes MGAS10394
MTHSTKQEHSHSQSAVLGLQHVLSMYAGSILVPIMIAGALGYSARELTYLISTDIFMCGVATFLQLKLTKHTGVGLPVVLGCAFQSVAPLSIIGAQQGSGAMFGALIASGIYVILVAGIFSKIARFFPPIVTGSVITVIGLSLVGVAMGNMGDNVKEPTAQSMMLSLLTIVIILLVQKFTKGFVKSISILIGLVAGTLVSAMMGLVDTTPVVEASWIHVPTPFYFGMPTFEITSIVMMCIIATVSMVESTGVYLALSDLTNDQLDEKRLRNGYRSEGIAVFLGGLFNTFPYTGFSQNVGLVQISGIKTRRPIYYAAGILVVIGLLPKFGAMAQTIPSPVLGGAMLVLFGMVALQGMQMLNRVDFQKNEYNFIIAAVSISAGLGFNGTNLFASLPETAQMFLTNGIVIATLTSVVLNLVLNGKDKQDE

SEQ ID NO: 40056 - protein, 459 aa, Clostridium perfringens str. 13
MSDFNKKDENLNDYFGFDDKENKTLDSDKDIKDKENIESNNDTKQTNIDETQQLNIDNEINSKDEVKKDDDKNFSDVKSKSSKESNDNSKNKKVKKKSGFKRGIALVAGAVIVAILGGAIGAGGVYYAFKNSIPVSTLENNSNTSVNPPAFKGEDGALTVPQVVEKVTPAVVGVSTKSLVRDQFFNVKEQEGLGSGFIINEDGYVVTNYHVINGAQEVKVIFSDGKEVNAKVVNYDAERDIAVIKITDDVKMPGIAQLGDSSTVKAGEEVIAIGNPLGKEFSSTVTKGIVSSPNRKMKTENGNVLDYIQTDAAINPGNSGGPLINSKGEVIGINTAKKVGEDIEGIGFAIPINEVKTRLGSLSKPILKLGITARTVTPELAKENKLEEGVYVVGVQEFSPAEKAGLKIGDLIVEFGGKRVKTLEELNQVKSQYNDGDSVPVEIIRDGKKVNLNLTLVAN

SEQ ID NO: 40057 - protein, 574 aa, Arabidopsis thaliana
MSSCLLPQFKCPPDSFSIHFRTSFCAPKHNKGSVFFQPQCAVSTSPALLTSMLDVAKLRLPSFDTDSDSLISDRQWTYTRPDGPSTEAKYLEALASETLLTSDEAVVVAAAAEAVALARAAVKVAKDATLFKNSNNTNLLTSSTADKRSKWDQFTEKERAGILGHLAVSDNGIVSDKITASASNKESIGDLESEKQEEVELLEEQPSVSLAVRSTRQTERKARRAKGLEKTASGIPSVKTGSSPKKKRLVAQEVDHNDPLRYLRMTTSSSKLKLLTVREEHELSAGIQDLLKLERLQTELTERSGRQPTFAQWASAAGVDQKSLRQRIHHGTLCKDKMIKSNIRLVISIAKNYQGAGMNLQDLVQEGCRGLVRGAEKFDATKGFKFSTYAHWWIKQAVRKSLSDQSRMIRLPFHMVEATYRVKEARKQLYSETGKHPKNEEIAEATGLSMKRLMAVLLSPKPPRSLDRKIGMNQNLKPSEVIADPEAVTSEDILIKEFMRQDLDKVLDSLGTREKQVIRWRFGMEDGRMKTLQEIGEMMGVSRERVRQIESSAFRKLKNKKRNNHLQQYLVAQS

SEQ ID NO: 40058 - protein, 375 aa, Methanococcoides burtonii DSM 6242
MTNRKEIIGDAEKIVIKIGTTSISREDGSLNNEFMDTIASQVSELHRAGKQIILVSSGSIGIGIEILDLGCRPKEIPVRQAAAAVGQGVLMQHWTEAFQKYGLNVAQILLTYDSFTNRLTYLNLRNSISTLLSYGVIPIINENDPICVHEIEATLGDNDKLSAMVASKMEADLLILFTDIDGLYDKNPKRHDDAVLLRTVEEITPTIESYGGNPTSMKGVGGMRTKIDAAKICNISGCYMVIANSNVDDGIRRILDGEELGTLFLTNQFVHKNRIRWIILARSSGSIVVDTGAKEALAKRMSLLPSGVLGVAGTFDRGDIVKLECDGVVFGKGITDYTSEELKAIKGKQTNEIADILGYKNYDHVVQKDNIGLFK

SEQ ID NO: 40059 - protein, 358 aa, Oryza sativa
MAAMAAAVASSPSPSPASTRLLRGHHPPPSCSAPSLLRLTRSSRRLRLRAAAAAEEADVLPGPGAEGEMATGGRLEEQPEGPIGGSQVDIGGLAFQGDMGGGGFAGGSGGAGAGGGDGNKMLDRGINTAIVLGASTYALTKLLTVDHDYWHGWTIFEILRYMPEHNWSAYEEALKTNPVLAKMMISGVVYSLGDWIAQCYEGKPIFEFDRARMFRSGLVGFTLHGSLSHYYYHFCEALFPFKDWWVVPAKVVFDQTAWSAIWNSIYFVVLGFLRLESPATISSELKSTFWPMLTAGWKLWPFAHLVTYGLVPVEQRLLWVDCVELIWVTILSTYSNEKSEARNSEDASTSNASNDNSI

SEQ ID NO: 40060 - protein, 430 aa, Oryza sativa
MAQWDALVDAALARLASRSLLRATRPIALAPPPAPPETFPCPGPWDRAAVEIRLDRATLHQWLAEGGEGSGQEEKVDEKLILFSGNDYMGLSSHPAIRHAAVKAAEEYGMGPRGSALICGYTTYHKMVEESLAELKKKEDCLLCPTGFSANMAVMTALGNISSLLAAGRKPAEDERIAIFSDALNHASIIDGIRLVERQQEVVSFVYKHCDMSHLELLLSSCSMEKKVVVTDRQVIHPSKFHHLRSIYSLYYLFSMDGDFAPLPELVKLRRKYGFLLVIDDAHGTLVCGENGGGAPELFECENEIDISVGTLSKAAGCQGGFIACSTRWKRLIQSRGRSFIFSTALPVPVVASVYVGSEKAALRAGRDMLRSGFHVTPIRPPTVPPNSCRLRITLSASHSSDDIKRLVDALTPWLPHKHDIQIYAVASKL

SEQ ID NO: 40061 - protein, 330 aa, Bdellovibrio bacteriovorus HD100
MKKVLVTGANGFLGSWLTKALLEEGHDVYALVRPKSDLSELEGVKCKYVHGDVTDVHSLLEATKGMDTVFHLAGVIAYKKSQRALMDKVNVEGTANVIAVCREHNVRRLVYLSSVVAIGAGYTPDQILNEESPYNIADLNLGYFETKHQAETLVKSACDKNEIDAVMLNPSTIYGRGDAKKGSRKMQVKVAQGKLNFYTSGGVNVVAAEDVVAGILSAWKVGRKGERYILSGENILIKDLFAMIAAEAGVKPPKHQLPDGLLHAVGAVGDFMEKIGMKGPLSRENAYTATMYHWFDSSKAQKELGFTPRPAREAIHNSVQWMKDHGLVAK

SEQ ID NO: 40062 - protein, 254 aa, Sinapis alba
MGRGRVELKRIENKINRQVTFAKRRNGLLKKAYELSVLCDAEVALIIFSNRGKLYEFCSSSSMIRTLERYQKCNYGPPEPNVPSREALAVELSSQQEYLKLKERYDALQRTQRNLLGEDLGPLSTKELELLERQLDSSLKQIRALRTQFMLDQLNDLQSKERMLNETNKTLRLRLADGYQMPLQLNPNQEDHHVDYGRHDQQQQQNSHHAFFQPLECEPILQMGYQGQQDHGMEAGPSENNYMLGWLPYDTNSI

SEQ ID NO: 40063 - protein, 337 aa, Agaricus bisporus
MVNVGINGFGRIGRLVLRNALQMQILTVVAVNDPFLDVEYMAYLFKYDSVHGRYQGKVETKDGKLIIDGHKIAAFAEREPANIKWADCGAEYIVESTGVFKTEELAKEHLKGGAKKVVITAPGSGVPTYVVGVNLDKYDPKEVVISNASCTTNCLAVLAKVINDKFGIVEGLMTTVHATTATQKTVDAPAKKDWRSGRSVTNNIIPASTGAAKAVTKAIPDLEGKLTGLAFRVPTLDVSVVDLVVRLEKETSYDDVKKAMRDAADGKHPGIEKGIVDYTEEDVVSTDFVGSNYSMIFDAKAGIALNSRFMKLVAWYDNEWGYARRVCDEVVYVAKKN

SEQ ID NO: 40064 - protein, 323 aa, Glycine max
LSCYLQDNWPSVLFAMGGGLFLSLGNLSSQYAFAFVGLSVTEVITASITVVIGTTLNYFLDDKINKAEILFPGVGCFLIAVFLGSAVHSSNAADNKAKLSNFTGDYKDGDISSKEGDIVKSKDLESGSSSADNVEAGTAVFLVELEENLNFAAGFGKSTLIGLALTFFAGLCFSMFSPAFNIATNDQWNTLKKGVPHLTVYTAFFYFSISCFVIAMILNITFLYHPVLNLPKSSFKAYLADSDGRVWALLAGLLCGFGNGLQFMGGQAAGYAAADAVQVSFITSIIKNEFDWNTLILSRLFTLSFNHRLLRFVTLLCMIKSSH

SEQ ID NO: 40065 - protein, 209 aa, Synechococcus sp. CC9605
MKRTLLLLFTCLMLFSWPQRAMAELQTAVFAGGCFWCLEHDLEDLPGVRDAVSGYSGGQLERPTYRQVSSETTGHQEAVQVRFDPDQISYAELLRSYWRNVDPLDGGGQFCDRGDSYRPVIFTADVDQAEAAEASAQAAARELGQPRSALKVELRQAARFWPAEGYHQNYASTNSIKYNFYRFSCGRDKRLDQVWGENARTGNDWSKKD

SEQ ID NO: 40066 - protein, 1252 aa, Yarrowia lipolytica CLIB122
MSAPDDIESAIQKLYKQIEVEKNIIRGTKAAAQASQDSAFKLQCQSKLTDNQKNVNYLESKMRELKLRTRPEAMAPGPHPTQKRANFTKLDLIKYDTPFFGPRIQHMLQQLEFKMSVEKNYKEGFENALRLYQRDPKKIQEIENMRKESLQKMGLLKKSLKRYQDMHIDIDDAIDSDSINAPNIRRPLSGIVTITVHALRNVEHIASVRGKRPETMVTVKCEDKLVGRTKLSRTERWNDTFQFPVDKANEVEIIIYDRDGDHFKPVGLLWLTISDVAEEIRRRKNGQKLAATGWVAASETAAGGHADPASRGGAAASGATGSGLPTLEAPQIDRPVSSVVNYAGPTIEEWFVVEPAGQIYLTLGFEKTNRGVKRPHELGGLGLGRQNAIRKKEDVHEIHGHKFVAQQFYSIMRCALCGDFLSGAGFQCQDCRLTCHGKCYSKVVTKCISKSSTETDPDEEKLNHRIPHRFQVFTNKSANWCCHCGYILPLGRKSVRKCGECGVTAHVQCEHLVPDFCGMSMERANQILSEIKSTKIRRASQHPTTSTSSSQQSTLYSATPSHMHVNAGDRDGNGYGAGNSSDRLSLTPVDTNSSINSTATMRGERKNTVRRKEVGSAPSLPPKEGSVSSSAASLVGIPPPGVPAPGPPSAVPDRGQAYHQQRYDPTASTLDPRARRESQGYVLPTSASPKSPSRSPQQQQFQSSPSRDREEQPLYPPRNSSVGDIYPNRESTPSPSQVLSPVEDDVKMEDEDAFDKSIINNEPEASDASVSYSPPKSMIIDEQHKKHSASGSLDSGYQSLPVPGVHAEQQQRDEEDARAREQQHKEQQALRAQQQREQQMREQQYQQQQYQQQQYQQQQAQQQQVQQRQAAQQAQQAQAAAAAAVAATASQTQAAGASPASPAPASNRHSVVGKKKRPRIGLDDFNFLAVLGKGNFGKVMLAESKKTTNLYAIKVLKKDFIIENDEVESTRSERRVFQIANRESHPFLLNLYSCFQTENRVYFVMDYVSGGDLMWHIQKEGVFKPGRAQFYAAEVLLGIKHFHDNGVIYRDLKLDNILLTRDGHVKIADYGLCKEDMDYGRTTGTFCGTPEFMAPEILLEQRYGLAVDWWAFGVLIYQMVLGQSPFRGEDEDEIFDAILADEPRYPITLPGNCVSILTQLLTREPERRLGSGPRDAEEIMAHPYFANVNFDDIYHKRIPPPFVPKITSPTDVTNFDQEFTSETPALTPVTTTLTSAMQDQFRNFTWMCDEAI

SEQ ID NO: 40067 - protein, 203 aa, Glycine max
NMVSATVDSDFAFLESVQQYLLGHDSINLMSETHQAASHDPFSDPNKCDGDSGNIAFRSEDATAVVARDHAPPTWKHYRGVRRRPWGKFAAEIRDPKKNGARVWLGTYDTEEKAALAYDKAAFKMRGQKAKLNFPHLIDSDNSDELSEPVMMTTSKRSLLEISSPSSSCSDDSSESQGTKRRKSLAELLNKLAKNRSQVKVEC

SEQ ID NO: 40068 - protein, 150 aa, Yarrowia lipolytica CLIB122
MQIFVKTLTGKTITLEVESSDTIDNVKSKIQDKEGIPPDQQRLIFAGKQLEDGRTLSDYNIQKESTLHLVLRLRGGGKKRKKKVYTTPKKIKHKRKKNKLAVLNLYKVDDDGKVERLRRECESESCGAGVFMADMKDRQYCGRCHLTLKA

SEQ ID NO: 40069 - protein, 124 aa, Aegilops comosa
  misc_feature (2)..(2): Xaa can be any naturally occurring amino acid
  unsure (1)..(124): unsure at all Xaa locations
DXEETLKRLVFDMKKSPAEVFDALKNQTVDLVLTAHPTQSVRRSLLQKHSRIRNCLVQLYSKDITPDDKQELDEAPQREIQAAFRTDEIRRTQPTPQDEMRAGMSYFHETIWKGVPKFLRRVDT

SEQ ID NO: 40070 - protein, 380 aa, Sulfolobus solfataricus P2
MVSRIGKEIEISPVELGSQIAKRVKINMASGTPDPRKMPIKEIKDAYSEVLNELGPKVLFYPGAGGQEELIREIEDKFLSVLNLTKRKDEKIVVTSGAQHAMELLGKYFLENDVIAVENPTFIETFNALKLRSSSVIPISLDPSGIDVNELETLLKVVKIRLLYVIPNCHNPAGVNMSECRRKRLIELAEKYDFYIIEDDPYRPIAGETPQPIKNYDNNGRVIYVSSFSKIIAPGLRVGFLIAKEDIAEKISLMEQLDFSTSTINQYVVARLLRKGVVTERSKELYEHYKSKMKILVDSLVDKGLDKFNEPKCGFFLLLDVGKDSWNVFHKAVEKGLSFVPAKPFFLRGGDTMARLSVSVATKEEIIEGVKILNEVIRNI

SEQ ID NO: 40071 - protein, 95 aa, Agropyron cristatum
DAFKNQTVDLVLTAHPTQSVRRSLLQKHSRIRNCLVQLYSKDITPDDKQELDEALQREIQAAFRTDEIRRTQPTPQDEMRAGMSYFHETIWKGVP

SEQ ID NO: 40072 - protein, 455 aa, Campylobacter lari RM2100
MSMAKQYINETLEKIQTISPRQPIFFQAATEVLNSLEPLLESNKTYQDHAILERIVMPEKTTIFRVVYINDAGKAQTHFGYRVQFNSSLGPYKGGLRFHPSVNLDVLKFLGFEQIFKNSLTGLMIGGAKGGANFDPKGKSEAEIMRFCQAFMAELSKIIGANTDVPAGDIGVGAREIGYMFGAYKKISSNFDGTLTGKKIPWGGSLARTEATGYGCVYFTQEMLAKYNNALEGKECAVSGSGNVAIYTIEKLHQLGAKAITISDSDGFVYDKDGIDLDLLKEIKEVKRARVSDYAALKKGAIFTPKSAYKQGCNGVWSIPCDLAFPSATQNELNLEDIKTLYHNGCRMVAEGANMPSTLEAIDFMLNQKDFLFAPAKAANAGGVATSQLEMQQNASMCQWSFEEVDAKLHKIMKNIFENSYECAKAYNHEGNLVVGSNIAGFKKVADAMIDHGYI

SEQ ID NO: 40073 - protein, 331 aa, Arabidopsis thaliana
MSVFESETSNFHVYNNHEIQTQPQMQTFLSEEEPVGRQNSILSLTLDEIQMKSGKSFGAMNMDEFLANLWTTVEENDNEGGGAHNDGEKPAVLPRQGSLSLPVPLCKKTVDEVWLEIQNGVQQHPPSSNSGQNSAENIRRQQTLGEITLEDFLVKAGVVQEPLKTTMRMSSSDFGYNPEFGVGLHCQNQNNYGDNRSVYSENRPFYSVLGESSSCMTGNGRSNQYLTGLDAFRIKKRIIDGPPEILMERRQRRMIKNRESAARSRARRQAYTVELELELNNLTEENTKLKEIVEENEKKRRQEIISRSKQVTKEKSGDKLRKIRRMASAGW

SEQ ID NO: 40074 - protein, 258 aa, Brassica napus
KPKLVSGSQEGYTGHVDGKLKEAKMNRPRGLAIDDSGNIYVADTNNMAIRKISDAGVSTIATGGRFSDDFDLIYVSSTCSLLVIDRGNQVIREIHLHDHDCSHHEPETDLHLGTALLVAAAFFGYMFALLVRRVRSLFSSFRHDSKRHHVAKPNMTMAPYQRYPRPVRQPLIPPQHEPEKEEGFLGSLGKLVVKTGSSVSEMISGSRNVTPQDFQYHHQQQPNQWPPVQETFAIPEEDGPPGLEPRSGTNQDKPYLRV

SEQ ID NO: 40075 - protein, 166 aa, Oryza sativa
MLLCFNKVASIALSPNVPGQIFMGLMVNPPKPGDISYLKFSAESKSILESLRRRARLMTDGFNSCRNVVCNFTEGAMYSFPQIRLPPKAIDAAKRAGKAADVFYCLKLLEATGISTVPGSGFGQKEGVFHLRTTILPAEEDMPAIMTSFKKFNDTFMDQYDGYSRM

SEQ ID NO: 40076 - protein, 210 aa, Propionibacterium acnes KPA171202
MNKTEMVSSENALPGGHTPVLAMPFFHRVTGDRLDRPFPSSETIYLAMGCFWGAEKLFWNTDGVLQTAVGYMGGLTPNPTYREVYTGCTGHAETVRVTYDPTQVSTEAILTIFLENHDPTQGMRQGNDVGTQYRSAIWCTTTEQFMTATTVKGSYQANLLNAGYGAITTAISMANGVEFYLAEAEHQQYLEDNPFGYCPVHATGVCLAGS

SEQ ID NO: 40077 - protein, 207 aa, Helianthus annuus x Helianthus debilis subsp. debilis
DVPAEAYKTLTSLPGVTGYTFDLVRGEQTLDLIKTSFPSGKYLFAGVVDGRNIWANDLAASLKVLESLEAIVGKDKLVVSTSSSLQHTVVDLVNETKLDDEIKSWLAFAAQKVVEVGALAKALAGQKDEAFFAANAAALASRKCSPRVTNEAVQKAAAALRGSDHRRATNVSARLDAQQKKLNLPILPTTTIGSFPQTIELRRVRRE

SEQ ID NO: 40078 - protein, 235 aa, Rhodella violacea
MIYDTNLALQLRQGTTKAHSMAENVSFVKSFLGGVVDKQAYRQLIANFYFVYSAIEDEMKRHQESQIIKPIYFEELNRKSSLEEDLQFYYGLEWQDKIFPSPATKVYINRIHEISNTSPELLIAHCYTRYLGDLSGGQILKKITQSAMNLSGGEGTAFYEFKDIKDEKNFKQNYRLALDSIHLSDSAIKSIVSEANIAFKLNMKIFQELNSNFIKIIAIFLFNFIKRIKLPGFKS

SEQ ID NO: 40079 - protein, 338 aa, Agaricus bisporus
MVKVGINGFGRIGRIVLRNALQFQDIEVVAVNDPFIDLEYMAYMFKYDSVHGRFKGTVEVKNGSFVVDGRPMKVFAERDPAAIPWGSVGADYVVESTGVFTTIDKASAHLKGGAKKVVISAPSADAPMYVCGVNLDKYNPKDTIISNASCTTNCLATLAKVIHDNFGIVEGLMTTVHATTATQKTVDGPSHKDWRGGRGVGNNIIPSSTGAAKAVGKVIPSLNGKLTGLSMRVPTQDVSVVDLVVRLEKPASYEQIKEVMRKAAEGEYKGIIAYTDEDVVSTDFISDNNSCVFDAKAGIQLSPNFVKLIAWYDNEWGYSRRVCNLLQYVAKEDAKAGI

SEQ ID NO: 40080 - protein, 106 aa, Sorghum bicolor
GLKRGRWTAEEDQILANYIAEHGEGSWRSLPKNAGLLRCGKSCRLRWINYLRADVKRGNISKEEEDIIIKLHATLGNRWSLIASHFPGRTDNEIKNYWNSHLSRQI

SEQ ID NO: 40081 - protein, 405 aa, Oryza sativa
MAEICCEVVAGSSSEGKGPECDTGSRAARRRRMEIRRLRVVAERGAEEETSGKRRRLDGGGGEASTDEDREVERARYGFTSVCGRRRDMEDSVSACPGFLPGHHFFGVFDGHGCSHVATSCGQRMHEIVVDEAGAAAGSAGLDEEARWRGVMERSFARMDAEAVASSRGSVAPAPTCRCEMQLPKCDHVGSTAVVAVLGPRHVVVANCGDSRAVLCRGGAAIPLSCDHKPDRPDELERIHAAGGIRHEDGARVFGMLAMSRAIGDSYLKAYVICDPEVRVMERKDGEDEFLILASDGLWDVVSNEVACNVVRACLRSSGRRERNRSSPTSNLSPRQSSSSGDEAPNDGAPSAAAAAAGSESDEESAAEEDKACAEAAVLLTKLALARQTSDNVSVVVVNLRRRKL

SEQ ID NO: 40082 - protein, 520 aa, Agaricus bisporus
MRFSNAFVLVAACISSVLADTKTFNFDLVNTRLAPDGFERDTVVINGEFPGTLVQVNKGDSVRIPVNNKLTSSTMRRSVSIHWHGFFQARTSGQDGPAFVNQCPQPPNTTFTYEFSVADESGTFWYHSHLSTQYCDGLRGAFVVYDPEDPLGHLYDVDDETTVITLAEWYHVLAPDINNEFFSSGIIPVQDSGLINGKGRFNGGPETPFAVVNVEQGKRYRFRVIAISCRPFFTFSVDNHNLTFMEADSVEHDPVEIQNVDIYAAQRVSVILNANQPVDNYWMRAPMTGGNPDRNPNLNISLTLAILRYKGAPEVEPTTVNVPGHKLLDQEMHPIAQEGPGKLGDGPPDKHITLNIAQPNAPFFDINGISYISPTVPVLLQILSGAKRPEDVLPSEQIFFVPKNSLIEVNIPGEGAHPFHLHGHNFDVVLASNDDTFNFVNPPRRDVYPINGGNTTFRFFTDNPGAWFLHCHIDWHLEAGLAIVFAEAPEDNVSGPQSQITPQDWLDLCPEYNAIEPEFQ

SEQ ID NO: 40083 - protein, 371 aa, Methanococcoides burtonii DSM 6242
MDKIYETVFNSVNDGILIITLDGRFLEVNQITCDDLGYQRHELLQMTVMDITPPEFREMARENVIGKMKQGGGIVETISICKDGSLVPIELNIHPIEYNGAPAILAVARNITERKKAEEAMLSAKLAAEDANKSKSEFLANMSHELRTPLNSIIGFSDVISNESHGSLNELQKKFISNVISNGKHLLNIINDILSASQIETGKMELHISEFHVSESINEIEVLMIPIASEKNIELKFNIDIGMPNIRADATKFEQIIYNLVNNAIKFTNEGEKVEIRGEISDDFVHISVKDSGIGISPDDQNKLFTPFFQVDSSNTREYGGTGLGLAIVKKYVEMHGGKVWVESEVGKGSTFGFRMPTYPESTSSKIHCKG

SEQ ID NO: 40084 - protein, 368 aa, Solanum tuberosum
NSSTYTQFVASRRMGICEPIHQMGMWDDFNASCPSTSATMILEVEKCLEDQIPNMIETEDTSHGTVGTSNRYEAETSKPIEKVLRRLAQNREAARKSRLRKKAYVQQLENSKLKLIQLEQELDRARKQGLYVGAGLDASQLSYSVTASSGTAVFDTEYGQWVEEQNRQTNDLRNALHHSQISEAELRIIVDGCLNHYFELFRVKATAAKADVLYIMSGMWKTSAERFFMWIGGFRPSELLKVLTPHLELLTEQQLREVCNLRQSCQQAEDALSQGMVKLHQILGEAVAAGRLGEGNYSLPQMGPAIEKLEALVRFVNQADHLRQETLQQMSRILNTHQAAQGLLALGEYFEQLRVLSSHWATRLHEPA

SEQ ID NO: 40085 - protein, 368 aa, Solanum tuberosum
STYTQFVASKRMGICDPIHQIGMWGDFKGSSFPDTLILEVENCLENEMPIMEKRLENEIEEPSQVTVGMSNRYEPETTKRIDKVRRRLAQNREAARKSRLRKKAYVQQLENSKLKLLQLEQELERNRQQGLYVGDGLDASQIGCSGTANSGIASFEMEYGHWVEEQDRQTDDLRNALHNSQMGEIELRILVESCLNHYFDLFRLKATAANADVLYLMSGTWKTSAERFFLWIGGFRPSELLKVLTPHVEPLSDQQIQEVSNLTQSCQQAEDALSQGMVKLHQILAEAVAAGTLGEGIILPQMTATIEKLEALVRFVNQADHLRQETLLQMSCILAAHQSAQGLLALGEYFKRLRALSSLWAGRLSEPA

SEQ ID NO: 40086 - protein, 576 aa, Bacteroides fragilis YCH46
MSAIRNITIGRTERLYKPVGYTMLANLVNIVPFCLSIEAIRIIFRAFNGGGQSLDTTRLWCIFGCMTGHIAVMVLAERAAYRANFRGAYEMSASGRISLAEHLRKLSLGFLGKRDPGDLSSMLITDFTMAETGISHYLPQLMGALVMPVLAFVSLLWIDWRMAVAMFVALPFAMGILWLSTSVQERLSGRQIKAKVNAGNRLEEYLQGIRVMKAYNLLGDRFVRLRDAFAELRRACIRLEALLGPFVLLAITLVRAGLTLMVLCGTYLLLGGQLSILTFVMFLVVGSRVFDPLTSALTNFTEFRHFSISGGRILSLMNEPEMKGTKEAPEDGNIIFENVSFGYQEKEVLHGISVILSRNSLTALVGPSGSGKSTVMKLCARFYDPTKGRILFGGVPVREIEPEKLMSRISMVFQDVYLFQDSIRNNIRFGKSDATDEEIVAAAKKACCHDFIMHLPHGYDTMVGEGGCTLSGGEKQRLSIARAMLKDAQIVLLDEATASLDPENEVEIQKAIDTLIKGRTVIVIAHRLKTIMGADHIVVLSDGKVEEQGTHSELMCRDGLYRKLWNIQESTLGWTL

SEQ ID NO: 40087 - protein, 457 aa, Aglaothamnion neglectum
MQIFVKTLTGKTITLEVESSDTIENVKTKIQDKEGIPPDQQRLIFAGKQLEDGRTLSDYNNQKESTLHLVLRLRGGMQIFVKTLTGKTITLEVESSDTIENVKTKIQDKEGIPPDQQRLIFAGKQLEDGRTLSDYNIQKESTLHLVLRLRGGMQIFVKTITGKTITLEVESSDTIENVKTKIQDKEGIPPDQQRLIFAGKQLEDGRTLSDYNIQKESTLHLVLRLRGGMQIFVKTLTGKTITLEVESSDTIENVKTKIQDKEGIPPDQQRLIFAGKQLEDGRTLSDYNLQKESTLHLVLRLRGGMQIFVKTLTGKTITLEVESSDTIENVKTKIQDKEGIPPDQQRLIFAGKQLEDGRTLSDYNIQKESTLHLVLRLRGGMQIFVKTLTGKTITLEVESSDTIENVKTKIQDKEGIPPDQQRLIFAGKQLEDGRTLSDYNIQKESTLHLVLRLRGGM

SEQ ID NO: 40088 - protein, 378 aa, Glycine max
RHESNAPPVGVHPLPLPPGAALTSPPAAATFSHAVAKSESFPMKSHWKKGKLIGRGTFGSVYVATNRETGALCAMKEVELFPDDPKSAECIKQLEQEIKVLSNLKHSNIVQYYGSEIVEDRFYIYLEYVHPGSINKYVREHCGAITESVIRNFTRHIPSGLAYLHSKKTIHRDIKGANLLVDSAGVVKLADFGMAKHLTGFEANLSLRGSPYWMAPELLQAVIQKDNSPDLAFAIDIWSLGCTIIEMFTGKPPWSEYEGAAALFKVMKETPPIPETLSSEGKDFLRCCFKRNPAERPTAAVLLEHRFLKNSQLLDVLSSTQLYNETSFMDKPHTPSRQSENSYDQLSTPCAKIAKGKAAERRGFLISSFDILPAYLDQ

SEQ ID NO: 40089 - protein, 219 aa, Medicago sativa
VHTERRRKPKKSLNVSGPVQSYHPNLKNFWYPVAFSADLKDDSMIPMECFEEPWVIFRGKDGKPGCVQNTCAHRACPLHLGSVNEGRIACPYHGWEYTTDGKCEKMPSTRMLNVKIKSIPCFEKEGMIWIWPGSDPPAPSLPSLLPPSGFIVHAEIVMELPVEHGLLLDNLLDLAHAPFTHTSTFAKGWSGPSFVNFLTPASGLQGILGIPIRMIWSFD

SEQ ID NO: 40090 - protein, 688 aa, Synechococcus sp. CC9605
MSSGSGAAIADWALPPNGKPPGEDQNLWDRITAWWAEFTLQTKLLAIATLVVSLMMTGITFFALNGIQRDAVMNDTRYARDLGLLLAGNVTELVAQGQDRELANVAEKFWRSSRSVRYIFFADPEGVVYLGIPISATPSSGDGELRLNRRLELPDELRRRPQNPLVRQHLTPQGAVTDVFVPLIRGGQYYGVLGLGVNPNETALASAALTREVTVAVFISIWVLVILGAVFNALTITRPVKELLRGVRSVASGNFGARVDLPVGGELGELLTGFNAMASQLEAYDEANIEELTAAQVKQQSLIATMADGAMLLDADGRIVLANPTARRLFRWEGRSLEGQELVGELPELLAIELHSPLDALLGGGSDSEDLRCSVGEPARTLRIVLQAVRDASGETLKGIAVTIQDLTREVELNAAQSRFISNVSHELRTPLFNIKSYVETLHDLGDQLSPDEQKEFLGVANDETDRLTRLVNDVLDLSRLESGRTLQFEPISMRPAMEQTLRTYRLNAEDREVELVLDVPEDLPDVLGNWDLLLQVLDNLMGNALKFSRPGGPLALRAYPWPDTCSVEGTAITGTDGPTCALTSPLPKLRVEIADTGCGISSTDQERIFDRFFRVENAVHTEVGTGLGLSIVRGILEKHGAQVQMASEPEVGTTFWFDLPLAKADKDELQLQAERRSRNAIAEAVEL

SEQ ID NO: 40091 - protein, 290 aa, Triticum aestivum
  misc_feature (121)..(121): Xaa can be any naturally occurring amino acid
  misc_feature (150)..(150): Xaa can be any naturally occurring amino acid
  unsure (1)..(290): unsure at all Xaa locations
MARMAVSVLAILLASCALAAASFDKEFDVTWGDGRGKILNNGQLLTLGLDKVSGSGFQSKHEYLFGKIDMQLKLVPGNSAGTVTAYYLSSQGPTHDEIDFEFLGNVTGEPYTLHTNVFTQXGQGQREQQFRLWFDPTNDFHTYSILWNPXHIIFMVDDMPIRDFRNLEGKGMAFPKNQPMRLYSSLWNADDWATQGGRVKTDWSHAPFSASYRGFKADACVVTAAGRPHCGASVGTDVAPGTGAAGEWYNQELDLTRQQRMRWVQRNYMIYNYCTDPKRVAQGVPAECSM

SEQ ID NO: 40092 - protein, 281 aa, Flaveria trinervia
MKETLNNDYHITEEIGRGRFGTVYRCYSTVSGDSFACKTIDKRLLNDHTDRECLQKEPKILHILGGNPNIVQIYRLYEDDNYVHMIIDLCDSPDLFDRISNRNGVFSETEAATVFAPLMSAISYCHRLGIAHRDLKPDNVLFDSRGGLKLADFGSAEWFAMNDRRTMSGIVGTPYYVAPEVLSGMEYNEKVDVWSAGVILYIMLAGVPPFHGDSPADTFEAVLRGNLRFPTRLFRSVSPEAKDLLRKMLCKDVSRRFSADQVLRHPWVVNGGKTRSMADLT

SEQ ID NO: 40093 - protein, 636 aa, Oryza sativa
MDGCDCIEPLWPTDELLIKYQYISDFFIALAYFSIPLELIYFVKKSSFFPYRWVLIQFGAFIVLCGATHLINLWTFTTHTKTVAMVMTVAKVSTAVVSCATALMLVHIIPDLLSVKTRELFLKNKAEQLDREMGLIRTQEETGRHVRMLTHEIRSTLDRHTILKTTLVELGGTLGLEECALWMPSRSGSSLQLSHTLRHQITVGSTVSINLPVVNQVFSSNRAIIIPHTSPLARIRPLAGRYVPPEVAAVRVPLLHLSNFQINDWPELSAKSYAIMVLMLPSDSARKWHVHELELVEVVADQVAVALSHAAILEESMRARDLLMEQNVALDLARREAEMAIRARNDFLAVMNHEMRTPMNAIIALSSLLLETELTPEQRLMVETVLKSSNLLATLINDVLDLSKLEDGSLELEIKAFNLHAVFKEVMSFIKPIAAIKRLSVSVMLAPDLPLCAIGDEKRLMQTILNISGNAVKFTKEGHITLVASVVKADSLREFRTPDFHPTASDDNFYLKVQIKDTGCGISPQDLPQVFTKFPQSQPGGNRGYSGSGLGLAICKRFVTLMGGHIWLDSEGTGRGCTVTFVIQLGICDNTNAYQQKLIPLVWPSSGDADFVGPVPNAPNEEKGQASLKSRYQRSI

SEQ ID NO: 40094 - protein, 414 aa, Pseudomonas aeruginosa PAO1
MSRRRVVITGMGMLSPLGLDVPSSWEGILAGRSGIAPIEHMDLSAYSTRFGGSVKGFNVEEYLSAKEARKLDLFIQYGLAASFQAVRDSGLEVTDANRERIGVSMGSGIGGLTNIENNCRSLFEQGPRRISPFFVPGSIINMVSGFLSIHLGLQGPNYALTTACTTGTHSIGMAARNIAYGEADVMVAGGSEMAACGLGLGGFGAARALSTRNDEPTRASRPWDRDRDGFVLSDGSGALVLEELEHARARGARIYAELVGFGMSGDAFHMTAPPEDGAGAARCMKNALRDAGLDPRQVDYINAHGTSTPAGDIAEIAAVKSVFGEHAHALSMSSTKSMTGHLLGAAGAVEAIFSVLALRDQVAPPTINLDNPDEGCDLDLVAHEAKPRKIDVALSNSFGFGGTNGTLVFRRFAD

SEQ ID NO: 40095 - protein, 169 aa, Dehalococcoides ethenogenes 195
MRLTFKHLFRPWITVQYPEEKLTMSKRIRGTQVIWVKETCIACLACARACPVKAINMEVSRGEDRKLKVDHMSIDFGLCVFCGLCVESCPTKTSIYMGYGYETTTYRCTNVEKAEGQSRSECRCRELILTGDELAPSATRVLSGYDRPDAAEKLAEQTLLINKKGYFER

SEQ ID NO: 40096 - protein, 306 aa, Ipomoea batatas
GDQLYRMDYMDLVQNHIERNSDITLSCATVGDSRASDFGLVKIDRRGRVVQFCEKPKGTDLKAMQVDTTLLGLPPQDARLNPYIASMGVYVFKTDVLFRLLRWRYPTSNDFGSEILPAAVMEHNVQAYIFRDYWEDIGTIKSFYDANLALTEEFPKFEFYDPKTPFYTSPRFLPPTKIDNCKIKDAIISHGCFLRECTVEHSIIGERSRLDCGVELKDTLMMGADNYETESEIASLLADGKVPIGVGENTKIRNAIIDKNVRIGKDVVITNKDGVQESDRPDEGFYIRSGITIIMEKATIRDGTVI

SEQ ID NO: 40097 - protein, 417 aa, Zea mays
  misc_feature (103)..(103): Xaa can be any naturally occurring amino acid
  unsure (1)..(417): unsure at all Xaa locations
MAMPYASLSPAGAADHRSSTATASLVPFCRSTPLSAGGGLGEEDAQASARWPAARPVVPFTPAQYQELEQQALIYKYLVAGVPVPPDLVVPIRRGLDSLATRXYGQPTLGYGPYLGRKLDPEPGRCRRTDGKKWRCSKEAAPDSKYCERHMHRGRNRSRKPVETQLAPQSQPPAAAAVSAAPPLAAVAAATSGSGFQNHSLYPAIAGSTGGGGVGGSGNISSPFSSSMGGSSQLHMDSAASYSYAALGGGTAKDLRYNVYGIRSLADEHNQLIAEAIDSSIESQWRLPSSSFPLSSYPQLGALGDLGGQNSTVSSLPKMERQQPPSSFLGNDTGAGMAMGSASAKQEGQTLRHFFDEWPKARDSWPGLSDETASLASFPPATQLSMSIPMASSDFSVASSQSPNGESRTFLLATDRR

SEQ ID NO: 40098 - protein, 1341 aa, GIBBERELLA ZEAE PH-1
MTESSPRAVRFQGSEDDGRPDKVRGHRLETPIESNGDPHATERHDELGNLIGYGATGHTGSLTSLAPGTVINGVSKAQRGPNTGDDGTAYTPNGSWPQRPLGPARTPSNTYNPATSRKPAHPPATPSFTESIRSSSKTRPRNESRFRAQERAYVQKLRQDYSGGYFTSYSNLNGNDSDSEGETPSSEGPYDDRFDQETIMFYGNDTLQPTDEDLKDPENRERLEWHGMLEAVLTGDVVRQEKKRLIGSADQQAGKSAHKTELWLGIRSKVCGRHIPVQRRMLEESRSTLDRTLDEIINFQIKGESEAGKPPYEQVKDMVAKIQMCENLYPSWAALATEHKAADSATFKESHDAIISWYNTNEMINTELNILKKWVGNEELDFTRTKQRSPAVNGINNDETSFLDRLMKEDGLQSLYNDDNGNLEKGMLAPISTVISKAKDTLIRNSEAFRKRHLPPYLEELLTLISFPSRLIEEITRLRLAYARRVKESAQQNPLMQDQMISQFQLLLKFAIRIKIECTSIANPEPGWDLPPCIDESFDQVVLEALKYYFKMLNWKLSGNKNTFKEAELLFQEWDFANEIGSHLQRGHIEVAEQFSSLTFKALHRLSQTFEKELQAKPKETATEMSKRYKACLDSVRVRQRMLQRFTRMLNDNYEHASDYSISFPPETMQKFYDQLVASGHFQVDTRLLEQDNIYVIASPELRERLEDIQAMMAITSKDQFPDELGEQYLLILRPEDPLNWFGETIEVPLRDLNIDLKRGHIRLCASSPQTLHNARRAFIENVDMHVDLVQEARSNIQKVNSRLTEIRRVAYKLSNNFMDSVEIIRKQARGKDCQELIQTCFVFATEFGQRSLLYMDSNRRQMNNLKLTKLALDWVSFICDDCVASDRKTFRWAVLALELAMGMTRGRHILALGEGEYAKLRSKVAGCMSLLISHFDVMGARSNLAAQAEKERIEALVGQFRKLDKNRMMNDEEASRCVTEQRMSELERVDEYRCEKIAERQGVGRVLEGNNEVDRSLAYLSSSATNVTMRWQQGQFVGGGTFGNVYAAMNLDTGHLMAVKEIRLQDPKLIPQVAEQIREEMGVLEVLDHPNVVSYYGIEVHRDRVYIFMEFCSGGSLANLLEHGRIEDEQVIMVYALQLLEGLVYLHESGIAHRDIKPENILLDHNGIIKYVDFGAAKWIARQGRTLAGDVQPSLPNRSMTGTPMYMSPEVIKGENPGKPGAVDIWSLGCVILEMATGRRPWAQLDNEWAIMYNIAQGNPPQLPPSDQLSPQGLDFLKRCFTRDPRNRSSAVELLQHDWITSIRSQVVEPATPSDTSSSAQSTPTVGSISSKLGGSDGFY

SEQ ID NO: 40099 - protein, 116 aa, Haynaldia villosa
DIEETLKRLVFDMKKSPAEVFDALKNQTVDLVLTAHPTQSVRRSLLQKHSRIRNCLVQLYSKDITPDDKQELDEALQREIQAAFRTDEIRRTQPTPQDEMRAGMSYFHETIWKGVP

SEQ ID NO: 40100 - protein, 269 aa, Geobacillus stearothermophilus
MLLLSVNPPLFIPFIVAGDPSPEVTVDLALALEEAGADLLELGVPYSDPLADGPTIQRAAARALAGNMTLPKAIHLVAEMRKKGVTIPIILFTYYNPVLQLGEESFFALARENGANGVLIPDLPFEESGPLRELGERFDLPLISLVAPTSKQRIERIASVAQGFLYCVSSLGVTGMRETLPESLGDFVSEVKRHSRVPVAVGFGISTPEQVAMLKEVCDGVVIGSALVQKVEQLGERLLAPEEKEAAIAEFAAYARSLAAPLHAPCSLR

SEQ ID NO: 40101 - protein, 124 aa, Elymus canadensis
DIEETLKRLVFDMKKSPAEVFDALKNQTVDLVLTAHPTQSVRRSLLQKHSRIRNCLVQLCSKDITPDDKQELDEALQREIQAAFRTDEIRRTQPTPQDEMRAGMSYFHETIWKGVPKFLRRVDT

SEQ ID NO: 40102 - protein, 327 aa, Glycine max
MTGSADPLVISFGEMLIDFVPDTSGVSLAESCAFIKAPGGAPANVACAISKLGGNAAFVGKMGDDEFGRMLVDILRKNGVNTDGVCFDTEARTALAFVTLRKDGEREFMFYRNPSADMLLKESELNMGLIKQAKVFHYGSISLISEPCRSAHLAAMKVAREGGALLSYDPNVRLPLWPSEEAARSGIKSIWFDADFIKVSDDEVHFLTQGDPEKEDVVMTLWHDKLKMLLVTDGEKGCRYFTKNFRGRVTGFSAKVVDTTGAGDSFVGALLTAVARDPNIFHNEPKLREALTFANACGAMCTTQKGAIPALPTAAEAEKFISNSKAK

SEQ ID NO: 40103 - protein, 568 aa, Porphyromonas gingivalis W83
MIRYFQHRFALSRKGAQDLAKGIAWTTVLNVGFMLPAIFTFLFLEDYLQGSATHGIWYYIAMGAAFMAVLFVIALFQYTSLYTKIYTESANRRIALAEKLRKLPLAFFGEKNLSDLTSTMMEDSTVMETVFSHSIPQLFASLVSLFLIGIGLFCYNWQLSLALFWVVPVAALAIVFSKKMLNKSFHSNYHVKREVTEHIQEGIEEIQEIKSYNGEEEFAERFDAKLHAYEKSLIRCELVVGAVLNASHIILKLGLASVIIMGAYLLSEGTIDLFTYLVFLLIGSSIYNPISEVFSNLLLLQYLDVRIDRVREMDAMPIQEGKTDYSVRNFDIIFQNVNFSYEKGKQVLRNVSFTAKQGEVTALVGPSGGGKSTSAKLAARFWDIDGGKIFLGGEDISQIEPETLLRHYAIVFQDVLLFNASVADNIRIGKPDATDEELKRVARLARCDEFVDRLPNGYDTLIGENGENLSGGERQRISIARALLKDAPIVLLDEATASLDVENETLIQAGISELIKNKTVLIIAHRMRTVANAHKIVVLKEGTVAECGSPAELMAMNGVFARMVAAQK

SEQ ID NO: 40104 - protein, 578 aa, Deinococcus radiodurans R1
MPKSPPVSRYYDVKRDEQGQRYIEVKVTGLALLQNPLLNKTTGFTPEERRELGLEGLIPPHISSFEEQKHRTYLRYLEAPTDLARHEYLRALQDRNEVLYYAILEDHLEEMLPIIYTPTVGEAVKLYSNNYRYPRGFTVSTNDIERVEEMLDNVTVNDVRMIVATDSSAILGIGDQGFGGMAISIGKLSLYTAAGGVGPDKTLPVELDVGTNRQDLIDDPLYLGVHHRRWQGQQYDEFVDAFVEAVSARYPKAIIQWEDFSRGTAFRVLERYRKVVPSFNDDIQGTGAMALAGLLRASRMKGEFLTEQVFVVVGAGAAGIGVASAIRQGLEAEGLAPEEAGRRVYVVDRYGLLMEGQPDLEPQQMPFVRRRGDLEGWTFGGEYPTLHEVLVHARATALLGFTGVPGLFRQEDIEAMLAHTPRPIVFPLSNPSSHVEARPSDIVAWTRGGAIVATGSPFPDVPYDNERIPVGQGNNAFIFPGLGFGAVVSRAREITDNMVMAAALTLAEYTTQHHPHLVYPPISELRELSIHVAVRVAEQAIQDGVCAERRVRNMDREQLAALIRERAWLPRPLPLRRE

SEQ ID NO: 40105 - protein, 124 aa, Elymus canadensis
DIEETLKRLVFDMKKSPAEVFDALKNQTVDLVLTAHPTQSVRRSLLQKHSRIRNCLVQLYSKDITPDDKQELDEALHREIQAAFRTDEIRRTQPTPQDEMRAGMSYFHETIWKGVPKFLRRVDT

SEQ ID NO: 40106 - protein, 185 aa, Arabidopsis thaliana; identical to SEQ ID NO: 1227

SEQ ID NO: 40107 - protein, 143 aa, Triticum aestivum
MSIVRRSNVFDPFTDLWADPFDTFRSIIPAISGNNSETAAFANARMDWKETPEAHVFKADLPGVKKEEVKVEVEDGNVLVVSGERTKEKEDKNDKWHRVERSSGKFVRRFRLPEDAKVEEVKAGLENGVLTVTVPKAQVKNPR

SEQ ID NO: 40108 - protein, 277 aa, Haloferax volcanii
MSLEDAFSDGPAFVPYLAAGDPDYESSLEYVEALERGGADVIELGLPFSEPIAEGPTIQNAVVRSLEGGMTPTRFFEFVEDLDVSVPLVCMRYYNLIYRYGDEPGPRPFVEKAAEVGIEGFVVPDLPAEEAGPLREACDEFGLDLVFIVAPTTRGERLDRIMEQVSGYVYVQARLGTTGAQSSVSDQTDSSLERLTDYDVPKAVGFGISDGDHAERIVASGADGIIVGSALVDIVAEGHENGDDAETVADRLETLARELEDGAVAGASQRPPHPERT

SEQ ID NO: 40109 - protein, 174 aa, Rhizobium etli
ARKPSIVPIVEPECLMDGKPGDHNIDRCAEVTESTLQIVFEELAEARVSLEGMILKPNMVIDGKNARKASVAEVAERTVQVLKRTVPSAVPGIAFLSGGQTTEEATAHLSAINGFDLPWLVTFSYGRALQDSALKAWNGKPENVAAGQREFTHRAEMNSLAAKGSWKKDLEQAA

SEQ ID NO: 40110 - protein, 416 aa, Nocardia farcinica IFM 10152
MTTPSTLNGNFPNVVVTSMAATTSIAGDVDATWKGLLNGESGIDVLEDSFIEEYDLPVRIGGHLKVNPDTLLSRVEIRRMAYVERLATVLGREVWKNAGSPEVDPDRLAVAIGTGLGGGDALIDSVDKLKNGGYRKISPLAVQMVMPNGPSACVGLELKARAGVVTPVSACSSGSEAIANAWRMIVMGDADVVVTGGVEGYIDSVPIAAFSMMRAMSTRNDDPKGASRPFDKDRDGFVFGEAGALMVLETEEHAKARGATIHARLLGAGITSDGYHLVAPDPEGTGAARAMTRAMQSAGLTKQDITHINAHATATPIGDTAEANAINKAVGNHPSVYAPKSALGHSIGAVGALESVLTVLSIRDGIVPPTLNLDNQDPEIDLDVVKGEARRQEIEYAINNSFGFGGHNVALAFGRA

SEQ ID NO: 40111 - protein, 273 aa, Aspergillus awamori
HASAEFEGAIIALFHLLLTWSDKQRALREAFYRQNLPNIMNLLATLLVFAAVIYLQGFRVEIPVKSSRQRGMRGSYPVRLFYTSNMPIMLQSALCSNIFLISQMLYSRFSDNLLVKLLGVWEPREGSAQLHAASGIAYYMSPPLNFKEALLDPIHTAVYITFMLVACALFSKTWIEVSGSAPRDVAKQLKDQGLVMAGHREQSMYKELKRVIPTAAAFGGACIGALSVASDLLGALGSGTGILLAVTIIYGYFEIAAREGDIGSGLKGLVPGN

SEQ ID NO: 40112 - protein, 668 aa, Dechloromonas aromatica RCB
MSVSNLPKFSPLTGAIRALAMDAVQQANSGHPGAPMGMAEIAEVLWRRHLRHNPANPHWADRDRFVLSNGHGSMLLYALLHLTGYDLSIDDLKNFRQLHAKTPGHPEYGYTPGIETTTGPLGQGITNAVGFALAEKVLAAEFNKPGHEIVNHHTYVFLGDGCLMEGVSHEACSLAGTLGLGKLIAFWDDNGISIDGHVEGWFTDDTPKRFEAYGWHVVAHVDGHDSDAIERALLAAKAVTDKPSLICCKTTIGAGSPNKQGSHDCHGAPLGKDEIAAARAYIGWNHPAFEIPADIYAAWNRKPAGAVFEENWSTRFAAYRTAFPAEAAEFERRVIKNELPTNWAATKAAYIATCRDKAENIATRKASQNAIAALVPAVPEIFGGSADLAGSNLTFVKGSKGVTRTEGGNYCYYGVREFGMTAIANGIALHGGLVPYTATFLVFSDYARNAIRMAALMKQRQIMVYTHDSIGLGEDGPTHQPVEHIPSMRIIPNLDVWRPADATETAIAWTAAVERKDGPSILALSRQNLPTVTQQAADADIAKGGYVLAEADGEAQITFIATGSEIKLALDAQAALAGEGIKTRVVSMPCSNVFDRQSAEYKASVLGACKKRIAIEAAHPDFWRKYVGLHGAVIGIDRFGESAPAGQLFDLFGFTVANVVKTAKALLS

SEQ ID NO: 40113 - protein, 261 aa, Parachlamydia sp. UWE25
MHFKLIDQIRHSITLFIVFFACGVISLSASTDLYHKVRVVIFDCDGVLVDTEYLKFLAWQEALASYNVDFSIEEYMPLVGHSSKNILAMIERSKRLKLPKQIIDLKNDKYKALQKQGVQAIQPMVDFAKALSENKERLALKLGLASSAPKEEILINLQQIGLDNAFDLVISGSDDLEGYIDEEGKNKPKPYIYIEAAKRLNILPELCLVFEDTAAGVDAAAGSGMTVIAVPKQFTINQVFSKASAVLPSYEELPSIEIFQQ

SEQ ID NO: 40114 - protein, 341 aa, Coxiella burnetii RSA 493
MQDWNQYKELLYKLLRIRMIEEEIVLQYPKGKMRCPTHLSIGQEAIPIMVCENLHNTDLMVSTHRAHAHYLAKGGNLKALIAELHGKVTGATAGRGGSMNLSDLSVGFVASTAIVANTVPIGVGLAFSQKLKKSNVITTIFLGDAAVEEGVVYESLNFAVLKRLPVLFVCENNLYSVNTPLHLRQPANRAIHEMAKGIGAKTQNIDGNDIPTSFHSVCEVMKDLRANGGVWFLEFQTYRFKVHCGPEEETFTDRSKTEFDHWLARDPLSLLQSQLLTAKTVSPEEIDKWRHEIQNEIDEAFTFAESSPYPPPEDRFRYRYADSRNEWLRHQLDKQKDEVLT

SEQ ID NO: 40115 - protein, 573 aa, Bdellovibrio bacteriovorus HD100
MMSPEIKKLLGELKQYKSTLYIVAATGILNALATTQLAYMIKGLFDGLSANQQQAMATLVPMALGLALVQATSRYFHIYLMNYTAERVVQGLRQKLQQKFMRLNLSFHNNYAAGSGGLISRILNDIRIIQDGLRVVADIFLYPLMLVGLLINLIRIDWKLTLATFLIAPVIAVILKNIARSMRKYIPQERDVMEYMTSTIKESLDGVRIIQSFNLEKDMGERLIKESDKYLGIRKTIYKRQEASGPVTEFLATAIVLCVFMYVSYEIAAGRSTPGTFVGFVASLLMINQPIKRVQEAYVRIQEVTISLRRIFEIIENESEVPQVANPVPFPKDWKKITYKNVSFSYGKEMILKNLNLEINRGEVVALVGASGSGKSTIVNLLERFFDPTSGEILIDGVNIHDIGLKDLRRNVALVTQDVFLFSDTIEKNIWAGDYNRTREDIPAMAKLANAHDFIMKTPHGYQSRVGDRGNLLSGGEKQRISIARAMFKDAPVLILDEATSALDTASEIEVQKGIDHLMEGRTALVIAHRLSTIQKADKIVVMKSGEIAEIGTHKDLMSKEGEYFRFHSLQHT

SEQ ID NO: 40116 - protein, 142 aa, Methanococcoides burtonii DSM 6242
MKQKINRSEEEWKKLLTPEQYAILREKKTEIPFTGELLRNDRPGVYSCGACGQEIFSSKNKFDSSSGWPSFYEVISNDRVELVIDDSYFMKRIEIQCSNCGSHLGHVFDDGPQSTGKRYCINSASLGFTEGSEKEKEKKNDK

SEQ ID NO: 40117 - protein, 153 aa, Methanococcoides burtonii DSM 6242
MERATFAAGCFWGVEAAFSKVEGVISTKVGYTGGTLKDPTYKDVSTGSTGHAESIDIIFDESVITYGELLEVLWNTHDPTTKDSQGPDHGSQYRSAIFYHDDAQREAALRSREQLERSGKYDSTIKTEIVKASEFSPAEDYHQKYFQKLQFKR

SEQ ID NO: 40118 - protein, 500 aa, Mycobacterium bovis AF2122/97
MAPSGGQEAQICDSETFGDSDFVVVANRLPVDLERLPDGSTTWKRSPGGLVTALEPVLRRRRGAWVGWPGVNDDGAEPDLHVLDGPIIQDELELHPVRLSTTDIAQYYEGFSNATLWPLYHDVIVKPLYHREWWDRYVDVNQRFAEAASRAAAHGATVWVQDYQLQLVPKMLRMLRPDLTIGFFLHIPFPPVELFMQMPWRTEIIQGLLGADLVGFHLPGGAQNFLILSRRLVGTDTSRGTVGVRSRFGAAVLGSRTIRVGAFPISVDSGALDHAARDRNIRRRAREIRTELGNPRKILLGVDRLDYTKGIDVRLKAFSELLAEGRVKRDDTVLVQLATPSRERVESYQTLRNDIERQVGHINGEYGEVGHPVVHYLHRPAPRDELIAFFVASDVMLVTPLRDGMNLVAKEYVACRSDLGGALVLSEFTGAAAELRHAYLVNPHDLEGVKDGIEEALNQTEEAGRRRMRSLRRQVLAHDVDRWAQSFLDALAGAHPRGQG

SEQ ID NO: 40119 - protein, 553 aa, Coxiella burnetii RSA 493
MRSLILNPWQLCDLEMLFNGGFAPLNGFLSKADYYCVIETMRLVDGSLWPIPITLDVKSEFATKLIIGEPLALRDDQGSLLGILEVEEIWEPDKYKEAHCVFGTLDEAHPGVKQLLRHKGSFYLNGKLTKINAPKHYDFIQYRLSPQQLKDKLKGLHKNLVGFQTRNPMHRAHFELTRCAAEICNANLLIQPVVGITKLGDMDYVTRARCYEIMLSYYPPGTTFLNFLPLAMRMGGPREALWHMLIRKNYGCTHFIIGRDHASPGVDSRGKPFYEPYAAQALAQKYQTEAGIQIVPFHEMVYSQAKQKYIPVNQIQQNETTLKISGTEIRRRLREGLEIPEWFSYPEVIAELRKSFPPKNKQGITLFLTGLSGAGKSTISKALIAKLQEMDERKITLLDGDVVRKNLSHGLGFSREDRDANVARIAFVASEVTKHGGMAICAQIAPYADTRKRAREIVESQGIFIEVYISAPLEICEQRDPKGLYGKARMGIIKIFTGISDPYEPPASPEIIIETNQITIEESVAKIIFYLFEKGYLTPKVDRVRNSVLSVNA

SEQ ID NO: 40120 - protein, 203 aa, Chlorobium tepidum TLS
MLQSGEWAYTEKLKEHFESPKNVLQGNDTSAFDGVGMEGNLQCGDQMMVAIKVDKESEKITDCQWKTYGCASAIASTSILSEMVKGMTLDQAFNISPKEVAKELGGLPENKIHCSVLGDKALRAAINDYFIRNGMSDRVQKVQARTVCQCMNVTDHDIEEAVLEGARTFYELQEHTKISTVCGQCREDAENELQKYIHLHFGS

SEQ ID NO: 40121 - protein, 321 aa, Bartonella grahamii
TYIDGDKGILLYRGYPIDQLAEKGDFLESCYLLLYGELPTQQEKNEFDRCIMQHTMVHEQFARFFHGFRRDSHPMAVMVACLGAMSAFYHDSIDITDPHQRMIASVRLISKVPTLAAMAYKYSIGQAFVYPRNDLSYAANFLRMCFAVPCEEYKTNPVLARAMDQIFILHADHEQNASTSTVRLAGSSGANPFACIAAGVACLWGPAHGGANEACLKMLQEIGSIERIPEFIARAKDKNDPFRLMGFGHRVYKNYDPRAKIMQKTCHEVLKELNIQDDPLLDIAIELEKIALSDEYFIEKKLYPNVDFYSGITLKALGFPT

SEQ ID NO: 40122 - protein, 586 aa, Alkaliphilus metalliredigenes QYMF
MKKTKIVCTIGPASESKEVFTELVKQGLNVARLNFSHGNHEEHGERIKMIKEVRRELEQSVAILLDTKGPEIRTGKFKDPEVLLAEGQVFTVTTRDVVGDQNMCSVSYEGLARDVKPGDEILIDDGLVGLRVQKIIQGTDVECIVENAGIVKNHKGVNVPGVQINLPAITEKDEGDIVFGIQMDIDFIAASFVRKASDVLAIKRILEENNADHIQIISKIENQEGMDNLDEIIEVSDGIMVARGDLGVEIPTEDVPLAQKEMILKCNKVGKPVITATQMLDSMMRNPRPTRAEVTDVANAIFDGTDAIMLSGETAAGKYPIESVKTMARIALRTEGAIDYRSLLNKKAQERELTITDAISHATCSTASDLQASAILIATSSGHTARMVSRFKPQAPIIAATTSERVMRKLSLTWGAYCLLVDEFQSTDDIIDATVEHALEKEYIKRGDLIVMTAGVPVGIAGTTNLLKVHIVGDVLVNGTGVGKIPATGKVVVIHQHDELGQETFNEGDILVVSCTDKDLIPLMEKAGAMIVEEGGITSHAAIVGLNLHKPTVVGAIGATEKLKTGDIVTVDTIRGLIYSGKTRVL

SEQ ID NO: 40123 - protein, 495 aa, Saccharomyces cerevisiae
MTTDNAKAQLTSSSGGNIIVVSNRLPVTITKNSSTGQYEYAMSSGGLVTALEGLKKTYTFKWFGWPGLEIPDDEKDQVRKDLLEKFNAVPIFLSDEIADLHYNGFSNSILWPLFHYHPGEINFDENAWFGYNEANQTFTNEIAKTMNHNDLIWVHDYHLMLVPEMLRVKIHEKQLQNVKVGWFLHTPFPSSEIYRILPVRQEILKGVLSCDLVGFHTYDYARHFLSSVQRVLNVNTLPNGVEYQGRFVNVGAFPIGIDVDKFTDGLKKESVQKRIQQLKETFKGCKIIVGVDRLDYIKGVPQKLHAMEVFLNEHPEWRGKVVLVQVAVPSRGDVEEYQYLRSVVNELVGRINGQFGTVEFVPIHFMHKSIPFEELISLYAVSDVCLVSSTRDGMNLVSYEYIACQEEKKGSLILSEFTGAAQSLNGAIIVNPWNTDDLSDAINEALTLPDVKKEVNWEKLYKYISKYTSAFWGENFVHELYSTSSSSTSSSATKN

SEQ ID NO: 40124 - protein, 307 aa, Bartonella sp. 16/40
YIDGDKGILLYRGYPIDQLAKKGDFLESCYLLLYGELPTKQEKNDFDRCIMQHTMVHEQFARFFHGFRRDSHPMAVMVACLGAMSAFYHDSIDITDPQQRMIASVRLISKVPTLAAMAYKYSIGQAFVYPHNDLSYTENFLRMCFCVPCEEYKINPVLARAMDRIFILHADHEQNASTSTVRLAGSSGANPFACIAAGVACLWGPAHGGANEACLKMLQEIGSVEQIPKFIARAKDKNDPFRLMGFGHRVYKNYDPRAKIMQQTCHEVLKELNIQDDPLLDIAIELEKIALNDEYFVEKKLYPNVDF

SEQ ID NO: 40125 - protein, 316 aa, Arabidopsis thaliana
MYSAIRSSLPLDGSLGDYSDGTNLPIDACLVLTTDPKPRLRWTSELHERFVDAVTQLGGPDKATPKTIMRTMGVKGLTLYHLKSHLQKFRLGRQSCKESIDNSKDVSCVAESQDTGSSSTSSLRLAAQEQNESYQVTEALRAQMEVQRRLHEQLEVQRRLQLRIEAQGKYLQSILEKACKAIEEQAVAFAGLEAAREELSELAIKASITNGCQGTTSTFDTTKMMIPSLSDLADGCQGTTSTFDTTKMMIPSLSELAVAIEHKNNCSAESSLTSSTVGSPVSAALMKKRQRGVFGNGDSVVVGHDAGWVMPSSSIG

SEQ ID NO: 40126 - protein, 235 aa, Prochlorococcus marinus str. NATL2A
MALAFARQLREGTKKSHTMAENTGFISCFLKGVVDKSSYRNLLADLYFVYSAMEEEIEKLCENSHPIISPIGFKELFRKKKLEQDLSFYFGSNWSELVKPSKPAVEYEARIRQIAKDNPELLIGHHYSRYIGDLSGGQLLKTITKKAMNLPGDDGLSFYIFEEISDAKEFKIKYRNTLDNLPIDQKIADSIIEEANRSFKYNMDIFNELEGNLIAAIGKVLFRFFANKKRKGSTE

SEQ ID NO: 40127 - protein, 266 aa, Lactobacillus casei
MLMSKLADVFKNHKVFIPFIVADDPDFETTVKNVVALAKGGADIVELGIPFSDPVADGPVIQAADLRAFAANVRTKTVFDIVEAARKETAVPIVFLTYLNIVFKYGYDAFLKRCADLNVAGLVIPDLPYESRDEIVPIAEKYGIDIIPLITPTSGHRIEKIAKSASGFIYVVSSMGITGERDEFFAGLKALVAEIKQYTNVPTAIGFGIHTPEQAQTMAGIADGVIIGSAIVDLVAKEKQQAPAAIEKFTKQIRVAVDAKKQISVK

SEQ ID NO: 40128 - protein, 265 aa, Methanothermobacter marburgensis str. Marburg
MNYAEMFSRVEGCAFVPFVVAGDPDMETSVEIIRTLVDAGADALEIGFPFSDPIADGTSVQEADLRALNSGMTTDDCFRLIERIREFTSVPVGLLVYYNLIYRMGADEFYRRAAEAGVTGILAADLPPEEAGDALRAAERYGIDQIFIVAPTTDNQRLKMISEVSSGFHYLVSVMGVTGARSRVEESTLELIERVKGAGSLPVMVGFGVSQPEHVRMLADAGADGVIVGSAIIDLISKNLDDRERMLQEIYEMVRKMKTAAGGSR

SEQ ID NO: 40129 - protein, 119 aa, Elymus hystrix
LKRLVFDMKKSPAEVFDALKNQTVDLVLTAHPTQSVRRSLLQKHSRIRNCLVQLYSKDITPDDKQELDEALQREIQAAFRTDEIRRTQPTPQDEMRAGMSYFHETIWKGVPKFLRRVDT

SEQ ID NO: 40130 - protein, 228 aa, Enterococcus faecalis V583
MPKLVFSRHGLSEWNALNQFTGWADVDLAPEGVEEAKEGGRKIKEAGIEFDVAYTSVLTRAIKTCNYLLEYSDQLWVPQIKSWRLNERHYGKLQGLNKKETAEKYGDEQVHIWRRSYDTLPPLMEATDEGSAANDRRYAMLDQRDIPGGENLKVTLERALPFWQDEIAPALKDNKTVLVAAHGNSLRALAKHIEGISDEDIMDLEIPTGKPLVYELNDDLTVKEKYYL

SEQ ID NO: 40131 - protein, 130 aa, Echinochloa crus-galli
NEWPFFRVTLDLVEMVFAKGDPGIVGFYNDLLVADELKPFGEQLRKNYIDTVQLLLQVAGHKEILEGDPYLKQRLRLRDPYITTLNVFQAYTLKRIRDPNFKVTLNPPLSKEFNDVNKPAGLVKLNPASE

SEQ ID NO: 40132 - protein, 629 aa, ASPERGILLUS NIDULANS FGSC A4
MALDDISAVPKGALDTDPAVERPPPLLDADRSDSERLQPGVKRAEMLRKGWTRQGLIIAFTGLFLATLSINFGDYSTQVYVPYATSAFKQHSAMSAARVVGNITRIAAYPIIAKLGDASLRSPLRRTGADSFCFFVKVFGRAEMFILSIVFQAVGYAIYAGCKNVGQYIAGGIFEAIGSTGFGLTQQVFVADVTNLINRAVWSTLPDSLTVIPALYLGTEIAEAVLEKNEWRWGFGMWAIIEPVCSVLLVGTMLYYQKRARKDPSPAEFASEPTERNVDDGWWKRIYNLVWVQLDAFGAILLLLGLSLFLVPLSLTGSGNSDDWHRGSFIAMLVLGVVIFVAFLAWDTWCAKKPFIPYRMIKNRTVAAACLLGILDFFHYSVFSVFFTSYLQVAAHHGAGPATRIDNSLRVAFQVAGIFAAYFMKFTKRSQVWVFTGVPLCVLGMGVLLYLVDMGEGRVGNEAAFVTAKSLIGIGRGFYQTASQVSVQAKVSRGEVSVVTAVFFAAMSIGGAIGTSVAGAIWRSTLPPKLAQHLPAELKDQAQAIFGSIVVAQKYEVGTPARDAIDMCYRQSQRMLAIAALAALAPMLIIMFFLENVPLTDETTLIELHGNREAVKKNHSGGEGKEARS

SEQ ID NO: 40133 - protein, 594 aa, Erwinia carotovora subsp. atroseptica SCRI1043
MVGYFFPIQVHYMLNDKDLSTWQTFRRLWPMISPFKAGLAVAAIALIINAAGDTLMLSLLKPLLDEGFGKADRSVLLWMPLVVIGLMLVRGASGFVSSYCVSWVSGKVVMNMRRRLFSHIMGMPVAFFDQQSTGTLLSRITYDSEQVAASSSGALITVVREGASIIGLFILMFYYSWQLSIILIVIAPIVSIAMRMVSKRFRSISKNMQDTMGHVTTSTEQMLKGHKEVLMFGGQDVETKRFEQVSNRMRQQGMKMVSASSISDPIIQLIASLALAFVLYAASFPSVMETLTAGTITVVFSSMIALMRPLKSLTNVNAQFQRGMAACQTLFAILDMEQERDTGKREIERAKGELEFRQVNFAYPARENLALKNINLHIPVGKTVALVGRSGSGKSTIASLITRFYDIQSGEILLDGHDLREYRLSSLRNQVALVSQNVHLFNDTIANNIAYARNENYSREEIERAAKMAYAMDFINKMEHGLDTVIGENGVMLSGGQRQRIAIARALLRDSPILILDEATSALDTESERAIQAALDELQKDRTALVIAHRLSTIEKADEILVVEDGRIIERGNHTALLATNGAYAQLHRMQFGE

SEQ ID NO: 40134 - protein, 353 aa, Frankia sp. EAN1pec
MTGRLTNTDPALRHGWHPVARSPELADEPIAVRLLGEPWVLARLDDQVAAFADWCPHRLAPLSAGRVEGHELVCGYHGWRFVASGECTAVPALGPGIPAPRRARAIPPWGVTERHGLVWIAPAEPFADIIELPEAAEDGFDDAWLPAARTTACAGLLADNFLDTAHFPFVHAATIGAGEETVVAPYRVDADGDGFLVRMDQEVANPEDPGVAAGLRPLIQRRTSTYVYRPPFMLRLRLEYPDAGITNTILFCLQPEEAAATRVYTRILRDDLGGDPARLAEAVRFEQAVLDEDLALQERFTIDGLPLISGDGGTAAEVSIRADAAGVALRRVLAAVVARAARSSPTRAADIRH

SEQ ID NO: 40135 - protein, 748 aa, Bacteroides fragilis NCTC 9343 [sequence omitted]

SEQ ID NO: 40136 - protein, 124 aa, Elymus glaucus
DIEETLKRLVFDMKKSPAEVFDALKNQTVDLVLTAHPTQSVRRSLLQKHSRIRNCLVQLYSKDITPDDKQELDEAFQREIQAAFRTDEIRRTQPTPQDEMRAGMSYFHETIWKGVPKFLRRVDT

SEQ ID NO: 40137 - protein, 488 aa, Zea mays
MGNQCPNGTLGSDYYNRPASRFADGCLEDDRYSDLKKFDKPWPEVNSFKPTAVGILKRGLDPTSITVLERKTADVREHYIIGRRLGQGQFGTTFLCTEISTGCEYACKTIPKRKLITKEDVEDVRREIQIMHHLSGHKNVVSIKDVYEDGQAVYIVMELCAGGELFDRIQEKGHYSEQKAADLIRIIISLVAMCHSLGVMHRDLKPENFLLWDKEDDLSIKAIDFGLSVFFKPGQVFTELVGSPYYVAPEVLHKRYGPEADVWSAGVILYVLLSGVPPFWAETQQGIFDAVLKGHIDFDSDPWPKISESAKNLIRKMLCPCPSERLKAHEVLRHPWICENGVATDQALDPGVLSRLKQFSAMNKLKKLALRADNDNNVTINYEEFIAATVPLNKIEREEHLMAAFTYFDKDGSGYITVDKLQRACGEHDMDDTFLEEIILEVDQNNDGQIDYAEFVAMMQGNKVGLGWQQMETTLNVTLRDAPQVHCH

SEQ ID NO: 40138 - protein, 676 aa, Glycine max
MVNSMVERATSDMLIGPDWAMNIEICDMLNHDPGQAKDVVKGIKKRIGSKNSKVQLLALTLLETIIKNCGDIVHMHVAERDVLHEMVKIVKKKPDFHVKEKILVLVDTWQEAFGGPRARYPQYYAAYQELLRAGAVFPQRSEQSAPVFTPPQTQPLASYPQNIHDTNAHRDTAQSSAESEFPTLNLTEIQNARGIMDVLAEMLNALDPSNKEGIRQEVIVDLVEQCRTYKQRVVHLVNSTSDESLLCQGLALNDDLQRVLAKHESISSGISTKNENHTENLNPSLAPAGALVDIDAPLVDTGDTSKQTDGRSSSNVEAGSQTLNQLLLPAPPTSNGSTIPAKVDPKWDLLSGDDYNSPKADSSNALVPLGEQPTASPVSQQNALVLFDMFSNGNNAPTSVNSQPPHPANVAGQTSPYAPQFQQQQTVTSQGGFYPNGNAPNAGSPQQYEQSLYTQNTGPAWNGQVAQQQQQQPPSPVYGAFNVFSFGSLPPPPWEAQPAADNGSPLAGAQYPHMQNSGHPMGPQTMGNDQGVGMYMQPNANSHMSGMNNHVGSNQMGLQPQHMQGVAGPYMGMAPHQMQGGPVMYPQQMYGNQFMGYGYDQRQGVHYQQQGVPYIERQMYGMSVRDDSSLRNPYQASTTSYAPSGKPSKPEDKLFGDLVDMAKVKPKPTPGRAGSM

SEQ ID NO: 40139 - protein, 149 aa, Brassica napus
  misc_feature (139)..(139): Xaa can be any naturally occurring amino acid
  unsure (1)..(149): unsure at all Xaa locations
VLIFVSFTISPATSTVPEECASESANPCVNKSKALTLKIIAIATILVASMIGVGAPLFSRSVPFLRPDGDIFTVVKCFASGIILGTGFMHVLPDSFDMLSSQCLEENPWHKFPFTGFLAMLSGLITLAIDSMATSLYTXKNAVGIIPHG

SEQ ID NO: 40140 - protein, 1211 aa, Dechloromonas aromatica RCB
MAPPVIDRNNPWPWLDPFTEKAEAFFNGRDDDSAALQRCVLAGVATVLFGKSGLGKTSLLQAGLFPRLRKSGLLPVLVRLEHGSASPTAAAQIRTCLHKECTAYGLTMPGNPQFAPQLEKPEDRLWLDLHTNPVGLRDAHGQTWQVVFVLDQFEEIFTLGGQDSERQRLDFGALGDLVENRIPRALENAISVDEDLLDELRLDVQPYRVVFSLREDYLPNLERWCDRIPRLGPNRYRLLPMQEAQALDAIRLTGGDLVSPQDADRIVRFVSSQQEGPAVGMASGESAEVSIEPALLSLLCSGLNLERQKAGAAHLDASNLEQSGGRIMERFYDDATLDVAPAAIAFVEDELITPDGVRLFYPLKSILQNPGITKADIDTLIERRLLRRQPFTEGDRIELVHDRLAAVARQRRRNRESVAAQQRRLDEARREAAAKEANVRADLESKARESETRARLRAEKDASSQRRLQGILKFVVAALVVLLCLAGASAWFAREQSALARAAEGKAKRSAEEASIRRLVAEGQAMTTGAQSGGSILGILQLLAAHRLSDEAYPQASPGALGALRAEFMRSARLLHLSESDEAITTLDLSPDGLRIVTGSRNGSLQLWEAASGAPIGKPLIGHSSYVNSVAFSPDGKAIVSASRDHTLRLWEAGTGNPLGKPLQSDSAVCSVAFSPLGQRIVAGGLDGNLRLWDAATGQMLGEPLKGHSQRVCAVAFSPDGQHIVSGGDDKTLRLWNVSSGQPSGEVLKGHTEAVYSVAYSPNGLRIVSGSSDATLRLWDARTGKPIGDPLKRHRKAILGVAFSPDGRYIVSGSGDYTVRLWETETQKPAGDSLRGHTDEITGVLFSRDGERVVSGSYDKTLRLWTVAADDPTSVVLNGSDKALKSVAFSPDGTRLVWAGEDQDVHVLDLTTGKTTGKPFSGHREAVYSVAVSPDSKRIASGSSDMSVRLWDAATGALLVPPLQGHLGTVYGVAFSPDGARLVSGSADGTLRQWNAGSGAPIGSPMSGEGGSVSSVAFSRDGRRIVSASEDGKLRLWDTATGKPIGKPLVGHLKAVNSVAFSRDGRLIVSASDDMSLRLWDANSGAPIGKPLTGHTHYVNSVAFSPDGRYVVSGSKDQTLRLWDVRTGTPVGAPLEGHSDVIFGVTFSPDGRQVASVSGDSSLRRWPVLESWAERLCAKLGRNMSDSEWQRLVSPDIPYARQCPGLPKPGD

SEQ ID NO: 40141 - protein, 587 aa, Triticum aestivum
MAMVDEPLYPIAVLIDELKNEDIQLRLNSIRRLSTIARALGEERTRKELIPFLSENNDDEDEVLLAMAEELGVFIPYVGGVEHAHVLLPPLETLSTVEETCVRDKAVESLCRIGAQMKENDIVDYFIAVVKRLAAGEWFTARVSSCGLFHIAYPSATDPLKTELRTIYGQLCQDDMPMVRRAAASNLGKFAATVEQSHLKTEIMSIFDDLTQDDQDSVRLLAVEGCAALGKLLEPQDCVAHILPVIVNFSQDKSWRVRYMVANQLYELCEAVGPEPTRADLVPAYVRLLRDNEAEVRIAAAGKVTKFCRILSPQLAIQHILPCVKELSSDSSQHVRSALASVIMGMAPVLGKDATIEQLLPIFLSLLKDEFPDVRLNIISKLDQVNQVIGIDLLSQSLLPAIVELAEDRHWRVRLAIIEYIPLLASQLGVGFFDDKLGALCMQWLEDKVFSIREAAANNLKRLAEEFGPEWAMQHIIPQVLEKINNPHYLYRMTILQAISLLAPVMGAEITCQKLLPVVINSSKDRVPNIKFNVAKVLQSLVPILDQSVAEKTVKPCLVELSEDPDVDVRYYANQALQACDQIMMSS

SEQ ID NO: 40142 - protein, 1315 aa, Botryotinia fuckeliana
MEDSTIAHTTAILQTLALSSIDLPLTNVYGNKGIRLPGADTAEKLALERELAALVSRVQRLEARAITVNNQTLPDTPNELGAPSAFADVLTGAPSRASKSTTSRQQLVNSLLAAREAPTGGERPPKFTKLSDEELEALREHVDHQSKQLDSQKSELAGVHAQLFEQKQRQEQALNVLEVERVAALERELKKHQQANEAFQKALREIGEIVTAVARGDLSKKVQIHSVEMDPEITTFKRVINTMMDQLQIFSSEVSRVAREVGTEGILGGQAKISGVDGTWKELTDNVNVMAQNLTDQVREIASVTTAVAHGDLTQKIERPAQGEILQLQQTINTMVDQLRTFAAEVTRVARDVGTEGILGGQAEIEGVQGMWNTLIVNVNAMANNLTTQVRDIAIVTTAVAKGDLTQKVQAECKGEIKQLKETINSMVDQLQQFAREVTKIAREVGTEGRLGGQATVHDVEGTWRDLTENVNGMAMNLTTQVREIAKVTTAVARGDLTKKIEVEVQGEIASLKDTINTMVDRLSTFAFEVSKVAREVGTDGTLGGQAQVDNVEGKWKDLTENVNTMARNLTTQVRGISTVTQAIANGDMSQKIEVAAAGEILILKETINNMVDRLSIFSNEVQRVAKDVGVDGKMGGQADVAGIGGRWKEITTDVNTMANNLTTQVRAFGDITNAATDGDFTKLITVEASGEMDELKRKINQMVYNLRDSIQRNTLAREAAEFANRTKSEFLANMSHEIRTPMNGIIGMTQLTLDTDLTQYQREMLNIVHNLANSLLTIIDDILDLSKIEANRMIMEEIPYTLRGTVFNALKTLAVKANEKFLDLTYRVDSSVPDHVVGDSFRLRQVILNLVGNAIKFTEHGEVSLTIQKAEQDHCAPNEYAVEFCVSDTGIGIQADKLNLIFDTFQQADGSMTRKFGGTGLGLSISKRLVNLMRGDVWVKSQYGKGSSFYFTCTVRLATSDISFIQKQLKPYQGHNVLFIDKGQTGHGKEIITMLTQLGLVPVVVDSEQHTILLGNGRTKEKIASTYDVIVVDSIESARKLRSIDEFKYIPIVLLAPVIHVSLKSALDLGITSYMTTPCLTIDLGNGMIPALENRAAPSLADNTKSFDILLAEDNIVNQRLAVKILEKYHHVVTVVGNGQEALDAIKEKRYDVILMDVQMPIMGGFEATAKIREYERSLGTQRTPIIALTAHAMLGDREKCIQAQMDEYLSKPLKQNHLIQTILKCATLGGALLEKGREVRQSANEESPNSQNGPRGTQHPASSPTPAHMRPAIEPRAYTTTGPINHGSAESPSLVTADAEDPLARLLMRAHSS

SEQ ID NO: 40143 - protein, 322 aa, Arabidopsis thaliana
  misc_feature (245)..(245): Xaa can be any naturally occurring amino acid
  unsure (1)..(322): unsure at all Xaa locations
MRPLSIKPTSLDVARHATPVESFGNHRPPISPWHSPVPYLFGGLAAMLGLIAFALLILACSYWRLSTSGDDSGERVDEEKESRSGVKAASAACEEKVLVIMAGEDLPRCYRQIKGKPYPKSRYCRGVPDPKIRIYDVGMKRKGVDEFPFCVHLVSWEKENVSSEALEAARIACNKYMVKSAGKDAFHLRIRVHPFHVLRINKMLSCAGADRLQTGMRGAFGKALGTCARVAIGQVLLSVRCKDAXMGHHAQEALRRAKFKFPGRQKIIVSRKWGFTKFNRADFTKLRQEKRVVPDGVNAKFLSCHGPLANRQPGSAFLPAHY

SEQ ID NO: 40144 - protein, 161 aa, Medicago sativa
TLFNCSIEENIAYGFDGKIEDADIENAAKMANAHEFISNFPEKYKTFVGERGIRLSGGQKQRIAIARALLMDPKILLLDEATSALDAESEYLVQDAMDSIMKGRTVLVIAHRLSTVKTANTVAVVSDGQIVESGTHDELLEKNGVYTALVKRQLQTTKTEI

SEQ ID NO: 40145 - protein, 496 aa, Ricinus communis
RTALQSGIDKLADAVGLTLGPRGRNVVLDEFGSPKVVNEGVTIARAIELPDPMENAGAALIREVASKTNDSAGDGTTTASVLAREIIKLGLLSVTSGANPVSIKRGIDKTVQGLIEELEKKARPVKGRDDIKAVASISAGNDELIGTMIADAIDKVGPDGVLSIESSSSFETTVEVEEGMEIDRGYISPQFVTNPEKLICEFENARVLVTDQKITAIKDIIPLLEKTTQLRAPLLIIAEDVTGEALATLVVNKMRGILNVAAIKAPGFGERRKALLQDIAILTGAEFQASDLGLLVENTSVEQLGIARKVTITKDSTTLIADAASKDELQARIAQLKRELAETDSVYDSEKLAERIAKLSGGVAVIKVGAATETELEDRKLRIEDAKNATFAAIEEGIVPGGGAALVHLSTVVPAINGEDKDADERLGADILQKALVAPASLIAQNAGIEGEVVVEKVKAREWEIGYNAMTDKYENLVEAGVIDPAKVTRCALQNS

SEQ ID NO: 40146 - protein, 143 aa, Thermoplasma volcanium GSS1
MIEVKEPKRIPFVGMLQGMFTVFKHLFKKPITVQYPEEKAYTPPRFKFRIFLSMDDCVGCTLCEQVCPNLSIRMIVVERNNPHNKRNLYPQVNFGTCTVCRNCEEICPTEAIYLTHELETARTRNNFFYSPQELEKTEEEVKK

SEQ ID NO: 40147 - protein, 449 aa, Cryptococcus neoformans var. neoformans JEC21
MPKSSLAALPTDVQSHVNQAIDSLRDLVPPDPSFVSEDIQDTIFKTVDELNDDMRKLSLAIHDNPELGFKEFEARKNLVTALKKLGFDISNPSDLETAFVATYTRGSGGRTFGFNAEFDALPDIGHACGHNLIAVIAVVGAAALKAAMEASDMSGTVKVIGSPAEEDGGGKILLLKQGIYDDLDACGMAHPFGGMGGAAGSCPIGGPATLSRSGLEIEFHGRGAHAGSAPWMGINALDAAVQGYTAVSMLRQQLEPTMRVHGIILGSEKWVTNIIPSYSKVSFGTRALDTKLCIDLREKVIACFKSAAESTGCSCKIKAPDDAVYAETRNNEKLAHSYQIFMDRAFGDKIELEGVTTASTDFGNVCYKLPGFHPMFDIPSEEGSSNHTPGFAEAARTPEAHSRAMKVAKGLAVIGAKFMIDDNFAKETREAYEKLQEEVRNSGGQSKTE

SEQ ID NO: 40148 - protein, 303 aa, Prochlorococcus marinus str. NATL2A
MVSSVVETKLSDWKFLGHSVHSLSIIPEAHKTKTDEEKGPAILLIHGFGASTTHWRYNLPVLGKKYEVHALDLLGFGKSSKPSGLAYGGPLWKDQIVAYVKEKIGRPTILVGNSLGGYAALASGAAMGPEAAGVVLLNAAGYFSEDKKTTKGTWATARKTVAGIFLKNALLQRIIFENLRQPSTIKRTLNQVYIDTSNVDDELVEAIRKPSLDKGAFNVFKSVFDPAGPQGKPLDELFSQLKAPLLLLWGNRDPWMNAPGKRATYKKHTPTNTKEVVLDAGHCPHDEVPDQVNSALLEWINQL

SEQ ID NO: 40149 - protein, 458 aa, Zea mays
MAASGEGVSLPSPAGGEDAHRRRVSYFYEPSIGDYYYGQGHPMKPHRIRMAHSLVVHYGLHRLLELSRPYPASEADIRRFHSDDYVAFLASATGNPGVLDPRAIKRFNVGEDCPVFDGLFPFCQASAGGSIGAAVKLNRGDADITVNWAGGLHHAKKSEASGFCYVNDIVLAILELLKFHRRVLYVDIDVHHGDGVEEAFFTTNRVMTVSFHKYGDFFPGTGHITDVGAAEGKHYALNVPLSDGIDDTTFRGLFQCIIKKVMEVYQPDVVVLQCGADSLAGDRLGCFNLSVKGHADCLRFLRSYNVPMMVLGGGGYTIRNVARCWCYETAVAVGVEPDNKLPYNDYYEYFGPDYTLHIQPKSVENLNTTKDLENIKNMILENLSKIEHVPSTQFHDRPSDPEAPEEKEEDMDKRPPQRSRLWSGGAYDSDTEDPDSLKSEGKDVTANFQMKDEPKDDL

SEQ ID NO: 40150 - protein, 1861 aa, Thermoanaerobacterium thermosulfurigenes
MNKKLFTNRFISFNMSLLLVLTAVFSSIPLHSVHAADNASVVANIVGEFQDQLGDSNWNIDSNITIMQYMGNGLYEFTTPTQLKAGSYQYKVALNHSWDGGGVPSQGNLTLNLANDSYVTFWFDYNTQSVTDSTKYTPIANDKLPRLVGTIQSAIGAGNDWKPETSTAIMTDDNFDNVYSYTAHVPKGDYQYKVTLGNTWDENYGANGVKDGSNIQINVTNDADITFYYDANTHNIWTNYSPILTGLDNNIYYDDLKHDTHDSFFRNPFGAVKVDQTVTLRIQAKNHDLESARISYWDDINKIRIELPMTRIGESPDGNFEYWEIKLSFDHPTRIWYYFILKDGTKTAYYGDNDDQLGGVGKATDTVNKDFELTVYDKNFDTPDWMKGAVMYQIFPDRFYNGDTSNDHAKTLSRGNDPIEFHNNWNDLPDNPNNAGTPGYTGDGIWSNDFFGDLKGIDDKLDYLKGLGVSVIYLNPIFESPSNHKYDTADYTKIDEMFGTTQDFEKLMSDAHAKGIKIILDGVFNHTSDDSIYFNRYGKYPGLGAYQAWKEGNQSLSPYGDWYTINSDGTYECWWGYDSLPVIKSLNGSEYNVTSWANFIINDENAISKYWLNPDGNLNDGADGWRLDVENEVAHDFWTHFRNAINTVKFEAPMIAENWGDASLDLLGDSFNSVMNYQFRNDIIDFLIGQSFDDGNGQHNPIDAAKLDQRLMSIYERYPLPAFYSTMNLLGSHDTMRILTVFGYNSADPNENSDAAKQLAEQKLKLATILQMGYPGMADIYYGDEAGVSGGKDPDDRRTFPWGNEDTTLQDFFKNISSIRNNNQVLKTGDLETLYAQNDVYAIGRRIINGKDAFGTSYPDSAAIVAINRSKSDKQIAIDTTKFLRDGVTFKDLINNNVSYSISNGQIVIDVPAMSGVMLISDDGQDLTAPQAPSNVVVTSGNGKVDLSWLQSDGATGYNIYRSSVEGGLYEKIASNVTETTFEDANVTNGLKYVYAISAIDELGNESGISNDAVAYPAYPIGWVGNLTQVSDNHIIGVDKPTEDIYAEVWADGLTNSTGQGPNMIAQLGYKYVSGTVYDSVYGSVYNSVYGVDDSGFTWVNAQYVGDIGNNDQYKASFTPDKIGQWEYLMRFSDNQGQDWITTSTLSFYVVPSDDLIKPTAPYLNQPGTESSRVSLTWNPSTDNVGIYDYEIYRSDGGTFNKIATVSNEVYNYIDTSVINGVTYNYKVVAVDLSFNRTESNVVTIKPDVVPIKVIFNVTVPDYTPDAVNLAGTFPNATWDPSAQQMTKIDNNTYSITLTLDEGTQIEYKYARGSWDKVEKDEYGNEFASNRKVTIVNQGNNEMTINDTVYRWRDIPIFIYSPSSNMTVDSNISTMEVKGNTYKGAKVTINGDSFVQDKNGVFTKDVSLNYGVNKIKIHVEPNDGSVYGNDQGRITELTKDIEIDVIRQENNSGSGTGNNNTSTSGSNSSSTGSGSTGSTSITSNISNTSNTSNTIGVITKNGNVITLTLDAGKAKDLIVNSKDKKVVFDITTIGEGQQKVVQISKDILDTSAANGKDIVIKSDNASIALTKDALNQNQIQNGVNVSIKDNGKPNVTNYVSLSNVVDITISGISGNVTLAKPVEVTLNISKANDPRKVAVYYYNPTTNQWEYVGGKVDASSGTITFNATHFSQYAAFEYDKTFNDIKDNWAKDVIEVLASRHIVEGMTDTQYEPNKTVTRAEFTAMILRLLNIKEETYSGEFSDVKSGDWYANAIEAAYKAGIIEGDGKNARPNDSITREEMTAIAMRAYEMLTQYKEENIGATTFSDDKSISDWARNVVANAAKLGIVNGEPNNVFAPKGNATRAEAAAIIYGLLEKSGNI

SEQ ID NO: 40151 - protein, 332 aa, Pseudomonas syringae pv. syringae B728a
MGLLVEGHWQDQWYESSKDGAFQRENAQRRSWVTPDGQPGPSGAGGFAAQAGRYHLYVSLACPWAHRTLILRKLKGLESLIDVSVVSWLMLENGWTFDQQKGSSGDALDDLQFLHQRYTADDPRYTGRVTVPVLWDKQQQCIVSNESAEIIRMFNSAFDELTGNTLDFYPQALRASIDELNEQIYPKVNNGVYRAGFATSQGAYEEAFDDVFAELDVLENLLGEKRYLTGKHLTEADIRLFTTIVRFDAVYYSHFKCNLRRIADYPNLSNWLRELYQWPGIAETVSFEHIKGHYYGSHRTINPTGIIPKGPALDLQADHDRERLSGEGVWNN

SEQ ID NO: 40152 - protein, 447 aa, Saccharomyces cerevisiae
MPKESEVINSEFHVDVQDPERLNGHPVAKFINKLSGQPESYVNRTNYIFGRTLGAGSFGVVRQARKLSTNEDVAIKILLKKALQGNNVQLQMLYEELSILQKLSHPNIVSFKDWFESKDKFYIVTQLATGGELFDRILSRGKFTEVDAVEIIVQILGAVEYMHSKNVVHRDLKPENVLYVDKSENSPLVIADFGIAKQLKGEEDLIYKAAGSLGYVAPEVLTQDGHGKPCDIWSIGVITYTLLCGYSPFIAESVEGFMEECTASRYPVTFHMPYWDNISIDAKRFILKALRLNPADRPTATELLDDPWITSKRVETSNILPDVKKGFSLRKKLRDAIEIVKLNNRIKRLRNMYSLGDDGDNDIEENSLNESLLDGVTHSLDDLRLQSQKKGGELTEEQMKLKSALTKDAFVQIVKAATKNKHKVLAGEEEDDSKKTLHDDRESKSED

SEQ ID NO: 40153 - protein, 404 aa, Synechocystis sp. PCC 6803
MDRQGKQKTAPIEALAMGVVVTGLALDTALGDQLQTWTKLLQGKTAIKPKQPFINLPSFPLALQGNYPRSLGQLVPPLVQAAIDDAQLDPAEQPWGVAIGSSRANQCHWEDWVGRNIKPPVAPNFKLVDWWQTLPDQAARLAAQLLPEVTVMQCPMAACATGLWAIAQGVELIRTGHCQRVLAGAVEAPITPLTLAGFSKMATLAPDGCYPFDRQRQGLVLGEGGALLVLETRELAQKRKARIYGEILGWGFSCDALHRSTPAFDNHSAQQAVKHCLTRSGLTPEQIDLIHPHGTGTLFNDQREAALIQTLFPQNPLITSSKGATGHTLGASGAIAVALTLLSLHQQKLPPCVGLKEPEFPLNFVRIESVQPATSPLNYGLCLSFGFGGQNGAIAVGHAPLPTK

SEQ ID NO: 40154 - protein, 1094 aa, GIBBERELLA ZEAE PH-1
MDRPAKRQRSTEFEAHAPESLQRSISPPRKRARKPVAIPSPWQLTWIQDLPESENKDAVSLRDLLGDPLISECWEFNFLHDIPFLMNAFDPDTRHLVNVHLVHGFWKHEDKNRIALENAAAKFENVNVHIAPMPEMFGTHHSKMMILFRHGDTAQVIIHTANMIPKDWTNMTNGVWKSPLLPRMSKTQTPASSPEEFLVGSGERFKIDLLNYLKFYDKRKIICKPLSDKLKQYDFSTIKAALIASVPGRHDAHDMSETSWGWAALKRCLRHVPCHQHGDSDIVVQVSSIATLGPKDDWLQKTLFDHLGRCKDTGLRRPRFKVVFPTADEIRRSLDGYASGLSIHTKIQSPQQAKQLEYLRPMFHHWANDSPGGTKLPDGPVLESGRKRAAPHIKTYVRSNKSSIDWGLLTSANISKQAWGEAARPTGEMRIASWEVGVLIWPELLEPGSVMKPPLVLFLVPSLLLHLSLISCNQRIALRRGAGVSPYGTPRGSGAHPALSSSWRVGSPLAEAALAADIAACSDEEYDDSAIDDDVSVSDLPGDPIMYRRPSGVAFGGSRPIMNPQIYDEPGLTALERKQSRNAERSLLRDNHVLPPKHGHRQQDGFFTRIYQRLFSTKIPQDEEQAPAISVQPPSETDPLLGSRVDAVSPEHLNETWEHAVAEHRIKTTWQREAKTIASYSAPLIVTFLLQYSINVTSIFAVGRIGKLELGAVSLANMTAAITCLAPFQGLATSLDTLCAQAYGSGHKHLVGLQFQRMTCFLFVLAVPVAVFYWFSEGVIRALVPEPESARLAGMYLRVMIFSIPGFILFEGGKRFTQAQGLFRATTYVLLIVAPFNVFLSWLLVWKLEWGFIGAPAAVAISTNLLPIFLFLYVRFINGRQCWGGFSRRALSNWWIMIRLALPGMIMVEAEWLAFEILTLMASRFGPEYLAAQSVVTTITTLSYEIPFPMSIAASTRIANLIGAGLVEPAKKTGVVAFAAACLIGMFNLTLYTTLRYKLPLLFTKDDDVIELVAEVMPIVSVMQVFDGLAAGAHGLLRGIGKQSIGGPANILSYYALSLPVSLALAFGLGWKLEGLWIGVTCGTISEINEKFEH

SEQ ID NO: 40155 - protein, 521 aa, Simmondsia chinensis
MKAKTITNPEIQVSTTMTTTTTTATLPNFKSSINLHHVKLGYHYLISNALFLVFIPLLGLASAHLSSFSAHDLSLLFDLLRRNLLPVVVCSFLFVLLATLHFLTRPRNVYLVDFACYKPHPNLITSHEMFMDRTSRAGSFSKENIEFQRKILERAGMGRETYVPKSVTKVPPEPSIAAARAEAEEVMYGAIDEVLEKTGVKPKQIGILVVNCSLFNPTPSLSSMIVNHYKLRGNILSYNLGGMGCSAGLISIDLAKDLLQVYRNTYVLVVSTENMTLNWYWGNDRSMLITNCLFRMGGAAIILSNRWRDRRRSKYQLLHTVRTHKGADDKSYRCVLQQEDENNKVGVALSKDLMAVAGEALKANITTLGPLVLPMSEQLLFFATLVARKVFKMTNVKPYIPDFKLAAKHFCIHAGGKAVLDELETNLELTPWHLEPSRMTLYRFGNTSSSSLWYELAYAEAKGRIRKGDRTWMIGFGSGFKCNSVVWRALRSVNPAREKNPWMDEIENFPVHVPKIAPIAS

SEQ ID NO: 40156 - protein, 124 aa, Elymus lanceolatus
DIEETLKRLVFDMKKSPAEVFDALKNQTVDLVLTAHPTQSVRRSLLQKHSRIRNCLVQLCSKDITPDDKQELDEALQREIQAAFRTDEIRRTQPTPQDEMRAGMSYFHETIWKGAPKFLRRVDT

SEQ ID NO: 40157 - protein, 417 aa, Nicotiana tabacum
AADGYARARGVGACVVTFTVGGLSVLNAIAGAYSENLPLICIVGGPNSNDYGTNRILHHTIGLQDFSQEPRCFQTVTCYRAVVNNLEDAHELIDTAVSTALKESKPVYISIGCNLPGIPHPTFSREPVPFALSPRLSNMMGLEAAVEAAAEFLNKAVKPVLVGGPKMRVAKASDAFVELSDACGYAVAVMPSAKGLFPEHHSHFIGTYWGAVSTAFCAEIVESADAYLFAGPIFNDYSSVGYSLLLKKEKAIIVQPDRVTIGNGPAFGCVLMRDFLAALAKRLKHNPTAFENYHRIYVPEGHPLKCEPKEALRVNVLFQHIQNMLSGDSVVIAETGDSWFNCQKLKLPKGCGYEFQMQYGSIGWSVGATLGYAQAAPEKRVIACIGDGSFQVTAQDISTMLRCGQRTIIFLINNGGY

SEQ ID NO: 40158 - protein, 119 aa, Elymus wawawaiensis
DIEETLKRLVFDMKESPAEVFDALKNQTVDLVLTAHPTQSVRRSLLQKHSRIRNCLVQLYSKDITPDDKQELDEALQREIQAAFRTDEIRRTQPTPQDEMRAGMSYFHETIWKGVPKFL

SEQ ID NO: 40159 - protein, 118 aa, Eremopyrum orientale
KRLVFDMKKSPAEVFDALKNQTVDLVLTAHPTQSVRRSLLQKHSRIRNCLVQLYSKDITPDDKQELDEALQREIQAAFRTDEIRRTQPTPQDEMRAGMSYFHETIWKGVPKFLRRVDT

SEQ ID NO: 40160 - protein, 288 aa, Zea mays
  misc_feature (141)..(141): Xaa can be any naturally occurring amino acid
  misc_feature (179)..(179): Xaa can be any naturally occurring amino acid
  unsure (1)..(288): unsure at all Xaa locations
MPDLHPPEHQVAGHRASASKLGPLIDGSGLFYKPLQAGDRGEHEVAFYEAFSAHAAVPARIRDTFFPRFHGTRLLPTEAQPGEPHPHLVLDDLLAGFEAPCVADIKIGAITWPPSSPEPYIAKYLAKDRGTTSVLLGFRVXVRVVGPEGAVWRTERPEVKAMDTVGVRRVLRRYVSSAXDEGMDCALAAAVYGGKGGVLSQLRELKAWFEEQTLFHFYSASILLGYDAAAVAAGGDGGGVTVKLVDFAHVAEGDGVIDHNFLGGLCSLIKFVSDIVPETPHTQPLGPS

SEQ ID NO: 40161 - protein, 278 aa, Muhria urceolata
  misc_feature (95)..(95): Xaa can be any naturally occurring amino acid
  misc_feature (100)..(100): Xaa can be any naturally occurring amino acid
  misc_feature (157)..(157): Xaa can be any naturally occurring amino acid
  misc_feature (167)..(167): Xaa can be any naturally occurring amino acid
  misc_feature (214)..(214): Xaa can be any naturally occurring amino acid
  misc_feature (263)..(263): Xaa can be any naturally occurring amino acid
  unsure (1)..(278): unsure at all Xaa locations
VEHKDVKVVAVNDPFIEPHYAAYMLKYDSQHGQFKGTIEVEGSDLIVNGQRVKFYTEKDPANIPWKDTGAYYIVESTGVFTTTDKAKAHLKGGAXKVVIXAPSADAPMYVMGVNQETYKSDVEVISNASCTTNCLAPLAKVMHDNFTIIEGVMTTIXSYTATQKTVXGPSAKDWRGGRTAAQNIIPSSTGAAKAVGKVIPSLNGKLTGMSMRVXTSNVSVVDLTCRIEKSVTYDEIKEVMKKASNGDLKGIMSYSEDDLVSTXLNGDNHSCIFDAKAG

SEQ ID NO: 40162 - protein, 467 aa, Oryza sativa
MSAAAEEAAAAAAAEEVEGVEAGKKGVADAKGKGKEKVVVAEEDSAVAAGSGGSGGGRRTLVAYPARVAGYKDVVADAAVFRRALEGLHAQMGTKLKVPIIGGKDLDLHQLFKEVTSRGGIDKVKSDNRWREVTASFIFPATATNASFMLKKYYMSLLYHFERLYLFEAQGWYQETDSRSISCIEMKAEGQASRKRKRGSNSCSSDLAASLDNDVQVIIDGKFEHGYIVTVIMGSKSTKAVLYNCTEEPAVPTAVPHVAIDSAEGIRPRRRRRRKKLSTTDPNHPKPNRSGYNFFFQDQHRKLKPEYPGQDRLISKMIGERWNNLGPEDKAVYQEKGVEDKARYQRQLALYREQRTGQPISNAVPIQQRLPQKEVTIDEVDSKVSEGDILLSNQGYSSSTSSSDETADSGEKNVEDDEEFNTETSPEPSMETTDSHGQPDPSADGERFELRRRENPKIDEKRDMPPN

SEQ ID NO: 40163 - protein, 278 aa, Muhria urceolata
  misc_feature (95)..(95): Xaa can be any naturally occurring amino acid
  misc_feature (109)..(109): Xaa can be any naturally occurring amino acid
  misc_feature (114)..(114): Xaa can be any naturally occurring amino acid
  misc_feature (139)..(139): Xaa can be any naturally occurring amino acid
  misc_feature (146)..(146): Xaa can be any naturally occurring amino acid
  misc_feature (157)..(157): Xaa can be any naturally occurring amino acid
  misc_feature (167)..(167): Xaa can be any naturally occurring amino acid
  misc_feature (214)..(214): Xaa can be any naturally occurring amino acid
  misc_feature (274)..(274): Xaa can be any naturally occurring amino acid
  unsure (1)..(278): unsure at all Xaa locations
VEHKDVKVVAVNDPFIEPHYAAYMLKYDSQHGQFKGTIEVEGSDLIVNGQRVKFYTEKDPANIPWKDTGAYYIVESTGVFTTTDKAKAHLKGGAXKVVISAPSADAPMXVMGVXQETYKSDVEVISNASCTTNCLAPLXKVMHDNXTIIEGVMTTIXSYTATQKTVXGPSAKDWRGGRTAAQNIIPSSTGAAKAVGKVIPSLNGKLTGMSMRVXTSNVSVVDLTCRIEKSVTYDEIKEVMKKASNGDLKGIMSYSEDDLVSTDLNGDNHSCIFXAKAG

SEQ ID NO: 40164 - protein, 165 aa, Cichorium intybus x Cichorium endivia
MSFSEEQEALVKEAWEIMKEDIPALSLYFFTQVLEIAPAAKGLFSFLKDAEEIPQDNPKLKSHAVKVFKMTCEAIQLREKGEVVVSGSTLKYLGSVHLQKGVIDAHFAVVKEGVLRTVEKGVGEKWSEEMKGAWSEAYDQLAAAIITEMKKEATEMDEEAEETQT

SEQ ID NO: 40165 - protein, 553 aa, Zymomonas mobilis subsp. mobilis ZM4
MTSIPNKNDDELNEGVTVTPPKKIRRSAKVRYAYAVTAALLIGGATATMVTQQPVDAQVAQNAPGTIHAPVSKNGTIPGFADLVEKLQPAVVNISTTQRVKIQTPANPFAGTPFADLFGGLGGGDTGRPITREAQSLGSGFIVSPDGFVVTNNHVISAGDPDKQGSGTASAVVESITVTLPDHGEYKARVVGRDSASDLALLKIESAKPLPFVQFGDSTRTRVGDWVLAIGNPFGFGGSVTAGIVSAMHRGVGSGPYNRYIQTDAAINQGNSGGPMFDVNGNVIGINTAIWAPSGGNIGIGFAIPAEIAKPVIDTLRSGKKVRHGYLGIAIQVLTDDIAAGLGLPKDHGEIVVRVEPGGPGFKAGIRQGDVLVKVNNIDVTPDNTLSYLVASQPVGAKVPIEVIRNGKHMTLYAVLAERPPEDQLASNGVPDNDDSDDDSNQNTPRNSARTALGITLEPVTPEVANRLNIPQNSHGLWISNVDQSSDAAEKGLRRGDVILSMNEHPVTSIGDAVAAINATKAAGRNTVLVLVQRGNNPPLFTGLKLMSPTKNK

SEQ ID NO: 40166 - protein, 247 aa, Pilophorus cereolus
  misc_feature (2)..(2): Xaa can be any naturally occurring amino acid
  misc_feature (35)..(35): Xaa can be any naturally occurring amino acid
  misc_feature (231)..(231): Xaa can be any naturally occurring amino acid
  misc_feature (239)..(239): Xaa can be any naturally occurring amino acid
  unsure (1)..(247): unsure at all Xaa locations
AXNDPFIEPHYAAYMLKYDSQHGQFKGTIEVEGSXLIVNGQKVKFYTEKDPANIPWKDTGAYYIVESTGVFTTTDKAKAHLKGGAKKVVISAPSADAPMFVMGVNEKTYKSDIEVISNASCTTNCLAPLAKVIHDNYTIIEGLMTTIHSYTATQKTVDGPSAKDWRGGRTAAQNIIPSSTGAAKAVGKVIPSLNGKLTGMSMRVPTSNVSVVDLTCRIEKSVSYDEIKEAXKKASSGEXKGIMAYSE

SEQ ID NO: 40167 - protein, 474 aa, Propionibacterium acnes KPA171202
MDGELKRGLSSRHMNMIAIGGAIGTGLFVASGATISQAGPGGALVAYFAMGLMVFLLMQSLGEMSSYLPVPGAFETYATRFVSPSFGFALGWNYWFNWAITVAAELAAASIVMAYWWPGVPAWMWSVGFLALLFLLNVLSARAYGESEFWFAIIKVTAVIVFLVLGILMIAGVMGTSPGLSHWRRGDAPFVHGFGGILTVFLIAGFSFQGTELIGIAAGESKDPRMTIPKATRQIFWRIMIFYIGAIAVIGLLLPYTDPHLLAGEVTDVAVSPFTLVLKRAGVAAAAAVMNAVILTSVLSAGNSGLYASTRMLYALAREGKAPRILGRTSRRGVPVPALIVTTLVGAACFATSLVGSGQAYTWLVNISGLCGFIAWIGIAICHIQFRRAFQAQGHDLSELPYRARWYPAGPIVAGVLCVIVTLGQGRDAVLSGDVTDMIVAYISIPVFLALWVGHKIVTKAPHADLSTADLHHD

SEQ ID NO: 40168 - protein, 596 aa, Xylella fastidiosa 9a5c
MSAYTITEHKYDMVVVGAGGAGLRATFGLAQKGLQTVCLTKVFPTRSHTVAAQGGISAALGNMGEDDWRYHFYDTIKGSDWLGDQDAIEYMCREAIPAVIELEHYGVPFSRTAQGKIYQRPFGGMTTRYGEGPRAERTCAAADRTGHAMLHTLYQQALAHDARFMIEYFALDLIFDNEGVCCGVLALDMAEGSLHLFRAHGVVLATGGYGRTYFSATSAHTCTGDGGGLVMRAGLPMQDMEFVQFHPTGIYGAGCLITEGVRGEGGILRNSNGERFMERYAPHYKDLASRDVVSRSMIIEIREGRGVGEHKDHILLDLTHLGPSMIQEKLPGIAESARIFAGVDVTKQPIPVLPTVHYNMGGIPTNYHGEVVRKIGNDPDAVVPGLYAVGEAACVSVHGANRLGSNSLLDLVVFGRAVANRCAETIKPNQPHKVLPSDSCDKALGLLDKLRHADGSTPTAVIRDRMQRTMQSDASVFRTSKTLQEGCEKMNEIFALFDDVKVSDRSLVWNSDLIETYELHNLLLNALATINSAEQRKESRGAHAHEDYPDRDDENWLKHTLVSVDEKGTCSFDYRPVHMYTLSKDVDVIPPKPRVY

SEQ ID NO: 40169 - protein, 488 aa, Chlorobium tepidum TLS
MARRNFKVLYVSGESSPFVRVSSLADYMASFPQALEEEGFEARIMMPKYGIINDRKFRLHDVLRLSDIEVPLKDKTDMLHIKVTALPSSKIQTYFLYNEKYFKRYGLFSDISLGGDHKGSAERIIFFSVGVMETLVRLGWQPDIIHCHDWHAGLVALLAKTRYAKHDFFKKVKVVQTIHNVYRQGVFPSKAFQKHLDPEVCDALDMEGGEVNLLATGIKHADLVTTTSDRYARQLLDDPELSFGMDKALKACGDRFHGILNGMDTRQWNPSSDKLIKKRYSAEQPEMKLEDKKVLLEEVGLPFSEETPVVGVIGSFDQYQGAEIVKASLAKLLELDIQLIVFGSGDKEFDQALKETAEENEEKMAFRPEFTDAFYHQMIAGLDILLMTSRIEACGMMQMFAMNYGTVPVAYAGGGIVDTIEEVSGDKGTGFIFTDYTPEALTAKLQEALALFANRERWSALMLECMGRDFSWSTSAGQYAELYRNLLG

SEQ ID NO: 40170 - protein, 554 aa, Bacteroides fragilis YCH46
MEQEQRFIGYIEQSIINNWDANALTDYKGITLQYKDVARKIAKFHIILEMAGIQPGDKIAVCGRNSAHWAVTFLATVTYGAVIVPILHEFKADNIHNIVNHSEAKLLFVGDQVWENLNEDRMPLLEGISSLTDFTPLVSRNDKLTYAHEHRNEIYGQRYPKNFRPEHISYRKDMPEELAVINYTSGTTGYSKGVMLPYRSLWSNIAYCHEMLPVKPGDHIVSMLPMGHVFGMVYDFLYGFSAGAHLYFLTRMPSPKIIAQSFAEIKPRVIACVPLIVEKIIKKDILPKLDNKIGKLLLRVPIVNDKIKAAARQAAMEIFGGNFDEIIIGGAPFNAEVEAFLKQIGFPYTIAYGMTECGPIICSSRWETLKQASCGKATSRMEVKIDSPDPENIAGEIICKGTNLMLGYYKNTEATSQIIDVNGWLHTGDLATMDSEGYVTVRGRSKNMLLTSSGQNIYPEEIESKFNNMPYVSESLVLLQKDKLVALIYPDFDDAFAHGLLQSDIEKIMETNRIELNQQLPAYCQITKIKIHFEEFEKTAKKSIKRFMYQEAKG

SEQ ID NO: 40171 - protein, 168 aa, Medicago sativa
MGLSMNNPPSTITPRHYNIHKLFLFCNYVLLGAASSCIFLTLSLRLVPSVCGFFLILLHVFTIAGAVSGCAAVGANRWYSAHMVATVLTAIFQGSVSVLVFTRTSDFLGELQSYVREEDASVILKLSGGLAILIFCLEWVVLTLAFFLKYYACVEGGNTCRTVVLGKC

SEQ ID NO: 40172 - protein, 395 aa, Bacteroides fragilis YCH46
MDSNHLSPLRKGVVGVQFLFVAFGATVLVPLLVGLDPSTALFTAGIGTLLFHLVTKGKVPIFLGSSFAFIAPIIKATELYGLAGTLSGMVGVAMVYFVMSALVKWQGIRLIERLFPPVVIGPVIILIGLSLAGTGVNMAKENWTLALLSLFTAVIVSIRAKGLLKLIPIFCGIIVGYIAALIFYDVDMSGVRNAAWLGFPQFVFPQFSWEPILFMMPVAIAPVIEHIGDVYVVNTVTGKDYVKDPGLHRTLLGDGLACLCAGLLGGPPVTTYSEVTGAMSLTKVTNPQVIRIAAITAILFSVIGKVSALLKSIPSAVLGGIMLLLFGTIACAGIANLVNNCIDLSRTRNIIIVSLTLTIGIGGAVLAWGEFSLSGIGLAALVGVGLNLVLPREER

SEQ ID NO: 40173 - protein, 266 aa, Tripsacum dactyloides
ASADPSTDSAREPKRMRTGGGSTSSSSSSSSSMDGGRTRSSVVEAAPPATQASAAANGPAVPVVVVDTQEAGIRLVHALLACAEAVQQENFSAAEVLVKQIPMLASSQGGAMRKVAAYFGEALARRVYRFRPPPDSSLLDAAFADLLHAHFYESCPYLKFAHFTANQAILEAFAGCRRVHVADFGIKQGMQWPALLQALALRPGGPPSFRLTGVGPPQPDETDALQQVGWKLAQFAHTIRVDFQYRGLVAATLADLEPFMLQPEGD

SEQ ID NO: 40174 - protein, 347 aa, Thermoplasma volcanium GSS1
MSKMAALITQEIGSFRKPEYLSMEFHKIEGTEKFKELAERATIDTLKIFENTGLDNVGIGGEMYRWEMYEHPAERIKGLIFYGMVRSFDNRYYRKGSVIDKIERRGSFHMDEVEFVAKSTKKPIKIPITGPYTMMDWSFNDHYNDRHELAMEFARIINEELKEIQSKWPYISNGRKLEIQIDEPATTTHPDEMDIVVDSVNKSIEGIDAELSLHVCYSRDYRLLYDRIPELNIDGYNLEYSNRDTTDLGVEDAKRPGFQDIKYFNEVNESLQRKKFIGVGVTDVHIDFIEPVKLIEDRIKYVLNIIKDPELVKLNPDCGLRTRSRSIGEQKLRNMVIAKNNVLKDIS

SEQ ID NO: 40175 - protein, 415 aa, Prochlorococcus marinus str. NATL2A
MMEKLHRVVITGLGAITPIGNDLESYLKGLQSGQNGVDQITLFDASSHACRFAAEVKSFDPTGKLEPKESKRWDRFSKFGVIAAKEALNHSGLIIDNSNSGRIGVIIGSGVGGLLTMETQAHVLENKGASRVSPFTVPMMIPNMATGLAAIALGAKGPSSAVSTACAAGSNAIGDAFRLLQLGKADAMVCGGAEASITPLGVAGFASAKALSFRNDDPSTASRPFDSQRDGFVIGEGAGVLILETLDHALKRDATIHAEIIGYGTTCDAHHITSPTPGGVGGAEAMKLALIDGQINPEEVDYINAHGTSTPANDSNETSAIKAALGNHAYQVPTSSTKSMTGHLLGGSGGIEAVACALAIKHEIIPPTINYSNPDPNCDLDYVPNKAREKKLGVVLSNSFGFGGHNVCLAFRQMI

SEQ ID NO: 40176 - protein, 670 aa, Prochlorococcus marinus str. NATL2A
MVALTTSLDTLCVNSIRMLAVDAINKSKSGHPGLPMGCAPMGYALWDKHLRHNPKNPKWFNRDRFVLSAGHGCMLLYALLHLTGYDSVTIEDIKEFRQWGAKTPGHPETFETPGVEVTAGPLGAGISNAVGLAIAEAHLGAKFNKPDSTVVDHYTYVIMGDGCNQEGISSEACSLAGHLKLGKLIALYDDNHITIDGRTDVSFTEDVLKRYEAYGWHVQEISEGNTDVEGISQAIEKAKSVTDKPSIIKVTTTIGYGSPNKSDTAGIHGAPLGEEEAELTRKQLGWSYKPFEVPQDAYDQYRQAIQKGAQLEEEWNQSLATYKEKYPNEASQFERMLRGELPEGWDKDLPTYTSDDQGVATRKHSQICLGALGPNIPELIGGSADLTHSNYTDIKGETGSFQYESPEKRYLHFGVREHAMAAILNGIAYHDSGLIPYGGTFLVFADYMRGSMRLSALSELGVIYVLTHDSIGVGEDGPTHQPIETIPSLRAMPNMMVFRPGDGNETSGAYKVAIKNRKRPSSLCLSRQGMANQQNSSVDKVALGGYVLEECDGTPELILIGTGTELDLCVQAAKKLTKEGRKVRVVSMPCVELFEEQSDSYKEEVLPSNIRKRLVVEAAESFGWHKYIGLDGDSVTMNSFGASAPGGLCMEKFGFTVENVLEKSRSLLNK

SEQ ID NO: 40177 - protein, 155 aa, Cryptococcus neoformans var. neoformans JEC21
MSEHTNLKSLAPLGNQPEPSANSAGVGPSKPFTEAQVEEFREQDRWLPIANVARIMKSSLPTSAKVSKEAKECVQECVSEFISFITSEAAEKCLNEKRKTLNGEDILTSMRALGFDNYEGVLRVYLAKYRDVTRTGEATSWRHHFDQRPCRGDKV

SEQ ID NO: 40178 - protein, 394 aa, Prochlorococcus marinus str. NATL2A
MKDLGKKIDVLTKDILPDLIQLRRHLHAHPELSGQEYQTAALVAGELRKSGWDVKEAVGKTGVVAEMGNKSGPVVGLRVDMDALPIEERTGLEYSSSIQGLMHACGHDLHTCIGLGVAKVLAKNKFTNSRIRIIFQPAEEIAQGANWMRAEKVLEGVQALFGVHVYPDLSVGKIGIRTGTFTAAAAELEIEIIGDGGHGARPHEGIDSIWISAKVISGLQEAISRRLDALKPVVISFGKISGGSAFNVIAERVKLLGTVRCLDNNLYEKLPQWIEKIVQNIASTYGGKANIKFKSIAPPVYNDPELTSLLSTCAKNFMDEENIVYLENPSLGAEDFAFFLQDVSGTMFRLGVAGNKGCAPLHSGNFSLDERSLELGIKILSQTLVMASKTLQNI

SEQ ID NO: 40179 - protein, 231 aa, Arabidopsis thaliana
  misc_feature (91)..(91): Xaa can be any naturally occurring amino acid
  misc_feature (134)..(134): Xaa can be any naturally occurring amino acid
  unsure (1)..(231): unsure at all Xaa locations
MQIFVKTLTGKTITLEVESSDTIDNVKAKIQDKEGIPPDQQRLIFAGKQLEDGRTLADYNIQKESTLHLVLRLRGGMQIFVKTLTGKTITXLEVESSDTIDNVKAKIQDKEGIPPDQQRLIFAGKQLEDGRTLXADYNIQKESTLHLVLRLRGGMQIFVKTLTGKTITLEVESSDTIDNVKAKIQDKEGIPPDQQRLIFAGKQLEDGRTLADYNIQKESTLHLVLRLRGGF

SEQ ID NO: 40180 - protein, 328 aa, Campylobacter lari RM2100
MKILITGGAGYIGSHTLKQFLETNHEICVLDNLSKGSKKSLDELSKIRPFKFFEQDLSDYAGIKKLFKEEKFDAIVHFAASIEVPESMENPLKYYMNNTANTSNLIQTCLETGVKKFIFSSTAATYGEPQTPIVDEQSPLAPINPYGQSKLMSEKVLQDANMANPEFKYCILRYFNVAGACMSYPIGQRYPKATLLIKVAAEVATGKREKLYIFGDDYNTKDGTCIRDFIHVDDISSAHLAALEYLENNESNIFNVGYGHGFSVKEVIETMKKVSGVDFTVELAPKRAGDPSVLISNADKIKTLTNWKPKYDNLELICKSAYEWEKQC

SEQ ID NO: 40181 - protein, 449 aa, Bacteroides fragilis NCTC 9343
MRYDIAIIGGGPAGYTAAERAGANGLRAVLFEKKAMGGVCLNEGCIPTKALLYSAKVLDGIKSAPKYGVSVEGAPAFDMEKIIGRKNKTVQKLTGGVRMTVNSYGVTIVDKEAVIEGEGEEGFHIRCDGEVYEATYLLVCTGSDTVIPPIKGLSDVDYWTSREALDSTVLPSSLAIIGGGVIGMEFASFFNSMGVRVKVIEMMPEILGAMDKETSAMLRADYTKKGVNFYLNTKVTEVSDKGVTVEKDGKSSFIDADRILVSVGRKANITQVGLDKLNIELHRNGVVVDEHMLTSHPRVYACGDITGFSLLAHTAIREAEVAINHILGIDDRMDYDCVPGVVYTNPELAGVGKTEEELIAKGIYYRIQKLPMVYSGRFVAENELGNGLCKLIIDHNDRIVGCHMLGNPASEIIVVAGIAIQRGYTVDEFRKSVFPHPTVGEIYHETLFA

SEQ ID NO: 40182 - protein, 460 aa, Zea mays
  misc_feature (229)..(229): Xaa can be any naturally occurring amino acid
  unsure (1)..(460): unsure at all Xaa locations
MATAAAFSVSSPAASAVAARSKVFGGGVNQARTRTGCRVGITRKNFGRVMMALAVDVSRFEGVPMAPPDPILGVSEAFKADKSELKLNLGVGAYRTEELQPYVLNVVKKAENLMLEKGENKEYLPIEGLAAFNKATAELLLGADNPVINQGLVATLQSLSGTGSLRLAAAFIQRYFPEAKVLISSPTWGNHKNIFNDARVPWSEYRYYDPKTVGLDFEGMIADIEAAPXGSFVLLHGCAHNPTGIDPTPEQWEKIADVIQEKKHMPFFDVAYQGFASGSLDEDAFSVRLFVKRGMEVFVAQSYSKNLGLYSERVGAINVVCSAPEVADRVKSQLKRLARPMYSNPPIHGAKIVANVVGDPIMFGEWKQEMELMAGRIKNVRQKLYDSLSAKDKSGKDWSFILRQIGMFSYTGLNKAQSDNMTDKWHIYMTKDGRISLAGLSLAKCDYLADAIIDSFHNVN

SEQ ID NO: 40183 - protein, 293 aa, Pseudomonas syringae pv. syringae B728a
MNSDDAFRVTFHTQQVGDVNVFYREVGPRDAPVLLLLHGFPSSSHMFRDLMPLLASQYRLIAPDLPGFGNTKAPPRGQFDYTFENLYTVIEGFTEALGLKKYALYLFDYGAPTGLRLAAANPEKVTAIISQNGNAYLEGFSDQWGPWQAYWREPSAANREACRASLSPQVIRDWQYGTGADPEKLSPDGYNLDILYMARPGAEEIQLDLILDYRSNVAAYPSFQEYLRKYQPPLLAVWGKHDPAFIPPGAHAYRKDVPAAEVHLLDAGHFALETHAPEVAEYIRDFLSRTLKG

SEQ ID NO: 40184 - protein, 162 aa, Clostridium acetobutylicum ATCC 824
MKKIIFAGGCFWGVEAYFNTIDGVLNTKVGYANGNTEDPTYEDVCTDSTGYAEACYIEYDEKQLKLEKLIDAYWKVVDPTLKNRQGHDEGTQYRTGIYYVDEEDLKVILESKDKEQEKYDAPIVTEILPLKNFYDAEEYHQKYLDKNPNGYCHIPKELLKKH

SEQ ID NO: 40185 - protein, 299 aa, Glycine max
  misc_feature (113)..(113): Xaa can be any naturally occurring amino acid
  misc_feature (146)..(146): Xaa can be any naturally occurring amino acid
  unsure (1)..(299): unsure at all Xaa locations
MHASSKMGEKYKPWIIFLHLLVITCSCNRSCRARGLIETEDKFFKATSNDHHETEHAHAHSHVDHIDPSVMVFFTIEDLKVGKTMPIHFPKRDPATSPKLWPREEADSLPFSXTNSQTLLKIFSVSQNSPQARPWKIPLRECETKXIKGEVKFCATSLESMLDFTQSILGFTSDLKVLSTSHQTKSSVTFQNYTMLENIIEIPASKMVACHTMPYPYTVFYCHSQESENKIYRVPLAGENGDRVDAMVVCHMDTSQWGHGHVSFQVLKVKPGTTSVCHFFPADHLIWVPKLQPQGFATM

SEQ ID NO: 40186 - protein, 122 aa, Hordeum marinum
DIEETLKRLVFDMKKSPAEVFDALKNQTVDLVLTAHPTQSVRRSLLQKHSRIRNCLVQLYSKDITPDDKQELDEALQREIQAAFRTDEIRRTQPTPQDEMRAGMSYFHETIWKGVPKFLRRV

SEQ ID NO: 40187 - protein, 678 aa, Bacteroides fragilis NCTC 9343
MKKYDIKTTDEQTLRKWYHLMTLGRALDEKAPAYLLQSLGWSYHAPYAGHDGIQLAIGQVFTLGEDYLFPYYRDMLTVLSAGMTPEELILNGISKATDPGSAGRHMSNHFAKPEWHIENISSATGTHDLHAAGVGRAMVYYGHKGVAITSHGESATSEGFVYEAINGASNERLPVIFVFQDNGYGISVPKKDQTANRKVADNFSGFKNLRIIHCNGKDVFDSMNAMTEAREFAIANRTPVIVHANCVRIGSHSNSDKHTLYRDENELAYVKEADPLMKFRRMLLRYKRLTEEDLQQIEAAAKKELAAANRKALAAPDPIPESIYDFVLPEPYIPQKYKDGLPGPVEGEKSFMVNAINETLKEEFRRNPDTFIWGQDVANKDKGGVFNVTKGMQQEFGDARVFSAPIAEDYIVGTANGMCRFDPKIHVVIEGAEFADYFWPAVEQYVECTHEYWRSNGKFTPNITLRLASGGYIGGGLYHSQNLEGALTTLPGARIVCPSFADDAAGLLRTSMRSKGFTLYLEPKALYNSVEAAAVVPEEFEVPFGKARIRREGTDLTIITYGNTTHFCLDVAERLAREGVGSVEVIDLRSLIPLDKEAIFASVRKTGKVMVVHEDKVFSGFGAEIAAQIAGEMFRYLDAPVQRVGSTFTPVGFNPILERAILPNDEKIYKAAKELLEF

SEQ ID NO: 40188 - protein, 337 aa, Clostridium acetobutylicum ATCC 824
MEELKVYYDEDADLNYLKDKKIAIIGFGSQGHAHALNLKESGLNVIVGLYDGSKSWKVAEDYGFEVYEVADAVKQAQVVMILLPDEKQKQIYEASIKDNLDEGDALFFAHGFNIHYNQIVPPKNVDVLMIAPKGPGHIVRRQYTEGGGVPCLYAVHQDYTGKGKEIALAYGKGIGGTKGGVMNTTFKIETETDLFGEQAVLCGGICALINAGYDTLREAGYSAENAYFECFHEMKMIVDLMYEGGMAKMRYSISDTAEYGDYVVGNRLINDNVRAEMKKVLTEIQDGTFAKNWLLENQTGRPAFNARRRIEADREIEKVGKRLRGMMSWINENPSNE

SEQ ID NO: 40189 - protein, 87 aa, Pyrus pyrifolia
MEPSMRLISAAFVLILLLATTEMGPMGVEAKSKSSKEVEKRTCEAASGKFKGMCFSSNNCANTCAREKFDGGKCKGFRRRCMCTKKC

SEQ ID NO: 40190 - protein, 120 aa, Hordeum murinum
DIEETLKRLVFDMKKSPAEVFDALKNQTVDLVLTAHPTQSVRRSLLQKHSRIRNCLVQLYSKDITPDDKQELDEALQREIQAAFRTDEIRRTQPTPQDEMRAGMSYFHETIWKGVPKFLR

SEQ ID NO: 40191 - protein, 161 aa, Zea mays
  misc_feature (157)..(157): Xaa can be any naturally occurring amino acid
  unsure (1)..(161): unsure at all Xaa locations
MKTTHFSSSSSSDRRIGALLRHLNSGSDSDNLSSLYASPTSGGTGGSVFSHLVQAPEDPILGVTVAYNKDPSPVKLNLGVGAYRTEEGKPLVLNVVRKAEQQLINDRTRIKEYLPIVGLVEFNKLSAKLILGADSPAIRENRITTVECLSGTGSLRXPLLL

SEQ ID NO: 40192 - protein, 636 aa, Neisseria polysaccharea
MLTPTQQVGLILQHLKTRILDIYTPEQRAGIEKSEDWRQFSRRMDTHFPKLMNELDSVYGNNEALLPMLEMLLAQAWQSYSQRSASLKNIDIERENNPDWILSNKQVGGVCYVDLFAGDLKGLKDKIPYFQELGLTYLHLMPLFKCPEGKSDGGYAVSSYRDVNPALGTIDDLREVIAALHEAGISAVVDFIFNHTSNEHEWAQRCAAGDPLFDNFYYIFPDRRMPDQYDRTLREIFPDQHPGGFSQLEDGRWVWTTFNSFQWDLNYSNPWVFRAMAGEMLFLANLGVDILRMDAVAFIWKQMGTSCENLPQAHALIRAFNAVMRIAAPAVFFKSEAIVHPDQVVQYIGQDECQIGYNPLQMALLWNTLATREVNLLHQALTYRHNLPEHTSWVNYVRSHDDIGWTFADEDAAYLGISGYDHRQFLNRFFVNRFDGSFARGVPFQYNPNTGDCRVSGTSAALAGLAQNDPHAVSRIKLLYSIALSTGGLPLIYLGDEVGTPNDDGWAQDGNKSDDSRWAHRPRYNEALYAQRNDPSTAAGQIYQGLRHMIAVRQSNPRFDGGRLVTFNTNNKHIIGYIRNNALLAFGNFSEYPQTVTAHTLQAMPFKAHDLIGGKTVSLNQDLTLQPYQVMWLEIA

SEQ ID NO: 40193 - protein, 87 aa, Pyrus pyrifolia
MERSMRLVSAAFVLVLLLAATEMGPMGVEARTESSKAVEGKICEVPSTLFKGLCFSSNNCKHTCRKEQFTRGHCSVLTRACVCTKKC

SEQ ID NO: 40194 - protein, 110 aa, Hordeum vulgare
RLVFDMKKSPAEVFDALKNQTVDLVLTAHPTQSVRRSLLQKHSRIRNCLVQLYSKDITPDDKQELDEALQREIQAAFRTDEIRRTQPTPQDEMRAGMSYFHETIWKGVPK

SEQ ID NO: 40195 - protein, 828 aa, Candida glabrata CBS138
MRIINEVTHTPVQELREEIGLQTNKIKVKLQNPSDIPRVFIKKRIAGKLNPSVLNNNERIVLVSGPPDMMNSEIQDRSYLTQKYSEYKPPNNSRANVPQYFTGQNRAAEQFQRSAPIGAASEIPYQPPSHPYDHEIDLNNTLPAYYESFRGNQHGPKPSWGTDSLLSSPTEKSDEQYFNDDISETRINTSDIKSVGEDVSNRLKSLVSRLERYGIENNSGNIYGTNNQNLRYETIKIELIETIRKVKELQQELVKIFDNNTNLKYSTTGHEDSYKSTKRRRSGLVTTLNDTEIDSAPNKFEPNNLEGKGQFHSSGGAYKNSLNDYKFPPGNTANSGAFFRANGDGSINTYKARPSNIRSMSSYPLIRSPYGKILQKNTMIPAIHSRQDPYNRRVLLQPPYFHRPNLSDPSGIRPQSMHRSTLPTLPFPRNQSIDETFYQSRNLPEPSGFIPQTYLGKPLPRCTHNQYQDNVYQQINIIENRSTSNEIKSMGETKIGSSRVSNEIGPLAQRYMAKNNDDSDSYQQRALDSKPPQQNQSRDILSTEYSNFTYEGTDVVDNIDKGNGRKAYIQKRKKSVYSRDLNAKTFNLPRLGSPNLTRDTSTKISVGLQGSETEGEDSRTDISKAENPNSKKQENLVSHQDHISHVEQCADNATDKPSKNERSQYKSKVTSRENRVTKKDQSAADAKIQSKCDKSSIRTTGKVTKPSKENLTKRRQYEAKSNTTSSSSEKVTVEITLRCHHCGESDTPEWRRGPYGSRTLCNACGLFYRKLTKKFTVPYGNLYMRYRRIQAPLDRRVPLVLDVPTDIVREFDLDQNIDSNYFTIGSDT

SEQ ID NO: 40196 - protein, 636 aa, Neisseria meningitidis
MLTPTQQVGLILQYLKTRILDIYTPEQRAGIEKSEDWRQFSRRMDTHFPKLMNELDSVYGNNEALLPMLEMLLAQAWQSYSQRSASLKNIDIERENNPDWILSNKQVGGVCYVDLFAGDLKGLKDKIHYFQELGLTYLHLMPLFKCPEGKSDGGYAVSSYRDVNPALGTIGDLREVIAALHEAGISAVVDFIFNHTSNEHEWAQRCAAGDPLFDNFYYIFPDRRMPDQYDRTLREIFPDQHPGGFSQLEDGRWVWTTFNSFQWDLNYSNPWVFRAMAGEMMFLANLGVDILRMDAVAFIWKQMGTSCENLPQAHALIRAFNAVMRIAAPAVFFKSEAIVHPDQVVQYIGQDECQIGYNPLQMALLWNTLATREVNLLHQALTYRHNLPEHTAWVNYVRSHDDIGWTFADEDAAYLGISGYDHRQFLNRFFVNRFDGSFARGVPFQYNPNTGDCRVSGTSAALAGLAQNDPHAVSRIKLLYSIALSTGGLPLIYLGDEVGTPNDDGWVQDSNKSDDSRWAHRPRYNEALYAQRNDPSTAAGQIYQGLRHMIAVRQSNPRFDGGRLVTFNTNNKHIIGYIRNNALLAFGNFSEYPQTVTAHTLQAMPFKAHDLIGGKTVSLNQDLTLQPYQVMWLEIA

SEQ ID NO: 40197 - protein, 123 aa, Brassica napus
MAEENAPVEVAAPVAAPTPVLGEPMDLMTALQLVMKKSSAHDGLVKGLREAAKAIEKHAAQICVLAEDCDQPDYVKLVKALCAEHNVHLVTVPSAKTLGEWAGLCKIDSEGKARKVVGCSCVV

SEQ ID NO: 40198 - protein, 270 aa, Pycnothelia papillaria
  misc_feature (8)..(8): Xaa can be any naturally occurring amino acid
  misc_feature (161)..(161): Xaa can be any naturally occurring amino acid
  unsure (1)..(270): unsure at all Xaa locations
VEHGAVKXVAVNDPFIEPHYAAYMLKYDSQHGQFKGTIEVEGSDLIVNGQKVKFYTEKDPGAIPWKDTGAYYIVESTGVFTTTEKAKAHLKGGAKKVVISAPSADAPMFVMGVNNETYKSDVEVISNASCTTNCLAPLAKVLHDNFTIIEGLMTTIHSYTXTQKTVDGPSAKDWRGGRTAAQNIIPSSTGAAKAVGKVIPSLNGKLTGMSMRVPTSNVSVVDLTCRLEKSVTYDEVKEAIKKASNGELKGIMSYSEDDLVSTDLNGDNHS

SEQ ID NO: 40199 - protein, 174 aa, Arabidopsis thaliana
MMQPQTDVFSLHNYLNSSILQSPYPSNFPISTPFPTNGQNPYLLYGFQSPTNNPQSMSLSSNNSTSDEAEEQQTNNNIINERKQRRMISNRESARRSRMRKQRHLDELWSQVMWLRIENHQLLDKLNNLSESHDKVLQENAQLKEETFELKQVISDMQIQSPFSCFRDDIIPIE

SEQ ID NO: 40200 - protein, 250 aa, Thermosynechococcus elongatus BP-1
MYLEQLRRIAAEGGGWLDPDTYLNDQSDRVARLAVQAWLDGVDLALQRQQAIFVLARPPGHHALRERGMGFCLLANGAIAGHYALSLPGIKRVAILDWDVHHGNGTQALVQDNPQIAYCSLHEFPAYPYTGDGGDRGPYNNVLNLPMPTGANGEAYRAAFQDQVIPFLRQFNPDLLIISAGYDAHRNDPLSSIELEEGDYAWMMQQCLRITQRIVVGLEGGYDLEALGRSLVATVQATVVDDAPLELPQN

SEQ ID NO: 40201 - protein, 334 aa, Crocosphaera watsonii WH 8501
MSDSKPTILVTGGAGYIGSHAVLSLQKAGYNVIVYDNLSYGHPEIVQDVLKVELIVGDTNDRTLLDQIFSSRNITAVMHFAAFIAVGESVRDPAIYYQNNVAGTLTLLEAMIAANIKKFVFSSTCAIYGMPQEIPMTEKHPNNPLNAYASSKYMVEQILKDFDRAYGLKSVVFRYFNASGADPSGNLGEDHDPETHLIPLALLTALKKREHLFIFGTDYETPDGTAVRDYIHVNDLASAHVLGLDYLFNGGESEMFNLGNGNRFSVREVIEMAKKVTGVDFLVKETDRRPGDAPILVGSSEKAKSILGWQPQYFELKTIVNDAWQWHKKRHGYS

SEQ ID NO: 40202 - protein, 267 aa, Ramalea cochleata
  misc_feature (168)..(168): Xaa can be any naturally occurring amino acid
  misc_feature (176)..(176): Xaa can be any naturally occurring amino acid
  misc_feature (205)..(205): Xaa can be any naturally occurring amino acid
  misc_feature (214)..(235): Xaa can be any naturally occurring amino acid
  unsure (1)..(267): unsure at all Xaa locations
NDPFIEPHYAAYMLKYDSQHGQFKGTIEVEGSDLIVNGHKVKFYTEKDPAAIPWKDTGAYYVVESTGVFTTTEKAKAHLKGGAKKVVISAPSADAPMFVMGVNNKSYKSDIEIISNASCTTNCLAPLAKVMHDNFTIIEGLMTTIHSYTATQKTVDGPSAKDWRGGRXAAQNIIPXSTGAAKAVGKVIPELNGKLTGMSMRVPTXNVSVVDLTXXXXXXXXXXXXXXXXXXXXXXELKGIMSYSEDDLVSSDLNGDNHSCIFDAKAG

SEQ ID NO: 40203 - protein, 152 aa, Zea mays
MSLVRRSNVFDPFSMDLWDPFDTMFRSIVPSAVSTNSETAAFASARIDWKETPEAHVFKADLPGVKKEEVKVEVEDGNVLVISGQRSREKEDKDDKWHRVERSSGQFVRRFRLPENAKVDQVKAGLENGVLTVTVPKAEEKKPEVKAIEISG

SEQ ID NO: 40204 - protein, 278 aa, Sphaerophorus globosus
VEHGDVKVVAVNDPFIDPEYAAYMLKYDSTHGQFKGTIKVEGKDLIVNGQKVKFYTEKDPANIPWSETGAYYIVESTGVFTTTEKAKAHLKGGAKKVVISAPSADAPMFVMGVNEETYKSDIEVISNASCTTNCLAPLAKVMHDNFTIVEGLMTTIHSYTATQKTVDGPSAKDWRGGRTAAQNIIPSSTGAAKAVGKVIPSLNGKLTGMSMRVPTSNVSVVDLTCRIEKPASYALIKETIKKASEGELKGIMSYSEDDLVSSDLNGDNHSSIFDAKAG

SEQ ID NO: 40205 - protein, 307 aa, Saccharomyces cerevisiae
MTSKLKRVAVAQLCSSADLTKNLKVVKELISEAIQKKADVVFLPEASDYLSQNPLHSRYLAQKSPKFIRQLQSSITDLVRDNSRNIDVSIGVHLPPSEQDLLEGNDRVRNVLLYIDHEGKILQEYQKLHLFDVDVPNGPILKESKSVQPGKAIPDIIESPLGKLGSAICYDIRFPEFSLKLRSMGAEILCFPSAFTIKTGEAHWELLGRARAVDTQCYVLMPGQVGMHDLSDPEWEKQSHMSALEKSSRRESWGHSMVIDPWGKIIAHADPSTVGPQLILADLDRELLQEIRNKMPLWNQRRDDLFH

SEQ ID NO: 40206 - protein, 275 aa, Stereocaulon cumulatum
  misc_feature (1)..(1): Xaa can be any naturally occurring amino acid
  misc_feature (5)..(5): Xaa can be any naturally occurring amino acid
  misc_feature (13)..(13): Xaa can be any naturally occurring amino acid
  misc_feature (15)..(15): Xaa can be any naturally occurring amino acid
  misc_feature (19)..(19): Xaa can be any naturally occurring amino acid
  misc_feature (30)..(30): Xaa can be any naturally occurring amino acid
  unsure (1)..(275): unsure at all Xaa locations
XEHKXVKVVAVNXPXIEPXYAAYMLKYDSXHGQFKGTIEVEGSDLIVNGQRVKFYTEKDPANIPWKDTGAYYIVESTGVFTTTDKAKAHLKGGAKKVVISAPSADAPMYVMGVNQETYKSDVEVISNASCTTNCLAPLAKVMHDNFTIIEGLMTTIHSYTATQKTVDGPSAKDWRGGRTAAQNIIPSSTGAAKAVGKVIPSLNGKLTGMSMRVPTSNVSVVDLTCRIEKSVSYDEIKEVMKKASNGELKGIMSYSEDDLVSTDLNGDNHSCIFDA

SEQ ID NO: 40207 - protein, 339 aa, Dechloromonas aromatica RCB
MPIRVAINGFGRIGRMAFRAIAKEAEFADIAVVAINDLLEPDYLAYMLKYDSVHGNFAGDVAVDRNDLLVNGRRIRLSAERHPEQLAWGEVKADVVIEATGHFLTHDGCLKHVHAGARKVVQSAPAKDSTPMFVYGVNHETYAGEDIVSAASCTTNGLAPVAKVLHDKFGIRRGLMSTVHAATATQKTVDGPSGKDWRGGRGILENIIPSSTGAAQAVGKVIPALNKKLTGMAFRVPTSDVSVVDLTVELEKPASYADICAAMKAAAESGPLKGVLGYTGDSVVSTDFRGCRLPSIFDAGAGIALDPTFVKVVAWYDNEYGYTCNLLRLVRHISEAPTK

SEQ ID NO: 40208 - protein, 690 aa, Dechloromonas aromatica RCB
MDRNQTEITFRRELANAVRFLAIDAVNQAKSGHPGAPMGMADIAEVLWRDHLKHNPANPQWADRDRFVLSNGHGSMLLYALLHLTGYDLNIDDLKNFRQFGSRTAGHPEVGHTPGVETTTGPLGQGLTNAVGMALAEKLLAQRYNRPGCEIVDHRTWVFVGDGCLMEGISHEACSLAGVWGLDKLTCFYDDNGISIDGHVKGWFRDDTPARFRAYGWHVVGPIDGHDSVALSAAIAEAKAVTSQPTLIVCRTQIGWGSPNKAGSHDVHGAPLGADETAATRAALGWLHPPFEVPDSLRAAWNAQSTGATAEASWLARFAAYRTEYPELAAEFERTQAGGLPEKWPEIKSELLATAGRKEGAVATRKSSQNCLDWLVDRVPELLGGSADLTGSNLTAGKGSVALHEVPQGHFLRGAGERQANYISYGVREFGMTAIMNGVALHGGLIPYGGTFAVFSDYARNAIRMSALMQQRVVHVLTHDSIGLGEDGPTHQPVEHASSLRIIPGLDLWRPCDELETAIAWGAALERQNGPSTLFLSRQNLPQYGGAASRAEGASRGGYVLSEADGPLQAVIIATGSEVAIAMQAQAILKTGGVAVRVVSMPCTRRFDQQPSTWKKLVLPPEVCRVAIEAGQTDFWRKYVGLDGDVLGLDEFGASAPAPVLYEHYGLTADNLAQTVLRTIVSAGGSDGDF

SEQ ID NO: 40209 - protein, 668 aa, Saccharomyces cerevisiae
MEDKFANLSLHEKTGKSSIQLNEQTGSDNGSAVKRTSSTSSHYNNINADLHARVKAFQEQRALKRSASVGSNQSEQDKGSSQSPKHIQQIVNKPLPPLPVAGSSKVSQRMSSQVVQASSKSTLKNVLDNQETQNITDVNINIDTTKITATTIGVNTGLPATDITPSVSNTASATHKAQLLNPNRRAPRRPLSTQHPTRPNVAPHKAPAIINTPKQSLSARRAVKLPPGGMSLKMPTKTAQQPQQFAPSPSNKKHIETLSNSKVVEGKRSNPGSLINGVQSTSTSSSTEGPHDTVGTTPRTGNSNNSSNSGSSGGGGLFANFSKYVDIKSGSLNFAGKLSLSSKGIDFSNGSSSRITLDELEFLDELGHGNYGNVSKVLHKPTNVIMATKEVRLELDEAKFRQILMELEVLHKCNSPYIVDFYGAFFIEGAVYMCMEYMDGGSLDKIYDESSEIGGIDEPQLAFIANAVIHGLKELKEQHNIIHRDVKPTNILCSANQGTVKLCDFGVSGNLVASLAKTNIGCQSYMAPERIKSLNPDRATYTVQSDIWSLGLSILEMALGRYPYPPETYDNIFSQLSAIVDGPPPRLPSDKFSSDAQDFVSLCLQKIPERRPTYAALTEHPWLVKYRNQDVHMSEYITERLERRNKILRERGENGLSKNVPALHMGGL

SEQ ID NO: 40210 - protein, 418 aa, Chlorobium tepidum TLS
MAGLTKENPFDIARRQLDAAAGIIGLDAEVLELLRWPMREMHVTIPVKMDDGAVRAFHGFRVQYNDARGPNKGGIRFHPDETIDTVRALAAWMTWKTAVMDIPLGGAKGGVICNPKTMSPGELERLSRSYIRQVGRLLDLEKDVPAPDVYTTPQIMAWMADEYSFMQGHNDFGVITGKPLALGGSLGRGDATARGGIICIREAAKMLGINLRGKPAAINGFGNAGAFAHKLAVELLGMKVVAVSDSKGSIYNPDGFDHQALMEYKKQHGSVADFPGSTPLTDAGLLELDVTVLIPAALEDEISCRNARNIQAKIVAELANGPTTPEADKILHERGVYLIPDLLCNAGGVTVSYFEMVQNASGWYWEEEVVHRQLEKKMAAAIKAVHQAAVQYSVDNRTAAMIVAIRRVAEAMKLRGWV

SEQ ID NO: 40211 - protein, 549 aa, Thermoplasma volcanium GSS1
MIRNMMTGQVPILVLKEGTQREQGKNAQRNNIEAAKAIADAVRTTLGPKGMDKMLVDSIGDIIISNDGATILKEMDVEHPTAKMIVEVSKAQDTAVGDGTTTAVVLSGELLKQAETLLDQGVHPTVISNGYRLAVNEARKIIDEISVKSTDDETLRKIALTALSGKNTGLSNTFLADLVVKAVNAVAEERDGKIIVDTANIKVDKKSGGSINDTQFISGIVVDKEKVHSKMPDVVKDAKIALIDSALEIKKTEIEAKVQISDPSKIQDFLNQETSTFKEMVEKIKKSGANVVLCQKGIDDVAQHYLAKEGIYAVRRVKKSDMEKLAKATGAKIVTDLDDLTPSVLGEAEKVEERKIGDDRMTFVTGCKNPKAVSILIRGGTEHVVSEVERALNDAIRVVAITKEDGKFLWGGGAVEAELAMRLAKYANSVGGREQLAIEAFAKALEIIPRTLAENAGIDPINTLIKLKSEHEKGKISMGVDLDSNGAGDMSKKGVIDPVRVKTHALESAVEVATMILRIDDVIASKKSTPPSNQPGQGAGAPGGGMPEY

SEQ ID NO: 40212 - protein, 350 aa, Zea mays
MDVKYKPVMFPNGAAFKKAKPAAAVALAGEPLYRECLKNHAASLGGHAVDGCGEFMPSPGANPADPTSLKCAACGCHRNFHRRTLEGSPPPPAPAPLALPPPPPPPPSVLHGQTHRGGEDTPEDRHPGVVDADDPDSDSEGSEYDEERSVSPPPPPHHLLPAPVPACPGAAVAVSPAQRLAPTQLTPSSAPPHAGGAMPMPRKRFRTKFTAEQKQRMQELSERLGWRLQKRDEAIVDEWCRDIGVGKGVFKVWMHNNKHNFLGGHSARRSASSPAPAPAAASLQTPAAGAGAAAAPSFHPSRITPPPPVLTSSPTAATGFNINGAASSAPTVATDYTTDNANGASSPHSA

SEQ ID NO: 40213 - protein, 436 aa, Schizosaccharomyces pombe
TESLREAVKEFDELRQKGLQKNGEVLAMAPAFISTLPTGAETGDFLALDFGGTNLRVCWIQLLGDGKYEMKHSKSVLPRECVRNESVKPIIDFMSDHVELFIKEHFPSKFGCPEEEYLPMGFTFSYPANQVSITESYLLRWTKGLNIPEAINKDFAQFLTEGFKARNLPIRIEAVINDTVGTLVTRAYTSKESDTFMGIIFGTGTNGAYVEQMNQIPKLAGKCTGDHMLINMEWGATDFSCLHSTRYDLLLDHDTPNAGRQIFEKRVGGMYLGELSRRVLFHLIKVYNFNEGIFPPSITDAWSLETSVLSRMMVERSAENVRNVLSTFKFRFRSDEEALYLWDAAHAIGRRAARMSAVPIASLYLSTGRAGKKSDVGVDGSLVEHYPHFVDMLREALRELIGDNEKLISIGIAKDGSGIGAALCALQAVKEKKGLA

SEQ ID NO: 40214 - protein, 624 aa, Candida albicans
MRTFLSSFIILTTFLASLIAAETHTWYFKTGWVDANPDGVYPRKMIGFNDSWPLPTLRVKKGDRVQLYLINGFDNLNTTLHFHGLFVRGANQMDGPEMVTQCPIPPGETYLYNFTVTDQVGTYWYHSHTGGQYGDGMRGVFIIEDDDFPYHYDEEVVLTLSDHYHKYSGDIGPAFLTRFNPTGAEPIPQNFLFNETRNATWKVEPGKTYFVRILNVGGFVSQYLWMEDHEFTIVEIDGVYVEKNTTDLIYITVAQRYGVLITTKNSTDKNYVFMNGVDTTMLDSVPADLQVNGTNYIVYNESSALPDAYDIDSYDDALDDFYLKPLSKQKLMDDADYTITVDVQMNVLNDGINYAFFNNISYKAPKVPTLLTVLSAGEAATNELIYGTNTNSFVLQGGDIVDIVLNNFDTGKHPFHLHGHVFQLIERHEAIGSKESAVTFNVSDHAEWPEYPMIRDTVYVKPHSYMVLRFKADNPVVWFFHCHVDWHLEQGLAVVLIEDPQAIQKNEKITENHKRICEKVGVPWEGNAAANSNDYLDLKGENVQVKRLPTGFTTKGIVALVFSCVAAFLGLFSFSFYGMNDIAHVEDKVARDLDIDLEAENEDEEEAVVLNQNSSSSDSNSKPH

SEQ ID NO: 40215 - protein, 666 aa, Brassica napus
MAAAADHVVIVEEGRQATAEHPSAGPVYRCKYAKDGLLDLPADLDSPWQLFSEAVKQYPNEQMLGRRVTVDSKVGPYTWITYREAHDAALRIGSAIRSRGVNPGNCCGIYGSNCPEWIIAMEACMSQGITYVPLYDSLGVNAVEFIINHAEVSLVFVQEKALSSILACRKGCSSNLKTIVSFGEVSTTQKEEAENQCVSLFSWHEFLLMGNSDETTLPRKQKTDICTIMYTSGTTGEPKGVILSNAAIMVEVLSIDKMLQVTDRSCDTSDVFFSYLPLAHCYDQVMEIYFLSRGSSVGYWRGDIRYLMDDVHALKPTVFCGVPRVYDKLYAGVMQKISAGGLIRKKLFDFAYNYKLGNMRKGLSQEEASPRLDRLMFDKIKDALGGRAHMLLSGAAPLPRHVEEFLRIIPASNLSQGYGLTESCGGSFTTLAGVFSMVGTVGVPMPTVEARLVSVPEMGYEAFSGDVARGEICLRGNSMFSGYHKRQDLTNQVVINGWFHTGDIGEWQEDGSMKIIDRKKNIFKLSQGEYVAVENLENTYSRCPLIAQIWIYGNSFESFLVAVVVPERKAIEDWAKLNNQSSPNDFESLCQNLKAQKYFLDELNSTAKQYQLKGFEMLKAVHLEPNLFDIERDLITPTFKLKRPQLLKHYKSIIDQLYTEAKASRA

SEQ ID NO: 40216 - protein, 537 aa, Capsicum annuum
MGNACRGSFRAKTFQGSYPQNHSTSKHSKVEEEQQPDPAPLVVKDHSTSTKNMNHRSSANQSCCVLGHKTPNIRDLYALGRKLGQGQFGTTYLCTELSTCIDYACKSIAKRKLISKEDVEDVRREIQIMHHLAGHKNIVSIKGAYEDPLYVHIVMELCGGGELFDRIIQRGHYTERKAADLTKIIVGVVEACHFMHRDLKPENFLLVNKDDDFSLKAIDFGLSVFFKPGQIFTDVVGSPYYVAPEVLLKNYGPEADVWTAGVILYILLSGVPPFWAETQQGIFDAVLKGHIDFDSDPWPLISESAKDLIRKMLCMRPSERLTAHEVLCHPWICENGVAPDRALDPAVLSRLKHFSAMNKLKKMALRVIAESLSEEEIAGLKEMFKAMDTDNSGAITFDELKAGLRKYGSTLKDIEIRELMDAADVDNSGTIDYGEFIAATIHLNKLDREEHLMAAFQYFDKDGSGYITVDELQQACADHNITDVLFEDIIREVDQDTDGRIDYGEFVAMMQKGNPCIGRRTMRNSLNFSMRDAPGAH

SEQ ID NO: 40217 - protein, 231 aa, Alkaliphilus metalliredigenes QYMF
MQNKSILVVEDDPTTQRLIRHTLEQHQFQVLSAEDGAMTLDLLSNHKDIDAIILDLFLPDCNGLELLKTVRSHSIHSDIPVVILTSNDDKLDLVIALEMGADDYITKPFHKRELIARINVCLRRAQNTIRSHNTSRSISGITLDITTREVKKDDGLISLTFAEFELLLLFVTHPGKVFSRDDLLTKLWGESFVSETRVIDMHISSLRKKLDDSDNQLIETIRGVGYRLRKT

SEQ ID NO: 40218 - protein, 117 aa, Peridictyon sanctum
  misc_feature (116)..(116): Xaa can be any naturally occurring amino acid
  unsure (1)..(117): unsure at all Xaa locations
DIEETLKRLVFDMKKSPAEVFDALKNQTVDLVLTAHPTQSVRRSLLQKHSRIRNCLVQLYSKDITPDDKQELDEALQREIQAAFRTDEIRRTQPTPQDEMRAGMSYFHETIWKGVXK

SEQ ID NO: 40219 - protein, 432 aa, Enterococcus faecalis V583
MFKLLKNAFKVKDIRSKILFTVLILFVFRLGAHITVPGVNAKGLSDLSSLPFLNMLNMVSGSAMQNFSIFSMGVSPYITASIIIQLLQMDIVPRFVEWSKQGEVGRKKLNQATRYLTIVLGVAQSMGITAGFNSLSQTGIVNNPTLGTFVMIAVILTAGTMFVTWMGEQITEKGIGNGVSMIIFAGIISRLPGAVKEIYEDYFVNIESSRIWQSVIFIAILVIAILVIVTVVTFFQQAERKIPIQYTKRVSGAPTSSYLPLKVNAAGVIPVIFASSLIATPNAILQAFSSKFAGENWYDIMTKIFSYNTVPGAIIYTVLIVAFTFFYAFVQVNPEKLAENLQKQGSYIPSVRPGKGTEEYVSGVLMRLSVVGSIFLGLVALLPIIAQMVWNLPQSIGLGGTSLLIVIGVALETTKQLEGLMMKRQYVGFINK

SEQ ID NO: 40220 - protein, 436 aa, Haemophilus somnus 2336
MSNSITKNLSKHKLVKDTLVLILAGGRGSRLHELTDKRAKPALYFGGNRRIIDFALSNCINSGLNRIGVVTQYAAHSLLRHLQKGWSFLPQERGEFIDMLPARQQIDDSTWYRGTADAVYQNMAIIRDHYRPKYILILAGDHIYKQDYSQMLLDHVSSNAKCTVGCIEVPREQASEFGVMAVDENLKVKAFVEKPKDPPAIPNKPDTSLASMGIYVFDADYLYDVLMREVNTPYTSHDFGKDILPKSLEEEVLYAHPFSRSCMGRNTDGEIYWRDVGTLDSFWQSNIDLVSEHPQLDIYDQRWPIRGNPTQTYPSKFFYNKQDIKPVDNSLISGGCVITDAEISYSVLFDQVKVKADSKVEYSVVLPQVTIGKNCILRNCIIDRQVVIPDNTVIGVNIEEDRKRFRVSSTGKVILVTESMMKKLNGEKVVSEIHLD

SEQ ID NO: 40221 - protein, 145 aa, Arabidopsis thaliana
  misc_feature (10)..(10): Xaa can be any naturally occurring amino acid
  misc_feature (32)..(32): Xaa can be any naturally occurring amino acid
  misc_feature (42)..(42): Xaa can be any naturally occurring amino acid
  misc_feature (58)..(58): Xaa can be any naturally occurring amino acid
  misc_feature (96)..(96): Xaa can be any naturally occurring amino acid
  misc_feature (108)..(108): Xaa can be any naturally occurring amino acid
  misc_feature (127)..(127): Xaa can be any naturally occurring amino acid
  unsure (1)..(145): unsure at all Xaa locations
RNMINGEQEXSIVFYDSCKDAVRLSASWQVYXTYEQLVKVAXNTEPGYTMFHSRSGTXVGPGGGPTHVAIMTESSYTIHGRWQGTGYGEVIDHCFXEEHSCYKTLQRXTAASLEHGMHTAVYTEPGXRVLIDEEAIIATEQYRYV

SEQ ID NO: 40222 - protein, 366 aa, Candida glabrata CBS138
MNIEKLTGPEIVKKQVYYGHEVVNGAAKSSEPITISFPATEVVGHGSFGVVFTTVIQETNEKVAIKKVLQDKRFKNRELEIMKMLQHRNIIDLKYYFYEIDEREDVFLNLILDYMPQSLYQRLRHFVHQRTPMPRLEIKIYMYQLFKALNYLHHTANVCHRDIKPQNLLVDPNSWCLRLCDFGSAKQLKPTEPNVSYICSRYYRAPELIFGATNYTNQIDIWSSGCVMAELLLGQPMFPGESGIDQLVEIIKILGTPTKQEICVMNPNYMEHKFPQIKPIPLAKVFKKEDEVTVDFLSNTFKYDPTQRYHSLQCLCTPYFDEIRFGDGKIREIIKDLKLLEFDEQMELAHLGPDERGAVKQKLHIQ

SEQ ID NO: 40223 - protein, 120 aa, Pseudoroegneria spicata
EETLKRLVFDMKKSPAEVFDALKNQTVDLVLTAHPTQSVRRSLLQKHSRIRNCLVQLYSKDITPDDKQELDEALQREIQAAFRTDEIRRAQPTPQDEMRAGMSYFHETIWKGVPKFLRRV

SEQ ID NO: 40224 - protein, 422 aa, Clostridium acetobutylicum ATCC 824
MTNKEIFEESKEYMPGGVNSPVRAYMDLNIDPPIIKSGKDSHLFDEEGKEYIDFIEAWGPMILGHKNQKVLNEVKEVLDEGVGFGAPTSLELKLAKYICTTVDNVEMIRMVNSGTEATMSAVKLARGYTKRDKIIKFAGCYHGHFDGFLVEAGSGVLTQNIPGSPGVPKGSIENTLIAEYNNVESVEVLFNKYKDEIAAVIIEPVAGNMGVIPAKKEFLVKLRELCTENQSILIFDEVMSGFRVAYKGAQSLYGVTPDLITFAKIMGGGFPCGAYGGKKEIMKQLSPLGPVYQAGTMSGNPVVMAAGYASLRQLHENPEYYTYMDKLGSKLEAGILEISKEKGIPLVVNRCVNMMTIFFNKAKEVKSYSDAKASDTKMFARFAEHMITSGIYVPPSQFEAMFLGVKHTEEDIERFLDVMKKL

SEQ ID NO: 40225 - protein, 467 aa, Escherichia coli
MQTTQQNAPLKRTMKTRHLIMLSLGGVIGTGLFFNTGYIISTTGAAGTLLAYLIGALVVWLVMQCLGELSVAMPETGAFHVYAARYLGPATGYTVAWLYWLTWTVALGSSFTAAGFCMQYWFPQVPVWVWCVVFCAIIFGLNVISTRFFAEGEFWFSLVKVVTIIAFIILGGAAIFGFIPMQDGSPAPGLSNITAEGWFPHGGLPILMTMVAVNFAFSGTELIGIAAGETENPRKVIPVAIRTTIARLIIFFIGTVFVLAALIPMQQVGVEKSPFVLVFEKVGIPYAADIFNFVILTAILSAANSGLYASGRMLWSLSNERTLPACFARVTKNGVPLTALSVSMLGGVLALFSSVVAPDTVFVALSAISGFAVVAVWLSICASHFVFRRRHLQQGKALSELHYRAPWYPLVPVLGFVLCLVACVGLAFDPAQRIALWCGLPFVALCYGAYFLTQPRNAKQEPEHVAE

SEQ ID NO: 40226 - protein, 479 aa, Pseudomonas putida KT2440
MSKILTTASGAPVADNQNSRSAGPRGPLLLDDFHLIEKLAHFNRENIPERRVHAKGSGAYGTFTVTHDITGYTSAKLFEEVGKQTETFLRFSTVGGERGSADTERDPRGFAVKFYTEEGNWDIVGNNTPVFFIRDPLKFPDFIHTQKRHPQSNLKNAQMMWDFWSHSPEALHQVTILFSDRGIPDGYRHMHGFGSHTYSLINAKGERTWVKWHFKTQQGIKNLTPADAARLAGTDPDYAQRDLFEAIERGDYPRWTVCIQVMSEAEAASRDENPFDVTKTWSQKDYPLIEVGVLELNRNPLNYFAEVEQAAFGPSNMVPGVGLSPDRMLQGRVFAYADAHRYRVGTNHQQLPVNAPRCPVNSYQRDGSMATGSYGSAPNYEPNSYSDAPKQSPRHAEPALAMNGSADRYDHREDTDYFSHAGALFRLMNDEQKALLISNIAGTMAGVSEDVIQRQLQYFFKADPAYGEGIAKALGINLA

SEQ ID NO: 40227 - protein, 364 aa, Mentha x piperita
MEASFENGRKRSSSSSSEEESAFSFAMELAAGSVLPMVIKSAIDLNLLELIKRGGEEGASAYELAAQINAENPKAAAEMIDRILQLLAAHSVLTCRVETPPSRRRRYSLAAVCKFLTRDEDGASLAPLSLLVQDRVFMEPWYHLKDVIVEGGVAFERAYGVHAFEYHAKDPKFNKIFNQAMHNQSIIFMKRILEIYKGFEGVKSLVDVGGGTGASSKMIVSKYPLIKAINFDLPHVIQDASPHPEVEHVGGDMFVSVPKADAIFLKWICHDWSDEHCRKLLKNCYDAILGNGKVIIAESTLPEDPNSGPDTIHAIRGDVIMLTVNPGGKERTEKEFRTLALQAGFKRLVKVCAAFHTCIMECHK

SEQ ID NO: 40228 - protein, 328 aa, Bacteroides fragilis NCTC 9343
MSNKIIKWGFIGCGEVTKYKSGPAFQKVEGSKVVAVMSRDGKKAKAYAKERNIPKWYDDAQELIDDPEVNAVYIATPPSSHATYAIMSMKAGKPVYIEKPMAQTYEECARINRISQETGVPCFVAYYRRYLPYFMKVKELVDKGTIGNVINVQIRFAQPPRDLDYNRENLPWRVQADIAGGGYFYDLAPHQIDLLQEMFGCILEASGYKSNRGGLYPAEDTLSACFQFDNGLVGSGSWCFVAHDSAREDRIEIIGDKGMICFSVFTYDPIALHTERGREEIVVENPEHVQQPLIQAVVDHLLGKSTCSCDGESATTTNWVMDKILGKI

SEQ ID NO: 40229 - protein, 175 aa, Triticum aestivum
MAPTVMASSDTSVAPFQGLKSTAGLPVRRRSNGSSLGSVSNGGRIRCMQVWPIEGIKKCETLSYLPPISTEALLKQVDYLIRSKWVPCLKFSKVGFIFREHNASPGYYDGRYWTMWKLPMFGCTDATQVINEVEEVKKEYPDAYVRIIGFDNMRQVQCVRFIAFKPPGCEESGKA

SEQ ID NO: 40230 - protein, 317 aa, Bacillus halodurans C-125
MDVVTFGETMVVFEPVEMGALRYVDRFKKGVGGAESNVAIGVAKLGHSVGWVSKVGNDELGKYVISAIRGEGVDTSQVVLDDGAPTGLYLKEKLRDDFNRVYYYRAGSAASRLGVEDINWAYMKQAKIIHITGITPLLSDSCYELCHAVLDFAKENGIFASFDPNLRMKLLANVPDGKERLLALASKADLVMPGRDEAAFLFDTDELAQMFSRLLTGRTTSVVIKDGAKGAHFMEEGKEPQFVPSCPVDKVVDPVGAGDGFAAGVLASLLEGKSMEEAVSVGTQIGALVVMAKGDMEGLPEREQLEAFSQARSDVLR

SEQ ID NO: 40231 - protein, 333 aa, Oryza sativa (japonica cultivar-group)
MAMLPSLMLLTQSSGVHVLMGLLNNQPPSLLLQAEFTDSAYSVKWSPRSVAPPKAPGIFAQHSNGNKAQFTDAAYPVDWNPRSVAPPTPPAALSSLAHPGIHIQRGMLFLMKKLHPGAVLPEGTKLALPHGDHGVAAAAPRFIYKDKGDAVPFDLRAMDAILAMFGILPGSDKAAQVADTLRACSELTAAGGGGEEPRACCATSREAVLDFAASALGTSAPRAVTTLVHGREPRRYVVAADGVARIGGDAVVACHPMPYLYEVYYCHRPADAVALRVDLHAVADVGLGGATAVAVCHVNTTTWDSAYFELLKASRGDAICHYMPQGYVLWLAN

SEQ ID NO: 40232 - protein, 661 aa, Bradyrhizobium sp. BTAi1
MTQVDHSRMANAIRALAMDAVEKAKSGHPGLPMGAADVATVLFTRVLKYDAAAPAWPDRDRFVLSAGHGSMLLYALLYLTGNEEMTLDQIKRFRQVDSLTPGHPENFRTKGIETTTGPLGQGISTAVGMALAEKMLQAEYGKKIVDHHTYVLASDGDLMEGISQEAIAMAGHWKLNKLIVLWDDNGISIDGPLSIADSVDQVKRFKSAGWAAELIDGHDPEAIAAAIARAQKSSRPSLIACKTTIGYGAPTKAGTSKVHGEALGPEELKGAKEKLGISLEPFSVPDDVLAAWREAGRRGAPARAEWETRLAEMGPRKRAEFERRLRHERPAALAKALKDHKKALLETPLNIATRKSSEAAIEVIAAAMPFEFVAGSADLTGSNNNKAKSATSFSAKTPKGRFIHYGIREHGMAAAMNGIFLHGGFAPNGATFLVFSDYARGAMRLSALMGAGVVYVLTHDSIGLGEDGPTHQPVEHLAALRAIPNMRVFRPADAVETAECWELALNRTNGPTVLALTRQNLPQLRTSAPSDNPCSHGGYELVAAQGEAKVSLFATGSEVEIAVAAQKQLAERGIPARVVSVPSLELLLEQPEDAKAAIIGKAPVKIAIEAAVRWGWDAVIGSDGIFIGMHSFGESGPYKELYKHFGITAEAAVDAAVKRLG

SEQ ID NO: 40233 - protein, 200 aa, Clostridium acetobutylicum ATCC 824
MNNKKSTNVVWQETKIKRQNREKMLKQKGAVLWFTGLSGSGKSTVASALEKKLYEMGYLTYLLDGDNLRYGLNSDLGFKSEDRTENIRRVSEVAKLFADAGIITITTFISPFIEDRNNARKLLGKDFVEVYIDCPIEVCEKRDPKGIYKKARNGEIKNFTGIDSPYEKPEKPEITVETYKDTEEKCVDNIIEYLKQHKIL

SEQ ID NO: 40234 - protein, 474 aa, Oryza sativa
MVLTHVEAVEEGSEAAAAVFASRYVQDPVPRYELGERSISKDAAYQIVHDELLLDSSPRLNLASFVTTWMEPECDRLILEAINKNYADMDEYPVTTELQASNQTNQTIYPRLLHILSLHCVVVDNRCVNIIARLFNAPVGDGEKAVGVGTVGSSEAIMLAGLAFKRRWQNRRKAAGKPHDKPNIVTGANVQVCWEKFARYFEVELKEVKLTEGCYVMDPVKAVDMVDENTICVAAILGSTLTGEFEDVRRLNDLLAAKNKRTGWDTPIHVDAASGGFIAPFIYPELEWDFRLPLVKSINVSGHKYGLVYAGVGWGYKSVMKNCMESARTLREGLEKTGRFTIISKEEGVPLVAFTFKDGAGAQAFRLSSGLRRYGWIVPAYTMPAALEHMTVLRVVVREDFGRPLAERFLSHVRMALDEMDLAARAPVPRVQLTIELGPARTAGEEASIRVVKSEAVPVRKSVPLVAGKTKGVC

SEQ ID NO: 40235 - protein, 429 aa, Arabidopsis thaliana
MSFLSIVRDVRDTVGSFSRRSFDVRVSNGTTHQRSKSHGVEAHIEDLIVIKNTRWANLPAALLRDVMKKLDESESTWPARKQVVACAGVCKTWRLMCKDIVKSPEFSGKLTFPVSLKQPGPRDGIIQCYIKRDKSNMTYHLYLSLSPAILVESGKFLLSAKRSRRATYTEYVISMDADNISRSSSTYIGKLKSNFLGTKFIVYDTAPAYNSSQILSPPNRSRSFNSKKVSPKVPSGSYNIAQVTYELNLLGTRGPRRMNCIMHSIPSLALEPGGTVPSQPEFLQRSLDESFRSIGSSKIVNHSGDFTRPKEEEGKVRPLVLKTKPPRWLQPLRCWCLNFKGRVTVASVKNFQLMSAATVQPGSGSDGGALATRPSLSPQQPEQSNHDKIILHFGKVGKDMFTMDYRYPLSAFQAFAISLSTFDTKLACE

SEQ ID NO: 40236 - protein, 616 aa, Thermosynechococcus elongatus BP-1
MGSSLAYLKNEASYLLAADYPALWGDQEALHPFLRLLHHSQRYQRQVGFASLYSILNKIFDLAPPVLIGIAVDLVVKRQDSLFARWGLASFEQQLLALASLSFVIWSLESLFEYAYARSWRNLAQQIQHDLRLEAYAHIQEMDLAFFEERSSGVLLSILNDDINQLERFLDGGANEVLQVTTTVVVIGGIFFYLAPNVAIWGMLPMPFILWGSVIFQRRLAPRYRDVREKAGLLNERLANNITGIQTIKSFTAEPYELERLRWDSEAYQQSNRRAIRLSAAYVPLIRFLILFGFTGTLVLGGLAAFQGRLDVGAYSTMVYLIQRLLWPLTRLGETLDQYQRAMASTQRVLNLLETPIAIGTGDRPLDPCHVQGEVRFEAVSFAYAGRAPVLKNVTLHVPAGQTIAIVGSTGSGKSTLVKLLLRFYEVQEGRILIDGVDIREYCLRDLRRAIGWVSQDVFLFHGTVFENIAYGSPGATLADVIHAAKLAEAHDFIEQLPQGYDTVVGERGQKLSGGQRQRLAIARAILKDPPILVLDEATSAVDNETEAAIQRSLAQITAHRTTIAIAHRLSTIRHANCIYVLEGGEIVEQGNHEALLAQQGVYYGLWQVQAGILAT

SEQ ID NO: 40237 - protein, 220 aa, Zea mays
MSPSSALAQASVRSLCARGSRARQSGGNVGSRVLYTPFTSSTPLHHPLLRPSSPARPAHFSSHRPHTRTIMSKAPGKVLNIGNINPHVKAAQYAVRGELAVKSEEYRAKLAKGEGSDLPFDTVIAANIGNPQQLDQKPITFFRQVASILENPGLLEHEDVLLNSLGYKSDVVDRARKLLKEVKSVGAYSQSQGAPGIRQSVAEYIERRDGYPAQFEDIYL

SEQ ID NO: 40238 - protein, 273 aa, Stereocaulon tomentosum
VEHKDVKVVAVNDPFIEPHYAAYMLKYDSQHGQFKGTIEVEGSDLVVNGQRVKFYTEKDPANIPWKDTGAYYIVESTGVFTTTDKAKAHLKGGAKKVVISAPSADAPMYVMGVNQETYKSDVEVISNASCTTNCLAPLAKVMHDNFTIIEGLMTTIHSYTATQKTVDGPSAKDWRGGRTAAQNIIPSSTGAAKAVGKVIPSLNGKLTGMSMRVPTSNVSVVDLTCRIEKSVTYDEIKEAMKKASSGELKGIMSYSEDDLVSTDLNGDNHSCIF

SEQ ID NO: 40239 - protein, 467 aa, Rhodobacter sphaeroides 2.4.1
MTRNDATNAAGAVGAAMRDHILLPAQEMAKLGKSAQPVLTHAEGIYVHTEDGRRLIDGPAGMWCAQVGYGRREIVDAMAHQAMVLPYASPWYMATSPAARLAEKIATLTPGDLNRIFFTTGGSTAVDSALRFSEFYNNVLGRPQKKRIIVRYDGYHGSTALTAACTGRTGNWPNFDIAQDRISFLSSPNPRHAGNRSQEAFLDDLVQEFEDRIESLGPDTIAAFLAEPILASGGVIIPPAGYHARFKAICEKHDILYISDEVVTGFGRCGEWFASEKVFGVVPDIITFAKGVTSGYVPLGGLAISEAVLARISGENAKGSWFTNGYTYSNQPVACAAALANIELMEREGIVDQAREMADYFAAALASLRDLPGVAETRSVGLVGCVQCLLDPTRADGTAEDKAFTLKIDERCFELGLIVRPLGDLCVISPPLIISRAQIDEMVAIMRQAITEVSAAHGLTAKEPAAV

SEQ ID NO: 40240 - protein, 127 aa, Zea mays
MSQTVVLKVGMSCQGCVGAVNRVLGKMEGVESFDIDIKEQKVTVKGNVEPEAVFQTVSKTGKKTSYWPVEAEAEPKAEAEPKAEAVTETKTEAETKTEAETKIEAKVDAKADVEPKLAEAETKPSEV

SEQ ID NO: 40241 - protein, 105 aa, Zea mays
  misc_feature (19)..(19): Xaa can be any naturally occurring amino acid
  misc_feature (36)..(36): Xaa can be any naturally occurring amino acid
  misc_feature (90)..(90): Xaa can be any naturally occurring amino acid
  unsure (1)..(105): unsure at all Xaa locations
NFLVNLLGMWKESEYSGHXLPDAGLAYYVTGPSRLXADVLANPFHALLYVVFMLTSCALVLKTWIEATGSSATDDGKQLKEQLMVMPGHXESNLQKELNRYIPTD

SEQ ID NO: 40242 - protein, 589 aa, Colletotrichum lagenarium
MRYNLIRSAFQAGLVLASLSSAKPLRSLNTRTNDTSCGTHGPTNRACWNGDININSDYETSIPSTGQTRVYDFTITNVTDFAADGISKPAMLINGQFPGPTIEADWGDWVEINVHNQLADNGTSIHWHGMHQRNSNDQDGANGVTECPIAPGHSKTYKFQMIQYGTSWYHSHFSSQYGNGVVGAIKINGPASADYDIDLGPYTVSDWYYDTADRLERQAELVANGPPPDSDNVLFNGTNINAQGGGQYSKTKLTPGKKHLLRLINPSVDNTFTVSLVGHSFTVIATDLVPVKPVVKDSLFISVGQRYDVIIEADKDVGNYWFNATLASSGLCGTSNAKFPASIFTYEGAADELPTEQGVVPAADCVDTTGFSPVLARHAPEAEFTPNKNILDVSLEQPEIHGEKIYRWRVNGSSMDVQWDKPTLQYIAEGNDSWPHQANVVDLSGADVWTWWVIENTGALPHPIHLHGHDFLLLGIGDGKFSNSSSTNGTGPYSSVKYPSLNFANPTRRDVAQLPGNGWMVIAFRTDNPGAWLMHCHIAWHVSMGLSVQFIERKDEITSALKLETLDQTCQTWKDYAHAAFYPKYDSGL

SEQ ID NO: 40243 - protein, 327 aa, Arabidopsis thaliana
MVVMMMNFRVYLMRVNLDNNVVESSSSSSSSCIKREAKVISLGDEVDDISQVFHCDGLLLCISITQAKTRLVVWNPYWGHTRSIEPTHQFNKFDSYSYALGYDKSSKSHKILRCITCLRPHFHEFIIYDFNSNSWRVFHVTPDWQLGTINSGVSLKGNAFWVAEEKYYETSETNEEFFLLSFDFTRETFGPLLPLPFQFVESEDALSVSNVRDEQLAVLYQPWDTLMMEIWVTSKIEPNAVSWNSKVFLSVSIRKLIGPQFQFCLGSFFIDEEKKVAVVFDKGYRIQRYIAYIIGVDGSMKEVDLGESDRRCYPIVWSYVPSLVQLN

SEQ ID NO: 40244 - protein, 281 aa, Triticum aestivum
MEFDERCLKVQDPKFDCLLFDLDDTLYPLSSGISSHVKTNIEAYMVEKLGIEESKIENLGNLLYKNYGTTMAGLRAIGYNFDYDEYHSFVHGRLPYDNIKPDPVLKQILKNMRMRKLIFTNGDMIHAVRALKRLGLEDCFEGIICFETLNPPCLLTPCDQAPEIFDIAGHFAGLGSADDLPRTPVLCKPNVGAMEAALRIANVNPYKAIFFDDSVRNIQAGKRIGLHTVLVGTSQRVKGADHALESIHNIREALPELWEEAEKAEDVLYADRVAIETSVTA

SEQ ID NO: 40245 - protein, 544 aa, Synechococcus sp. CC9605
MAKRIIYNENARRALEKGIDILCEAVAVTLGPKGRNVVLEKKFGAPQIINDGVTIAKEIELEDHIENTGVALIRQAASKTNDAAGDGTTTATVLAHAMVKAGLRNVAAGANAITLKKGIDKASDFLVSKIKEMAKPIADSNAIAQVGTISAGNDEEVGKMIADAMDKVGKEGVISLEEGKSMETELEVTEGMRFDKGYISPYFATDTERMEAVLDEPYILLTDKKIGLVQDLVPVLEQIARTGKPLLIIAEDIEKEALATLVVNRLRGVLNVAAVKAPGFGDRRKAMLEDMAVLTNGQLITEDAGLKLENAKLEMLGTARRITINKDTTTIVAEGNEAAVGARCEQIKKQMDETDSTYDKEKLQERLAKLAGGVAVVKVGAATETEMKDKKLRLEDAINATKAAVEEGIVPGGGTTLAHLAPALEQWAASSLSGEELIGANIVAAALTAPLMRIAENAGANGAVVAENVKARAGAEGFNAASGEYVDMLAAGIVDPAKVTRSGLQNAASIAGMVLTTECIVADLPEKKEAAPAGGGMGGGDFDY

SEQ ID NO: 40246 - protein, 103 aa, Synechococcus sp. CC9605
MAAVSLSVSTVKPLGDRVFVKVSESEEKTAGGILLPDTAKEKPQVGEVVQVGPGKRNDDGSRQAPEVGVGDNVLYSKYAGTDIKLGSDEYVLLSEKDILAVVN

SEQ ID NO: 40247 - protein, 338 aa, Prochlorococcus marinus str. NATL2A
MRAGSVIAIGEALIDRLGPLGGDPSSDLPVTDCFGGAPANVACALSRLGAKVSFIGSLGNDAFGEDFNNLLIQRGINTSGLQQDTLRPTRVVLVRRDSDGERCFEGFEGDKGLGFADQAISLEQIIRDWPLVAENAQWLVAGTIPLASEISSKAFLWCIENAMHSGIKIALDLNWRPTFWRNQVSTGSEPSVKEKNQILSILKNVSLIKLAKEEAQWFFNSSDPTEISSSLPQRPSVVVTDGSNPILWRLNNHLGKSFAIIPSSVVDTTGAGDAFTAGLIYKLISVELDQISEQSAKDIIQFGIACGSHVCKGLGAIEPQPYLDDIDNLLSLSKGEIS

SEQ ID NO: 40248 - protein, 469 aa, Corynebacterium glutamicum
MTEHYDVVVLGAGPGGYVSAIRAAQLGKKVAVIEKQYWGGVCLNVGCIPSKSLIKNAEVAHTFTHEKKTFGINGEVTFNYEDAHKRSRGVSDKIVGGVHYLMKKNKIIEIHGLGNFKDAKTLEVTDGKDAGKTITFDDCIIATGSVVNTLRGVDFSENVVSFEEQILNPVAPKKMVIVGAGAIGMEFAYVLGNYGVDVTVIEFMDRVLPNEDAEVSKVIAKAYKKMGVKLLPGHATTAVRDNGDFVEVDYQKKGSDKTETLTVDRVMVSVGFRPRVEGFGLENTGVKLTERGAIEIDDYMRTNVDGIYAIGDVTAKLQLAHVAEAQGIVAAETIAGAETQTLGDYMMMPRATFCNPQVSSFGYTEEQAKEKWPDREIKVASLPFSANGKAVGLAETDGFAKIVADAEFGELLGAHLVGANASELINELVLAQNWDLTTEEISRSVHIHPTLSEAVKEAAHGISGHMINF

SEQ ID NO: 40249 - protein, 299 aa, Prochlorococcus marinus str. NATL2A
MKQFWNWKNYQIAWQVEETSNDSGIAIVLIHGFGACKEHWRFNQKTISSIAPCYALDLIGFGDSSKPNSQIPYEKKTYQNFNYCFDNWSQLVYDFCNEIVKKPVLLIGNSIGGVIALNTSKKLSQKALGVILIDCAQRTMDDKRLAEQSLLMRFLRPVIKTFVRQRLLSSNIFNIAAQPKFIAKILKVAYPSRNNVDEELIDTLFKPTQSKGAPEAFRGFINLFDDYLAPNLLKEMNTSVHLIWGEKDPWEPVKEAQKWFKTFECIKSLDVISDAGHCPHDEMPEKVNPILIKIIQEAI

SEQ ID NO: 40250 - protein, 201 aa, Oryza sativa
TRGDAAYSMSSYFSHGGSSTSSSASSFSAALAAATTPPLPDPSGSQFDISEFFFDDAPPAAVFNGAPTAALPDGAAANATRSAAEAVPAPAPAAVERPRTERIAFRTKSEIEILDDGYKWRKYGKKSVKNSPNPRNYYRCSTEGCNVKKRVERDKDEPSYVVTTYEGTHNHVSPSTVYYASQDAASGRFFVAGTQPPGSLN

SEQ ID NO: 40251 - protein, 216 aa, Glycine max
MSKLQSDALREAISQVVSNSKEKNRKFTETIELQIGLKNYDPQKDKRFSGSVKLPHIPRPKMKICMLGDAQHVEEAEKIGLDYMDVEALKKLNKNKKLVKKLAKKYHVFLASEAVIKQIPRLLGPGLNKAGKFPTLVTHQESLESKVNETKAMVKFQLKKVLCMGVAVGNCTMEEKQIFQNVQLSVNFLVSLLKKNWQNVRCLYLKSTMGSAIRVF

SEQ ID NO: 40252 - protein, 335 aa, Prochlorococcus marinus str. NATL2A
MTTAVEAPKTKNSSSAASARSVTDIDLVRSYLRDIGRVPLLSHEQEITLGRQVQDLVSLENLETELESDLGEKPDINFFADKAGISPIQLKKKLKSGRRAKERMVAANLRLVVSVAKKYTKRNMELLDLIQEGTIGLVRGVEKFDPTRGYKFSTYAYWWIRQGITRAIAEKSRSIRLPIHITEMLNKLKKGQRELSQELSRTPTLKELSEYVELPETDVKDLMSRAGQPVSLETKIGDGEDTILLDLLSNEIDMPSEQIESDCMKGDLETLLEQLPELQNRVLRMRYGIDGDDPMSLTGIGRVLGISRDRVRNLERDGLRGLRKTGDSVEAYMAS

SEQ ID NO: 40253 - protein, 450 aa, Yarrowia lipolytica CLIB122
MKFSILALTTLLAAVSAGKVIQLDFVRTTSSSPIRQKKITLPKGLKVDLAIPVENDLVLYSAKVQVGSPEQEFVVQVDTGSSDLWLYDSSDLCIGGGCKQYGLFNTNASSTFKDILPGKFGISYGDGSYAKGDWAEDTVTIQGVKIPKQQFGLAKNTTATPAILGIGLTGLEAAEKEYNNVPKSLYLNGDIGSYTYSLYLDDLEATQGSILFGGIDKSHFSGPLKTVPLISSYAFWVTLSRLDIKSETRNKTVNALDVPGQVLLDSGTTLTYLPTISYETILQDWGIDIDPDYGAIVPEYKLQKLQDEYLEYNLQGAKIKVSAAQLFAPAYTGDDLNTVAIYPNGQKAYGFLVAPNGNSTEGLILGDSFLRSAYVVYDLPNLQISLAQADYSGGAPQIEPIDPGLNAVPGATPVRDWGAVYSNVPISTSVNYTPTTYTLSPRPYNGSSTD

SEQ ID NO: 40254 - protein, 182 aa, Pseudomonas syringae pv. syringae B728a
MFKYIGDIVKGTGTQLRSMVMVFGHGFRKRDTLQYPEEQVYLPPRYRGRIVLTRDPDGEERCVACNLCAVACPVGCISLQKAETEDGRWYPDFFRINFSRCIFCGLCEEACPTTAIQLTPDFEMAEFKRQDLVYEKEDLLISGPGKNPDYNFYRVAGMAIGGKPKGSAQNEAEPINVKSLLP

SEQ ID NO: 40255 - protein, 158 aa, Prochlorococcus marinus str. NATL2A
MSVNISKVEVFSFKNQKITFDHYKGNVLLIVNVASKCGFTKQYKALQYLQDKYESKGFKVLGFPCNDFGNQEPGQLEEIKEFCSTTYGVNFQLFQKVHAKGKTTEPFTTLNQVSPSGDVEWNFEKFLINTEGDAVARFKSSIEPDSPEVTQAIEKLLD

SEQ ID NO: 40256 - protein, 377 aa, Enterococcus faecalis V583
MIAFRRDLHQHPELQFEEFRTTEKVAAVLDQLGITYRKTEPTGLIAEIVGGKPGRVVALRADMDALPVQELNEDLAYKSLEAGKMHACGHDSHTAMLVTVAKVLKEIQEELQGTVRLIFQPSEENAQGAKAMVAQGAMTGVDDVFGLHIWSQMPVGTASCRVGSSFASADIFSVDFKGRGGHGAMPNACIDAAVIASSFVMNLQTIVSRETDPLDPVVVTIGRMDVGTRFNVIAENARLEGTVRCFSVATRNRVEQALQRYAEQTAAIYGGTASLDYQYGTLPVINDEQDALFAQTLIKENFGEAALRQEEPTTGGEDFSYYTEHASGCFALVGSGNPEKDTEWAHHHGRFNIDEDAMAMGAELYAQYAFEYLKTHF

SEQ ID NO: 40257 - protein, 124 aa, Secale montanum subsp. montanum
DIEETLKRLVFDMKKSPAEVFDALKNQTVDLVLTAHPTQSVRRSLLQKHSRIRNCLVQLYSKDITPDDKQELDEALQREIQAAFRTDEIRRTQPTPQDEMRAGMSYFHETIWKGVPKFLRRVDT

SEQ ID NO: 40258 - protein, 203 aa, Cryptococcus neoformans var. neoformans JEC21
MATNITFHPGAVTQDERDTLLGQKGCTVWLTGLSASGKSTIATALEQHLLHKKLHAYRLDGDNIRFGLNKDLGFDQASRVENIRRIGEVSLLFALSSTISLTAFISPYISDRQLARELHEKHSPAIPFIEVFIDAPLSVVEQRDPKGLYKKARAGEIKDFTGISAPYEAPANPEIHIRTDEVDVTGAVEIITKYLADNGLIPA

SEQ ID NO: 40259 - protein, 463 aa, Bradyrhizobium japonicum USDA 110
MTPTMLPSSQQARDVAYQLHAYTNARSHQRAGPLIIERGEGPYVFDTAGKRYLDAMAGLWSAGLGFSEKRLIEAAHRQMQILPFYHTFASRSNGPSIALAEKLVKMSPVPMSKVFFTNSGSEANDTVLKLIAYRSNAAGQPQRKKVISRLRGYHGVTIGAASLTGFPDNHRSFDLPLPNIMHTGSPHFYKDSRAGESEETFATRRAEELESLIQREGADTIAAFFGEPVMGAGGVIVPPPTYWDKIQSVLKKHSILLVADEVICGFGRTGKMFGCETYNIAPDVIVVSKQLTSSYFPLSAIIMNDYMFEPIADESNKVGLLAHGFTGGGHPVGAAVALENLKLIEERGLIANVGRIGAYMQERLRTLVDHPLVGEVRGVGLIAAIELVLDKKRKVAATTPGDVGSIASRLLHERGIIVRNVDDALSICPPLIVNKDQIDELIDGITGMLHDLKATVVNCREPH

SEQ ID NO: 40260 - protein, 294 aa, Bacillus halodurans C-125
MKTPNITVVGSINMDMVTITDVVPVQGETVLGKDFRTVPGGKGANQAVAAARLGANVRMIGRVGDDPFGHVLTENLAKEGIITDSVKPVTDCTSGVATILLSDRDNRIIVTKGANEHVTPDYVAAFEQELAASDVVLLQLEIPLETVAYVLEFCAKHHVTTVLNPAPAQKLPDAAWTDATYISPNENECLQLFGDEPDANLRQKLIMTKGADGVQFYENDEQVQVESFRVEPVDTTGAGDTFNGAFAVALGGGTVKEAVRFANAAAALSVQSFGAQGGMPTKAQVQSFLQEQGG

SEQ ID NO: 40261 - protein, 121 aa, Taeniatherum caput-medusae
DIEETLKRLVFDMKKSPAEVFDALKNQTVDLVLTAHPTQSVRRSLLQKHSRIRNCLVQLYSKDITPDDKQELDEALQREIQAAFRTDEIRRTQPTPQDEMRAGMSYFHETIWKGVPKFLRR

SEQ ID NO: 40262 - protein, 119 aa, Lophopyrum elongatum
TLKRLVFDMKKSPAEVFDALKNQTVDLVLTAHPTQSVRRSLLQKHSRIRNCLVQLYSKDITPDDKQELDEALQREIQAAFRTDEIRRTQPTPQDEMRAGMSYFHETIWKGVPKFCAVLI

SEQ ID NO: 40263 - protein, 347 aa, Candida glabrata CBS138
MRPIVLMGHERPLTQVKYNREGDLLFTCSKDISASVWYSNNGERLGTLDGHMGSIWSIDSDHTSLYCVTGSADYTIKVWTLMNGQCVQTWNCPVPVKRVEFSPCGKYILAILDNVMKKPGSIEIYEVKRNPETNEITEFVEEPIHSIVTHEGLDAASVAGWSGEGKYIIAGHKDGKISKYDTQDGYKLVESQQVHKDSVSDLQFSPDRTYFITCSRDSNAHIIDIETFKVLKTYETDSPLNSAAITPLKEFVILGGGQDASEVTTTSASEGKFEARIYHKVFEEEIGRVVGHFGPLNSIAVSPQGTSYTSGGEEGLVRLHHFEKSYFDFKYDVEKAADAKEHISHEA

SEQ ID NO: 40264 - protein, 340 aa, Bradyrhizobium sp. BTAi1
MNLSALNTVALAMVTPGKGILAADESTGTIKKRFDAIAVESTAQNRRDYREMLFRSDGMTFISGVILYDETIRQNAADGTPLVKLIEQAGSIPGIKVDEGTQPLPGCPGETVTVGLDRLADRLAAYYALGARFAKWRAVIDLDKDRIPSMTAVHVNAHALGRYAALCQAAGLVPIVEPEVLMDGDHDIGRCFDVTRRVMNEVFRELRIQRVALEGMILKPNMVVSGQKCPVQAGVTEVADRTVQLLKECVPAAVPGVAFLSGGQSDAVATAHLDAINRRGPLPWMLTFSYGRALQAAPQRVWAGRTANVPAAQRAFSHRARMNALASRGQWTTERENEAA

SEQ ID NO: 40265 - protein, 669 aa, Bacteroides fragilis NCTC 9343
MNDSKLMNRAADNIRILAASMVEKANSGHPGGAMGGADFVNVLFSEFLVYDPQNPRWEGRDRFFLDPGHMSPMLYSVLAFTGKYTLDELKQFRQWGSPTPGHPEVNVDRGVENTSGPLGQGHTYAVGAAIAAKFLKARFGEVMNQTIYAYISDGGIQEEISQGAGRIAGTLGLDNLIMFYDSNDVQLSTNTEDVTTENVAMKYEAWDWKVITINGNDPDEIRKALTEAKAEKNRPTLIIGKTTMGKGARRADGSSYEADCATHGAPLGGDAYVNTIKNLGGNPENPFTIFPEVAELYAKRAEELKKIVADKYAAKAEWAKANPEKAAKLAEFFSGKAPKVNWDAIEQKAGGATRAGSATVLGALATQVENMIVSSADLSNSDKTDGFLKKTHAFKKGDFSGAFLQAGVSELSMACICIGMSLHGGIIAACGTFFVFSDYMKPALRMAALMEQPVKFIWTHDAFRVGEDGPTHEPVEQEAQVRLLEKLKNHKGHNSMLVLRPADVEETTIAWKLAMENMSTPTALILSRQNIVNLPAGTDYSQAAKGAYIIADADENPDVILVASGSEVSTLVAGAELLRKEGVKVRIVSAPSEGLFRNQSKEYQESILPAGAKIFGLTAGLPVNLEGLVGSNGKVFGLESFGFSAPYKVLDEKLGFTAENVYNQVKAML

SEQ ID NO: 40266 - protein, 261 aa, Vulpicida juniperina
VEHGDVKVVAVNDPFIEPHYAAYMLKYDSQHGQFKGTIEVKGSDLVVNGQTVKFYTEKDPANIPWKDTGAYYIVESTGVFTTTEKAKAHLKGGAKKVVISAPSADAAMFVMGVNEKEYKSDIEIISNASCTTNCLAPLAKVMHDNFTIIEGLMTTIHSYTATQKTVDGPSSKDWRGGRTAAQNIIPSSTGAAKAVGKVIPSLNGKLTGMSMRVPTSNVSVVDLTCRLEKSVTYDQIKATMKKASEGELKGIMSYSEDALVS

SEQ ID NO: 40267 - protein, 501 aa, Pediococcus pentosaceus ATCC 25745
MEVVLGVDLGTSAVKVSAVDREGKIVAQQSEAYSLNQPEPGYSEQNPEDWVTGTTAAIDRLIKVDGIKPDEITGISYSGQMHGLVLLDDHNQVLRPAILWNDTRTTEQCKEILDTMGQDFIDITRNVPLEGFTLPKLLWVKENEPELFNNVSVFLLPKDYLRYRMTGKIAMEYSDAAGTVMLDEENKTWSTKIADAFDLSQTIFPPLIESIGFAGTIGDTYAKFSGLKTTTKIYGGAADNAAGAIGAGILSSNQVLSSIGTSGVVLKYEDNADVDYKGALHFFNHAIPNKFYTMGVTLAAGYSLSWFKKTFSADQDFTEFVNAAGDSTVGANGLLFTPYIVGERTPYPDGDARGSFIGIDGTHNKADFTRAVLEGIVFSFKDIMRIFAEKGSNFDTVVSIGGGAKSPLWLQIQADVFNKKVVTLKNEQGPGLGAAMIAAVGVGWFDSLSDCAQKFVSYDQEYVPGSGNVEKYEKMYQLYKQVYGQTAEISHKLMEYRRNNL

SEQ ID NO: 40268 - protein, 554 aa, Shigella flexneri 2a str. 2457T
MCSIFGVFDIKTDAVELRKKALELSRLMRHRGPDWSGIYASDNAILAHERLSIVDVNAGAQPLYNQQKNHVLAVNGEIYNHQALRAEYGDRYQFQTGSDCEVILALYQEKGPEFLDDLQGMFAFALYDSEKDAYLIGRDHLGIIPLYMGYDEHGQLYVASEMKSLVPVCRTIKEFPAGSYLWSQDGEIRSYYHRDWFDFDAVKDNVTDKNELRQALEDSVKSHLMSDVPYGVLLSGGLDSSIISAITKKYAARRVEDQERSEAWWPQLHSFAVGLPGSPDLKAAQEVANHLGTVHHEIHFTVQEGLDAIRDVIYHIETYDVTTIRASTPMYLMSRKIKAMGIKMVLSGEGSDEVFGGYLYFHKAPNVKELHEETVRKLLALHMYDCARANKAMSAWGVEARVPFLDKKFLDVAMRINPQDKMCGNGKMEKHILRECFESYLPASVAWRQKEQFSDGVGYSWIDTLKEVAAQQVSDQQLETARFRFPYNTPTSKEAYLYREIFEELFPLPSAAECVPGGPSVACSSAKAIEWDEAFKKMDDPSGRAVGVHQSAYK

SEQ ID NO: 40269 - protein, 248 aa, Vernicia fordii
MARIAFGRFDDSFSLGSFKAYLAEFISTLLYVFAGVGSAIAYNKLTANAALDPAGLVAIAICHGFALFVAVAVGANISGGHVNPAVAFGLALGGQITILTGIFYWIAQLLGSIVACFLLKLVTGGLAIPTHSVAGRVGAIEGVVMEIIITFALVYTVYATAADPKKGSLGTIAPIAIGFIVGANILAAGPFSGGSMYPARSFGPAVVSGDFHDNWIYWVGPLIGGGLAGLIYGNLYISGDHTPLSNDF

SEQ ID NO: 40270 - protein, 364 aa, Pediococcus pentosaceus ATCC 25745
MKTLDSTPKKDGYRMPGEFEEHSGAYMLWPQRPDNWRNGGKPAQQTFAKVAEAISKFEHVTVGVNDDQYANARNMLSDDVEVIEISNDDSWIRDCGATFVKNDQGDLRAVDWTFNAWGGLVDGLYFPWDKDDRVAQKMAELEGTDRYRLDDFVLEGGSIHVDGEGTLITTEECLLSEGRNPQLSREQIEEVLKEHLNLEKIIWLKKGIYLDETNGHVDNIANFVKPGVVALAWTDDENDPQYKISKENLEILENATDAKGRKLKVVKMYVPKPVLITKAESEGVDAVDGTLPRTEGERLAASYINYYTANGGIVFPLFNDPMDEKAKATLKELYPDREVIGVPAREILLGGGNIHCITQQVPKK

SEQ ID NO: 40271 - protein, 363 aa, Pediococcus pentosaceus ATCC 25745
MKLMSTPRKDGFRLPAEFEFQNEGFMIWPQRPDNWRNGGKTVQKEFVKLITLLAKYQPMTMLVNESQYKNARASLPSNIRVLEMSSNDAFIRDTGPLYLKNKQGEIRCMKFNFNAWGGLLDGLYFPWDKDNEVASKLADLYHQDFYQDDFTLEGCSILTDGEGTLITTEEVVLSEGRNKGINKQIAEEKFKEFLGIEKVIWLPEGFFMDEAGGDIDNILNFVKPGEIVLSWTEDQSDPQYQISKNALEILSSVTDAKGRKLIIHKLDLPQNKVELSKDQAYGVDPINGMLPRVEGQRLTATYVNYITLNKVIIVPEFGDFNDKIAQKQLASYYPDRKVIGFAANEILTGGGGLHTIVLTMPGR

SEQ ID NO: 40272 - protein, 390 aa, Schizosaccharomyces pombe
KNQTHIFREMSDDSHLETKVVTDGTTGEKKTISYEPCRVLGSGSFGVVIQAKLVGTPGFIAVKRVLQDKRYKNRELQIMRAISHPNIIKLIAFFHTHNPSKDETHLCLLLEYMPETVFDDMRWYTRRRKSIPNLSIKLYAFQLFRALAYLHSTGVCHRDIKPQNLLVDYKTGILKLCDFGSAKVLVPSEPNVSYICSRYYRAPELVFGATHYTTKIDVWSAACVIAELFIGRPLFPGDSSVEQLVEIIRVLGTPSYHEISVMNPNYVNHSLPNVRPHTLESVMPHNCTKNAMDLLHKMLTYVPSKRISAIEVLTHPFFDELRDPNCMYHCSRDEGTIERHLPPLFNFNLAELSIRPNLNKAILPPHVYESLDVDINNFEPIVVKQADADS

SEQ ID NO: 40273 - protein, 178 aa, Erwinia pyrifoliae
  misc_feature (9)..(9): Xaa can be any naturally occurring amino acid
  misc_feature (29)..(29): Xaa can be any naturally occurring amino acid
  unsure (1)..(178): unsure at all Xaa locations
MATEYAIIXGGCFWCTEAVFKQINGVESXESGYIGGHTENPTYKQVCHGDTGHAEAIRIGFDPEKVSFGDLLDISFATHDPTQLNRQGNDIGTQYRSAIFPTGAQQAEEAKAAISRAQSEHSDPIVTSIEADAVWYPAEDYHQDYWAGEGQENRYCLAVIPPKLQKLRKRFAAYAVSK

SEQ ID NO: 40274 - protein, 567 aa, Chlorobium tepidum TLS
MKPFDIVIVGGGGAGLYAAMEAMKTNPGLNIAVLSKVYPNRSHTSAAQGGANAALANKAKDDTVEMHIYDTIKGSDYLADQDAVEVLCSEAPKIIRELDNMGTPWSRMDDKTIAQRPFGGAGRPRCCYCADKTGHTILQTLYEQCLRKGVFFFNEYFALALSVDGSRSRGLIAMNIKTGKVEAFPAKTVIFATGGYAKMYWNRSSNAAGNTGDGQAIAYRAGIPLKDMEFVQFHPTGLRKSGLLVTEGARGEGGYLVNALGERFMSRYAPEKMELGPRDLVSRSLETEILEGRGFDSPAGKYLHLDLRHLGADLIKSRLPQIREMCMYFEGVDPIEEPVPVRPTAHYSMGGIDTDNFGRTIMEGVYAAGECGCVSVHGANRLGGNSLLDILVFGRIAGRAAAEECGKFNPSAIPASEVAEKEHELRSFMQPRGHYERYGTLREELGHTLGANVGIFRDSSKIKQGIADIESLQERFRHVRVFDTSDIYNTNLLQVLELKNMLDLSETVAAGALAREESRGSHTRTDFPTRDDEKWHKHTIYTYENGRPKLAYKPVTMGRYELQERTY

SEQ ID NO: 40275 - protein, 274 aa, Triticum aestivum
  misc_feature (98)..(98): Xaa can be any naturally occurring amino acid
  misc_feature (129)..(129): Xaa can be any naturally occurring amino acid
  misc_feature (142)..(142): Xaa can be any naturally occurring amino acid
  misc_feature (179)..(179): Xaa can be any naturally occurring amino acid
  misc_feature (190)..(190): Xaa can be any naturally occurring amino acid
  misc_feature (202)..(202): Xaa can be any naturally occurring amino acid
  misc_feature (205)..(205): Xaa can be any naturally occurring amino acid
  unsure (1)..(274): unsure at all Xaa locations
MLQRVGSLSAGRPAGGRTSDFERPPGQVEVTDRGLLGNLLGKKKAEEDKEKQEELVTGMEKVSVEEPEVKKEEHEDGEKKETLFSKLHRSSSSSSSSXRGKRGRCFDDNGEGDPEERQKKGLKEEAQGXCPAHKDTGGGHVXTGLPAPAAPGVCADPTMTPDVVVEKIDGDVKTEPAPXAVPEEEKKGFXLEKIKEKLPGGXHRXPEDAAPVPVTHAAPAPVHAPAPAAEEVSSPDAKEKKGPLGKIMDKLPGYHKTGEEDKAAAAAGEHKPSA

SEQ ID NO: 40276 - protein, 451 aa, Coxiella burnetii RSA 493
MKKLSKIILSSIFAGLPLLLPVSSYAHLPSAVEGKTIPSLAPMLNKTTPSVVNIAVEKLIPQTPNPLQPEMDQNTAPTKVLGVGSGVIIDAKKGYIVTNAHVVKDQKIMVVTLKDGRRYRAKVIGKDEGFDLAVIQIHANHLTALPIGNSDQLKVGDFVVAVGSPFGLTQTVTSGVISALNRQEPRIDNFQSFIQTDAPINPGNSGGALIDLEGKLIGINTAIVTPSAGNIGIGFAIPSDMVKSVAEQLIKYGKVERGMLGVTAQNITPELADALNLKHNKGALVTKVVAESPAAKAGVEVQDIIESVNGIRIHSSAQLHNMLGLVRPGTKIELTVLRDHKVLPIKTEVADPKKVLLQRELPFLGGMRMQKFNDLEPDGTILQGVLVTGVDDSSDGALGGLEPGDIIISANGQLTPTVDELMKIAEGKPKELLLKVARGAGQLFLVIQQSQ

SEQ ID NO: 40277 - protein, 269 aa, Oryza sativa
MPPTGALHAGGRHLLPLRRAPGAAQQPWSHVRSHLISSSKRPSPSPSPPPPPPPPLPVAPSTSAFVQTAGRRSGGGAGAGAAVGSGVVAWYLGSIEARPVLTKSVTAAAIFTVADLSSQMITLGPEDSLDLVRTLRMASYGLLISGPSLHIWFNFVSKLLPKQDVMNTFKKMFLGQAVYGPIINSVFFSYNAGLQGETIPEIMARLKRDLIPTIKSGLIYWPLCDFITFKFIPVHLQPLVSNSFSFLWTIYITYMASLKKADVDVTTSS

SEQ ID NO: 40278 - protein, 476 aa, Zea mays
CSERTHSPVPDLRSPRRSKMQIFVKTLTGKTITLEVESSDTIDNVKAKIQDKEGIPPDQQRLIFAGKQLEDGRTLADYNIQKESTLHLVLRLRGGMQIFVKTLTGKTITLEVESSDTIDNVKAKIQDKEGIPPDQQRLIFAGKQLEDGRTLADYNIQKESTLHLVLRLRGGMQIFVKTLTGKTITLEVESSDTIDNVKAKIQDKEGIPPDQQRLIFAGKQLEDGRTLADYNIQKESTLHLVLRLRGGMQIFVKTLTGKTITLEVESSDTIDNVKAKIQDKEGIPPDQQRLIFAGKQLEDGRTLADYNIQKESTLHLVLRLRGGMQIFVKTLTGKTITLEVESSDTIDNVKAKIQDKEGIPPDQQRLIFAGKQLEDGRTLADYNIQKESTLHLVLRLRGGMQIFVKTLTGKTITLEVESSDTIDNVKAKIQDKEGIPPDQQRLIFAGKQLEDGRTLADYNIQKESTLHLVLRLRGGQ

SEQ ID NO: 40279 - protein, 216 aa, Arabidopsis thaliana
  misc_feature (13)..(13): Xaa can be any naturally occurring amino acid
  misc_feature (101)..(101): Xaa can be any naturally occurring amino acid
  misc_feature (131)..(131): Xaa can be any naturally occurring amino acid
  unsure (1)..(216): unsure at all Xaa locations
MVSLGIQKRFGAXVMKCGKGKVWLDPNESSDISMANSRQNIRKLVKDGFIIRKPTKIHSRSRARRMKIAKMKGRHSGYGKRKGTREARLPTKVLWMRRMRXVLGVLLKKYRETKKIDKHMYHDMYMRVKGXNVFKNKRVLMESIHKSKAEKAREKTLSDQFEAKRAKNKASRERKHARREERLAKGPGGDVAPVAAPAPAATPAPTAAVPKKKSNP

SEQ ID NO: 40280 - protein, 542 aa, Rhizobium sp. NGR234
MAAKEVRFHTEAREKMLRGVDILANAVKVTLGPKGRNVVLDKSFGAPRITKDGVTVAKEIELEDKFENMGAQMVREVASKTSDIAGDGTTTATVLAQAIVKEGAKAVASGMNPMDLKRGVDKAVDAVVEELRRNARKVTKNDEIAQVGTISANGDTEIGRFLAEAMEKVGNEGVITVEEAKTAVTELEVVEGMQFDRGYLSPYFVTNPDKMRVELEEPYVLIHEKKLSNLQALLPVLESVVQSGKPLLIIAEDVEGEALATLVVNKLRGGLKVAAVKAPGFGDRRKAMLEDIAILTGGTAISEDLGIKLENVTLDMLGRAKKVVVEKENTTIVDGAGSKTEIEGRVAQIKAQIEETTSDYDREKLQERLAKLAGGVAVIRVGGSTEVEVKERKDRVDDAMHATRAAVEEGVLPGGGVALLRAVKALDRVQTENPDQRHGIEIVRRAIEAPVRQIAENAGAEGSIIVGKLREKTEFGYGWNAQTNEFGDLFEQGVIDPVKVVRTALQDAASVAGLLITTEAMVAEKPKKEAPVPPMPPGGMDF

SEQ ID NO: 40281 - protein, 104 aa, Rhizobium sp. NGR234
MTFRPLHDRILVRRIEAEEKTAGGIIIPDTAKEKPQEGEVIAVGPGARDDGGKLVELDVKAGDRILFGKWSGTEIKLNGEDLLIMKESDVMGVIESEASAKKVA

SEQ ID NO: 40282 - protein, 597 aa, Shewanella sp. ANA-3
MSLEQYHVIRLLQQQSQSLKEAIALEGFEMAAPWHQVSWQAFDQISHKIAQVLIELGVQVQDRCVILSQNCPQWTCADIGTLKSRAVVVPIYPTSTLEQASFIINDAAAKVIFVDDAKQYALACELQKQCPTLEHVIVFDASVELAQDKAQHQHLDSLLAKEYGQSAELEQRLKDANLDDLLTLIYTSGTTGDPKGVMLDYRNMASTVRQHDQILPFTTGDVSLAFLPLSHVFERGWSFYVLCRGGHNVYLQNTQRVKEAISAVRPHTLCVVPRFLEKVYSAVQDKVAKSAEGRKKLFAWAMGVGERQFEVSQGRAKGGLWLSLQWRLAHKLVYSKLQAVLGGRLKFMPCGGAALDLNVASFFHAIGIPVLCGYGMTETNATVTCNTLDNRVAGSNGKVLPEIEVKLGKDDEILVRGDTVMRGYYNRPEDTAAAFEDGWLKTGDAGRLDANGNLFITDRIKELMKTSNGKYIAPQRVEGTVGRCPFIEQVAVIADARNYVTALIVPAFESLEAWAKDKGLKYESPIELLRHSHVVEHFEQRLKHLQQELAGFEQIKKFTLLPEAFSMEAGLITPTLKLRRKMIYHKYAHEINAMYNN

SEQ ID NO: 40283 - protein, 342 aa, Nocardioides sp. JS614
MAEMFYDDDADLSLIQGKNVAVIGYGSQGHAHALSLRDSGVDVRVGLQPDSKSRAKAEAEGLRVLTPAEAAEEADVIVILAPDQHQRKLYAEEIEPNITEGDTLVFGHGFNIRFGYITPPEGVNVFMVAPKGPGHLVRREYVDGRGVPVLVAVEKDPSGGTWDLALSYAKAIGGLRAGGIKTTFTEETETDLFGEQAVLCGGASQLVMYGFEVLTEAGYQPEVAYFECLHELKLIVDLMYEGGIAKQRWSVSDTAEYGDYVSGPRVITPEVKRNMEGVLADIKNGSFAKRFIDDMDAGSPEFNELRKKGEQHPIEQTGRELRKLMAWVKSHDSDYTEGTATR

SEQ ID NO: 40284 - protein, 349 aa, Triticum aestivum
MSMAQVCCDSASSAVVVGAEAEARARARAGRRRRAGDAAARWKVTAEAPQGAEEAAATRKRRAAGGEGVPAKRHGFTSVAGRRREMEDAVSIREAFTVPAEEGKPRRDFYGVFDGHGCSHVADACRDRMHELVAEELAGAAQPESWTGAMERSFARMDAEVTASGGGDSASCRCEANKCDHVGSTAVVAVVGEQRVLVANCGDSRAVLCRDGAPVVLSSDHKPDRPDELERIEAAGGRVIFWEGARVLGVLAMSRAIGDGYLKPFVTAVPEVTVTDRAAGDECLILASDGLWDVVNNETACEVARACLRRGRDRWCAEAAAMLTKLALTKNSSDNISVVVVDLRPRNHL

SEQ ID NO: 40285 - protein, 619 aa, Bradyrhizobium sp. BTAi1
MSAVERLDERQSVVPPGQDPVGDAAAAVEALIEPTTPVRRSKLRPLLALAPYIARYRGRALLALISLTIAALTTLLVPVAVRRMIDFGFTPKGIELINSYFSVMIAVVAVLALASAARYYLVMTIGERIVADIRRDVFAHLMSLSPSFFDSARSGELVSRLTVDTTQIKSAAGASVSIALRNLLLFVGATGMMVFTSPKLSGFVLLAIPLIVMPLVAFGRWVRRLSRNAQDTLADASAYASELVGAIRTVQAYTSEKLAAGRFGGEVEQAYEAARVSTQARGVLTAIIIFIVFSSVVAILWVGSHDVLTGNISAGRLGQFVLYAAFAAAGLGQLSEVWGEVSAASGAAERLFELLHVQPDIKAPAHPAALPEPARGDISFDRVSFAYPSRRDVRVLEDVSFAIRAGEKVAIVGPSGAGKSTLFHLLLRFYDPASGAISVDGVPVRAADPRKVRERIALVPQESVVFAASARENIRFGRPEASDAEVERAADLAHASEFIRRLPEGFDTPLGERGVTLSGGQRQRIAIARAILRDAPLLLLDEATSALDAESETLVQTALEGLMKDRTTLVIAHRLATVLSCDRILVMDRGRIVEQGTHSSLVAANGLYARLARLQFEGV

SEQ ID NO: 40286 - protein, 235 aa, Brassica napus
MKIQCDVCENAPATVICCADEAALCPKCDVEIHAANKLASKHQRLHLNSLSTKFPRCDICQEKAAFIFCVEDRALLCRDCDESIHVANSRSANHQRFLATGIKVALSSSSCSKETDKNHQSEPSNNQQKAKEIPSQQQPSSASPLPWAVDDFFHFSDPEFTDKQKGQLDLGELEWFSDMGFFSDQINQETLPAAQVPELSVAHLGHVHSYRPMKVSVSYKKPRLEIRVDDEDDDM

SEQ ID NO: 40287 - protein, 686 aa, Dryopteris filix-mas
TPSEFQVQDLAEWLLGSSEEIASSGVTCTDSLAEAGYPGATALGDAVCGMAAARITPNSDFLFWFRSHTAKEVFWGGAEHDPQARDDDSRLLPRSSFKAFLEIVKRRSLPWEEVEVDAIRSLQLILREDLEEFCAAAAGADVEDVDSLVPLSIKLSLKESEEMGGAEDSKKLERATSAAAGGTGGGGWEKMSLPSSLAQEWMEAIRGTGDGGASGGVPFDWDAISVFQQTSFVVVDALKPDLPIIFASTGFFNLTGYTSREVIGGNCRFLQGPDTNPEDVASIRDAVVPRGTGTFCGRLLNYRKDGSNFWNLLTIAPIKDDTGTIVKLVGVQLEVSKYTEGSRANRLRPNGLPQSLIKYDVRHQDKVSALVAQIVAALTKPYKVEPPRPSYAMRASLTGQTIQPLSPGRAAAARPYSASDVPQTAAIPREGGGRRRHRSSTFLSLLGMEEKDSEEDQFPEPELIMMDNASVGRPGSLDDRERTRRGIDLATTLERIGHSFVITDPRLPDNPIIFASDQFLELTEYSREEVLGENCRFLQGRDTDLKAVQLIRDAVKEGRDITVQLLNYTRGGRPFWNLFHLQAMRDKKGNLQYFIGVQQETDTLDRVEQEKAEVVRATAQNVDVAARELPDANLTPDHLWERHSKVVTPLPHSKINSPCWYAIRKVQRRLRRGERLGLKHFRPIKP

SEQ ID NO: 40288 - protein, 657 aa, Hypolepis punctata
TPLEFQIQELAEWLLGSSEEIASTGVTCTDSLAEAGYPGAAALGDAVCGLAAARITPNSDFLFWFRSHTAKEVFWGGAEHDPEARDDDSRMLPRSSFKAFLEIVKKRSLPWEEVEVDAIRSLQLILREELEKFCAAAAAAATASASDRDDVDSLVPSSKKLSLKENEEMGTGGGWGKMSLPPSLVQEWMEAIRGGAGDGRASGGGGGDFNWDPTCMFQQTSFVVVDALKPDLPIIFASTGFFNLTGYTSTEVIGANCRLLQGPDTNPEDVASIREALAQDTGTFCRKLLNYRKDGSSFWNLLTIAPIKDDRGSIVKLIGVQLEVSKYTEGSRANRLRPNGLPQSLIKYDVRHRDKVSVFVAELVAALTKPDKVELTKPSSTMQFSLTGQTIKPLSKTAAMPREGGGRRRHGSNTFLSLLGVEKKDPVEDQFPEPRLIMVDDNSVGRPESLDDPERTRRGIDLATTLERIGQSFVITDPRLPNNPIIFASDQFLELTEYSREEVLGNNCSFLQGRDTDANTVQLIRDAVAEQRDVTVQLLNYTRGGRPFWNLFHLHAMRDEKGELQYFIGVQQETVAPRVPEDMPDRVKQVHTTAQNVDVAARELPDANLSPDHLWVRHSKVITPLPHSKMNNSSWYAIRRVQRRVRLGLKHFRPIKP

SEQ ID NO: 40289 - protein, 692 aa, Onoclea sensibilis
TPSEFQIQDLVEWLLGSSEDIASSGVTCTDSLAEVGYPGAAALGDAVCGMAAARITPNSDFLFWFRSHTAKEVFWGGAEHDPQARDDDSRLLPRSSFKAFLEIVKRRSLPWEEVEVDAIRSLQLILREDLEEFCAAAAAGADGEDVDSLVPSSKKLSLKEREGSGAENSKKLERATSAAVGAAGGTGGRWEKMLLPSSLAQEWMEAIRGTGDGGASGGGGGVPFDWDAISVFQQTSFVVVDALKLDLPIIYASTGFFNLTGYTSREVIGGNCRFLQGPETNPAVIDSIREALVPQGTGTFCGRLLNYRKDGSSFWNLLTIAPIKDDSGTIVNLIGVQLEVSKYTEGSRENRLRPNGLPQSLIKYDVRHQDKVSALIAQLVAALTKPHKVEPPRPSYTMRFSLTGQTIEPLSPGQAAAAARPCSTSDVPQTTSIPREGRGRRRHRSSTFLSLLGMEEKDSEEDQFPEPELIMVADASVGRLRSSDDPERTRRGIDLATTLERIGHSFVITDPRLPGNPIIFASDQFLELTEYSREEVLGENCRFLQGRDTDRKAVQLIRDAVEEGRDVTVQLLNYTKGGRPFWNLFHLQAMRDKKGNLQYFIGVQQETDTPDRVEHEKAKVVRATAQNVDVAARELPDANLTLDHLWERHSKEVTPLPHSKINSPCWYAIRRVQRRLRRGERLGLKHFRPIKP

SEQ ID NO: 40290 - protein, 397 aa, Saccharomyces cerevisiae
MSTEEQNGGGQKSLDDRQGEESQKGETSERETTATESGNESKSVEKEGGETQEKPKQPHVTYYNEEQYKQFIAQARVTVGSIVYKNFQILRTLGTGSFGRVHLIRSRHNGRYYAMKVLKKEIVVRLKQVEHTNDERLMLSIVTHPFIIRMWGTFQDAQQIFMIMDYIEGGELFSLLRKSQRFPNPVAKFYAAEVCLALEYLHSKDIIYRDLKPENILLDKNGHIKITDFGFAKYVPDVTYTLCGTPDYIAPEVVSTKPYNKSIDWWSFGILIYEMLAGYTPFYDSNTMKTYEKILNAELRFPPFFNEDVKDLLSRLITRDLSQRLGNLQNGTEDVKNHPWFKEVVWEKLLSRNIETPYEPPIQQGQGDTSQFDKYPEEDINYGVQGEDPYADLFRDF

SEQ ID NO: 40291 - protein, 286 aa, Arabidopsis thaliana
MAMISYSTIVVALLASFMICSVSANFQRDVEITWGDGRGQITNNGDLLTLSLDKASGSGFQSKNEYLFGKIDMQIKLVAGNSAGTVTAYYLKSPGSTWDEIDFEFLGNLSGDPYTLHTNVFTQGKGDREQQFKLWFDPTSDFHTYSILWNPQRIIFSVDGTPIREFKNMESQGTLFPKNQPMRMYSSLWNAEEWATRGGLVKTDWSKAPFTASYRGFNEEACVVINGQSSCPNVSGQGSTGSWLSQELDSTGQEQMRWVQNNYMIYNYCTDAKRFPQGLPRECLAA

SEQ ID NO: 40292 - protein, 373 aa, Burkholderia vietnamiensis G4
MRAVPLSDSSTLEQPATEAVVRDLRRVPIHPDHWYPLAWSRELKRGKTLGVRFAGDPIVLVRAESGAVYALEDRCAHRQVPLHAGVVDGETLRCCYHGWTYACDSGRCVDVPYLGRERLPNGVRAYPCRETHGVIFVFPGDATLADERPVPALESADNPAYKTRRFGREVKCHYSFMHENLMDMNHQFLHRKQMGQMRARSVGRRRGDDWVEVDYTFARMEGKQPVGEALVFGSSKKPGDQADKSVMTVRTGYPYQTLQIRSSEGTLVMDLWIVYVPLDAEQRTNRTFGLLSIHKPGIPFALDLAWPLLVWFTERIFREDRWIVEREQEAHDRQGADWNHEVFPVINELRDLLRQCGARTVIPIRDASTSDAR

SEQ ID NO: 40293 - protein, 175 aa, Triticum aestivum
MAPTVMASSATSVAPFQGLKSTDGLPVSRRSNGASLGSVSNGGRIRCMHVWPIEGIKKCETLSYLPPLSTEALLKQVDYLIRSKWVPCLEFSKVGFIFREHNASPGYYDGRYWTMWKLPMFGCTDATQVINEVDEVNKEYPDAYVRIIGFDNMRQVQCVSFIAFKPPGCDESGKA

SEQ ID NO: 40294 - protein, 247 aa, Burkholderia vietnamiensis G4
MIPTSTRISVAPRRAALLRRLAALALAAAAVFGYQRVVRSAEPIHNAPAPTLDETPGASHDETAVLAGGCFWGVQGVFEHVKGVKQVTAGYAGGASETAHYALVGSGLTGHAESVRIVYDPAQVSYGRLLQLFFSVAHDPTELNRQGPDEGPQYRSAIFPTNAQQHAVATAYIAQLGAAHTFAAPVVTRVEPYQGFYPAEDYHQNYLELHPDAPYIAFNDLPKVAALKQRFPALYRADAVLWHDARR

SEQ ID NO: 40295 - protein, 143 aa, Zea mays
MPVPLAPYPAPPAPFTPPNGAQSQLVCTGCRNLLMYPAGATSVCCAVCSTVTAVPAPGTEMAQLVCGGCHTLLMYIRGATSVQCSCCHTVNLAMEANQVAHVNCGNCRMLLMYQYGARSVKCAVCSFVTSVGTSPGAEQKPSS

SEQ ID NO: 40296 - protein, 380 aa, Synechococcus elongatus
MVNTVAKPEFEELRPGIKAPAKETILTPRFYTTDFEAMANMDITENKAELEAILEEFRCDYNRHHFVRDEEFEQSWDHIDGETRRLFIEFLERSCTAEFSGFLLYKELSRRLKDRNPLLAECFALMSRDEARHAGFLNKAMADFNLSLDLGFLTQHRSYTYFEPEFIFYATYLSEKIGYWRYITIYRHLEKHPEHRIYPIFRFFENWCQDENRHGDFFDAVMRAQPQMLDRPRTFWQKIKEIPLSLSGKKWARYFMVCWVPPKLWCRFFLLSVFATMYLNDLQRAKFYTALGLDAREYDREVIAKTNETAGRVFPVILDVDHPEFYQRLERCVENNAKLTEIAKQNGGFLKKLPLYLSNVWQMIKLFLIPAKEPTRVAVR

SEQ ID NO: 40297 - protein, 531 aa, Glycine max
MAGGGAPAKADEPQPHPPKDQLPNISYCITSPPPWPEAILLGFQHFLVMLGTTVLIPTALVPQMGGGNNEKARVIETLLFVAGINTLLQTMFGTRLPAVIGGSYTFVPTTISIILAGRFSDEPDPIEKFKRIMRSIQGALIVASTLQIVLGFSGLWRNVARFLSPLSSVPLVSLVGFGLYELGFPGVAKCVEIGLPQLILLVFVSQYVPHVLHSGKHIFDRFAVLFTIVIVWIYAHLLTVGGAYNDAPHKTQISCRTDRAGLIDAAPWIRIPYPFQWGAPSFDAGEAFAMMMASFVSLVESSGAFIAVYRYASATPLPPSILSRGIGWQGVGILLSGLFGTVNGSSVSVENAGLLALTRVGSRRVVQISAGFMIFFSILGKFGAVFASIPPPIIAALYCLFFAYVGAGGLSFLQFCNLNSFRTKFILGFSIFIGLSVPQYFNEYTAINGYGPVHTGARWFNDIINVPFQSKPFVAGVVAYFLDNTLFKRAADIRKDRGKHWWDKYKSFKGDTRSEEFYSLPFNLNKYFPSV

SEQ ID NO: 40298 - protein, 193 aa, Oryza sativa (japonica cultivar-group)
MSKYGTIPTSSSSDGPPPGSSSSSPLDFISRAKARGATALAERRPWRELADPRAASVPRGLGGAYRRARANLGHFSMNYAIVVLAVVFLSLLWHPVSLIVFLACMVAWLFLYFLRDEPLALCGRAVGEGAVLAVLSVLTLVLLLLTGATVNILTSLLVGVVIVLLHAVFHRPADSIDEEAGRYYTPVPPQPSY

SEQ ID NO: 40299 - protein, 360 aa, Arabidopsis thaliana
MAKFGEGDKRWIVEDRPDGTNVHNWHWSETNCLEWSRNFFTKQFSGVDILSGEGNLFIKVSKIEKVEGEAYVNVRKGKIIPGYELNVSLSWEGEAKDSDGKTLLKADGLVDMPYISDENADEDPEIRFSVKDEGPIGRTLKEAMVKKGKEIILEKVRVYVEAMARGGPCRDELESKKVAPKSVAAGSATVAVEKSGAAPVVSAAAVESKVVKEKKKAKTKEGFKTITMTEKFNCRARDLYEILMDENRWKGFTQSNAKISKDVNGPISVFDGSVTGINLELEEGKLIVQKWRFGSWPDGLDSTVKIVFEEPQPGVTIVNLTHTDVPEEDRYGNATVVENTERGWRDLIFHRIRAVFGFGI

SEQ ID NO: 40300 - protein, 251 aa, Zea mays
MDRAALTVGPGMDMPIMHDGDRYELVRDIGSGNFGVARLMRNRADGQLVAVKYIERGEKIDENVQREIINHRSLRHPNIIRFKEVILTPTHLAIVMEYASGGELFERICNAGRFSEDEQVCHRDLKLENTLLDGSTAPRLKICDFGYSKSSVLHSQPKSTVGTPAYIAPEVLLKKEYDGKRILGVQYSIPDYVHISPECQNLVSRIFVADPATRITIPEIGNHPWFLKNLPADLMDDSTMSKQYKEPEQPM

SEQ ID NO: 40301 - protein, 78 aa, Gossypium barbadense
RIMKKALPANAKIAKDAKETVQECVSEFISFITSEASDKCQKEKRKTINGDDLLWAMATLGFEDYIDPLKIYLTKYRE

SEQ ID NO: 40302 - protein, 245 aa, Schizosaccharomyces pombe
KSFIKVSSLEQLKATGTVVVSDTGDFESIAKYKPQDATTNPSLILAASKKPQYAALVDAAVDYAKAKGGSINSQIEIAFDRLLIEFGTKILAIVPGRVSTEVDARYSFDTQTTIEKARHLIKLYEAEGIGRERVLIKIASTYEGIQAAKQLEEEGIHCNLTLLFSFVQAVACAEANVTLISPFVGRILDFYKAKNNRDYTAQEDPGVVSVSNIFNYYKNSVTRPLSWVLLSVTSVRSRNSLVLTF

SEQ ID NO: 40303 - protein, 215 aa, Ashbya gossypii ATCC 10895
MIRIGSRLTPSLRHYTSSSQRITKFTMSGFYDLSPLDAKGEPFPFSQLKGKVVIIVNVASKCGFTPQYEELEELYKKYKDQGFEVIGFPCNQFAHQEPATNEEIVQFCKLNYGVTFPVLKKVDVNGADADPVYVYLKSQKSGLLGFKGIKWNFEKFLVDRKGQVKDRYSSITKPLSLEKTIETLLKEEGGPAPTATTEATATATADAAKPSGESL

SEQ ID NO: 40304 - protein, 346 aa, Cryptococcus neoformans var. neoformans JEC21
MSAITKGDLILVSGASGFIASHTVKEFLKEGFRVRGTVRSKEKGEYLKHLFQGLGEFEYVLVDDITKDGIFDEAVKGVNAVAHLASPFYVTNVKDPRELIDPAVKGTTGILKSVQKNNPKVKRVVITSSVAAIMCPISKKPPVTYTEADWNVDSIPHVEEKGVEADGMHSYLASKTLAEKALWSFIEDEKPSWDAVAIHPPYVLGEVIHQCDKPESLNTSVASFWSWPAGEKTEKDIPGPIGNWVDVKEIALGHVRALTVPEAGGQRFIISAGPFAGQDYADILHKRFPEVKNVPVGKPGTHDEVCKELDIFDGKKAEKVLGIKYHTLEETVVDMFESLRKRFNKF

SEQ ID NO: 40305 - protein, 346 aa, Cryptococcus neoformans var. neoformans JEC21
MTAITKGDYILVTGASGYIASQTVKEFLKEGYRVRGTVRSQDKGEYLKQLFEGLGAFDYVIVEDITKDGIFDEAVKGIDAVAHLASPFYISNVKDPQELIGPAVKGTTGVLKSIQKENPKVKRVVITSSVASIMSVRSRKGPVVYTEEDWNVDSIPYVEENGVNSDGGESYRASKTLAEKALWKFIEDEKPSWDAVAINPPLVLGEIIHQCDDPTKLNTSVFHFWEWASGRKSEKDLPGGGANWVDVKDVALGHVRALTVPEAGGQRFIVGAGPFAAQDYCDVLHKRFPEIPNIPVGKPNSHDEIVKGANIFDGSKATKVLGIQYSSFEETVVEMAESLRKRFGQF

SEQ ID NO: 40306 - protein, 167 aa, Sesamum indicum
RATFISHGNTARLAKEHGDLKLAQICGIIAADEKRHETAYTKIVEKLFEIDPDGTVLALADMMRKKVSMPAHLMYDGRDENLFDHFSAVAQRLGVYTAKDYADILEFLVARWEVEKLTGLSGEGRKAQDYVCGLPPRIRRLEERAHARAKQASPVPFSWIYGREVKL

SEQ ID NO: 40307 - protein, 130 aa, Campylobacter lari RM2100
MAKRKVVKKKVVKKNIAKGIVYISATFNNTMVTVTDEMGNAIAWSSAGGLGFKGSKKSTPYAAQQAVEDALNKAKEHGIKEVGIKVQGPGSGRETAVKSVGAMEGIKVTFLKDITPLAHNGCRPPKRRRV

SEQ ID NO: 40308 - protein, 418 aa, Candida glabrata CBS138
MSATIFNNIEELPADALFGIKQRYNQDTRATRVDLGIGAYRDDQGKPWVLPSVRMAERAIQEDPSYNHEYLGINGLPSLSSAAANVIFGEDSPALKEGRTISVQSLSGTGALHIAAKFISKFAADKKIYLSQPTWANHNAIFKAQGLETASYPYWKSSTKSLDLEGFISAIESAPKGSIFLLHACAHNPTGLDPSEKQWPVILDALVKGDHLALFDSAYQGFASGDLDKDAFAVRLGVEKLASTSPIFVCQSFAKNVGMYGERVGCFHLILPKQNANLAPIKSAITSQISSIIRSEVSNSPAYGAKIVSKILNTPELTKQWHEDMVTMSSRIKEMRIALRDHLVKLGTPGTWDHIVEQCGMFSFTGLTPEMVKRLEVQHAVYLVSSGRASIAGLNSGNVEYTAKAIDEVVRHYSTSKL

SEQ ID NO: 40309 - protein, 178 aa, Rosa hybrid cultivar
ECALWMPTRTALEQQLSYTLHQQNPVGHTVPIHLPVINQVFSSNHAVKISPNSPVARLRPRAGNHMPGEVVAVRVPLLHLSNFQINDWPELSTKRYALMVLMLPSDSARQWHMHELELVEVVADQVAVALSHAAILEESRRARDLLMEQNIALDLARREAETAICARNDFLAVMNHEM

SEQ ID NO: 40310 - protein, 196 aa, Nocardioides sp. JS614
MAGSPEPKSMREQFWDPIAGFGVTFRTMFKKVVTEQYPFDKYPTAPRFHGRHQLNRWPDGLEKCVGCELCAWACPADAIYVEGASNSDDPDGGERFSPGERYGRVYQINYLRCILCGLCIEACPTRALTMTNEYELADDNRADLIYEKSDLLAPLLPGMEQPPHPMRLGDDEGAYYRGEFAAPAPTAPGSSTEAGA

SEQ ID NO: 40311 - protein, 338 aa, Anthoceros punctatus
SDSGKDAGRFTAAWELYKAQEDVVAVCKEYNIKITLFHGRGGSVGRGGGPMYLAIQSQPPGSVMGTLRVTEQGEMIQAKFGLNQTAIRQLEIYTTAVLLATVHPPVPPRSAAWRSVMDEISDAGRKYYRQIVFETKEFLQYFHEATPEAELGNLNIGSRPTRRKSSGGTTQLRAIPWIFAWTQTRSVLPAWLGVGKGLQAAMEKGHRDELRAMYKEWPFFQSTVDLIEMVLAKADMPITKHYEDVLVSQNVRELGKELRDEFHVTEKHVRDITGHHKLSENNKTLRRLIESRLPYLNPINMLQVEVLRRLRQDETNPKLRDALLITMKGIAAGMQNTG

SEQ ID NO: 40312 - protein, 179 aa, Rosa hybrid cultivar
ECALWMPCRSGMNLQLSHTLNYEAHIGSTVPFSLPIVSEVFKSSRAMRIPYTCPLVRIRPLVARYVQPEVVALRVPLLNLSNFQINDWPDVSAKSYAIMVLILPTDSTRKWRDHELELVDVVADQVAVALSHAAILEESMRASDQLVEQNGALDLARREAELAIHARNDFLAVMNHEMR

SEQ ID NO: 40313 - protein, 73 aa, Populus balsamifera subsp. trichocarpa x Populus deltoides
MSGCSCGSDCKCGSGCKCGMYPDLGFSENTTTETIIAGVAPVKMFYERSEMDFGAENGCKCGSNCTCDPCSCK

SEQ ID NO: 40314 - protein, 116 aa, Arabidopsis thaliana
MKLSVRFISAALLLFMVFIATGMGPVTVEARTCESKSHRFKGPCVSTHNCANVCHNEGFGGGGSVTVEARICKSRSQKFKGPCVSEDNCANVCHTEGFPDGDCDGLLRRCYCNTHC

SEQ ID NO: 40315 - protein, 213 aa, Porphyra yezoensis
AGGIAEMAGLPSEVRDTTDALDALGNTTAATGKGFSNGSAVLTAYALLTALVQDSGLAPNPLQLVGPAAAAAGVAGAHVTDGGQVVSLVDIYVVVSVFIGIMLPFFFGALTMLAVSRAAQAMIVEVRRQFRDIPGLREGARGVQPQHVRCVNISTRSAIIEMVIPGALAILTPLIVGFGFGQRALIGLLLAAIGSGYMLGIMMSNAGGAWDNA

SEQ ID NO: 40316 - protein, 501 aa, Photorhabdus luminescens subsp. laumondii TTO1
MSSEFCFVKYGFDKNLNKLINEFQFDELSTGTILFRSTTKVSKFKSERYTAFLIGNIYNISTIRSILGKIEGRSSVLSDVEILLLSRDKFGNSIISIAEGDYCLFIEDKKGNIEVITESRGLNLVNLVQTDLIWITNSLKIVGKVEGDKAFDFKPESEVIKNSLKPDNFSPIRNVSRLKPGTINKLTFDEQRYLHLEVEYVISPVEENSFDIKESVLLEIIDSDLRNSISRLSKNNETIGVPLSGGLDSSLVTALASKYFDKVKTWSIGTELSNEFEFSKIVSDYLGTEHEVKILSEDEVISGVVKAIYYNEIFDGLSSEIQSGLFNVYELAKGKVNSLITGYGSDLLFGGILDPEKSYIEPNKILSEQVYRTKWTGEFSTHGAGNYGLNVYHPFWTNNLISLCHNLDPYFKIRDNEVKNILREYANSINILPKEIVWRKKIGIHEGSSVNKSFATMIGTEVNNYQDKTRFSYSIYKEFLTGRLSIEEANSTKLCEIIRRN

SEQ ID NO: 40317 - protein, 532 aa, Arabidopsis thaliana
AKGLVDHSRRQHHHKSPSFLSPQPRPLASSPPALSRFFSSTSEMSASDSTSSLPVTLDSINPKVLKCEYAVRGEIVNIAQKLQEDLKTNKDAYPFDEIIYCNIGNPQSLGQLPIKFFREVLALCDHASLLDESETHGLFSTDSIDRAWRILDHIPGRATGAYSHSQGIKGLRDVIAAGIEARDGFPADPNDIFLTDGASPAVHMMMQLLLSSEKDGILSPIPQYPLYSASIALHGGSLVPYYLDEATGWGLEISDLEKQLEEARSKGISVRALVVINPGNPTGQVLAEENQRDIVNFCKQEGLVLLADEVYQENVYVPDKKFHSFKKVARSLGYGEKDISLVSFQSVSKGYYGECGKRGGYMEVTGFTSDVREQIYKMASVNLCSNISGQILASLVMSPPKPGDDSYDSYMAERDGILSSMAKRAKTLEDALNSLEGVTCNRAEGAMYLFPRINLPQKAIEAAEAEKTAPDAFYCKRLLNATGVVVVPGSGFGQVPGTWHFRCTILPQEDKIPAIVNRLTEFHKSFMDEFRN

SEQ ID NO: 40318 - protein, 503 aa, Micrococcus luteus
MEHQKTTPHATGSTRQNGAPAVSDRQSLTVGSEGPIVLHDTHLLETHQHFNRMNIPERRPHAKGSGAFGEFEVTEDVSKYTKALVFQPGTKTETLLRFSTVAGELGSPDTWRDVRGFALRFYTEEGNYDLVGNNTPIFFLRDPMKFTHFIRSQKRLPDSGLRDATMQWDFWTNNPESAHQVTYLMGPRGLPRTWREMNGYGSHTYLWVNAQGEKHWVKYHFISQQGVHNLSNDEATKIAGENADFHRQDLFESIAKGDHPKWDLYIQAIPYEEGKTYRFNPFDLTKTISQKDYPRIKVGTLTLNRNPENHFAQIESAAFSPSNTVPGIGLSPDRMLLGRAFAYHDAQLYRVGAHVNQLPVNRPKNAVHNYAFEGQMWYDHTGDRSTYVPNSNGDSWSDETGPVDDGWEADGTLTREAQALRADDDDFGQAGTLVREVFSDQERDDFVETVAGALKGVRQDVQARAFEYWKNVDATIGQRIEDEVKRHEGDGIPGVEAGGEARM

SEQ ID NO: 40319 - protein, 176 aa, Burkholderia vietnamiensis G4
MPTRRHLLFAGATGVAALAALSSAGRRMLVGRAFAAPPGARGATASFDVTRSEAEWRRRLTPAQYTVLRDAGTEPPYSSPLNGEHRRGTFACAGCDLALFPSSTKFDSHTGWPSFWKPLDHAVATEADASYGMARTEVHCRRCGGHLGHVFDDGPPPTGLRYCMNGLALAFHPAAA

SEQ ID NO: 40320 - protein, 79 aa, Populus balsamifera subsp. trichocarpa x Populus deltoides
MSCCGGNCGCGSGCKCGSGCGGCKMYPDMSSSETITKETLVLGVAPEKGHFEGAAETVMGAESGCKCGANCTCDPCTCK

SEQ ID NO: 40321 - protein, 152 aa, Pirellula sp. 1
MQRTLVLLKPDCVQRRLIGDVLSRFEAKGLHIVAMKLLQVTPELSKQHYAEHVEKPFYPSLEEFITSAPVVAIALEGLEVIRVVRDMLGATNGLQAAPGTLRGDYSSSRQMNLVHASDSEESAQRELDLYFNADEFCDYSLVLTPFMRADDE

SEQ ID NO: 40322 - protein, 253 aa, Zea mays
  misc_feature (190)..(190): Xaa can be any naturally occurring amino acid
  unsure (1)..(253): unsure at all Xaa locations
MAGASRKDLLKKVYNMVPPMLESFHKGQLGRVAVIGGSEDYTGAPYFSAMASAKLGCDMSHVICEPGAGAVIKTYSPNLMVHPYMRQSKNLAQSESAESVSAEVVGMLSRLHVVVIGPGLGRDKLMQDTCAKVIEEARKQGIPFVLDADGLYLAQTRPELVEGCKECILTPNVVEFGRLAKAKGVNVDEXRSFRTLLQAIKGFLGGVTIIQKGAKDYISNGSHTLVSEGEGGLKRSGGQGDTLTGSLATLLTY

SEQ ID NO: 40323 - protein, 78 aa, Populus balsamifera subsp. trichocarpa x Populus deltoides
MSCCGGNCGCGSGCKCGSGCNGCSMYPDLSFSETTTSQTIIAGVAPVRMFYESSETNFGAENGCKCGSNCTCDPCSCK

SEQ ID NO: 40324 - protein, 394 aa, Photorhabdus luminescens subsp. laumondii TTO1
MANKKSNNNKVFKDETSLYSRYSISTLFLKFFVTLLLTNKITKKISLWMMRFILNKKNKFFIRFLNGVYFGGESIDEAKANVIFLSKNNIHSILDYAIEGKNDEIFFDNALESTLKLIDLASKESNIPYVAIKPSSLGDIHLYEEKMRGWNFFGEKINSWSRILERYEKIFHYAEIKSVKVMIDAEQSWIQAAVDKIVIDSIIKHNKILPIITLTIQSYKKESIDLLMLLHKIAIDNNIKVGIKIVRGAYLEEEIKNKEKSIGTFFLNKEETDLNYNYLVEYISKRIEYFYPFFATHNENSISIILNKNELKNKSFWIGQLYGIGDHISSKLAYNGIRTCKYLPYGPIDKSLPYLLRRINENAVASDTFVTENRKIMKEIILRLKNTGDKNGCL

SEQ ID NO: 40325 - protein, 518 aa, Solibacter usitatus Ellin6076
MPRSSQSFHEVWPGSVRAPRSPPVSVAIIAFVPARTGRRPCYNSNVSRVLMISSEAAPFAKTGGLADVVGALPTALHSFGDEVAVVIPRYGSIDLKHARRVWENLFVHLGPAAFPITIYQAPAEYPVYLVDCPPLFERKGFYGDSAMDFPDNHIRFAVFARAALAVARVLFRTEIFHCHDWQSGLVPAYLRTTFASDPTYLGCRTLFTIHNLGYQGLFPKSALAEVALPVEDVFRPDAMEFFGRVSYIKAGIAFADVLSTVSPTYAREIQTPEYGFGLDGALRARSNVLTGILNGVDYREWNPEIDPLIPARYSVDDLSGKEICKRQLLAEFGLPPEAMGRPLLGIVSRFTRQKGTDILAEVISHIIAQDVYLVALGSGDVAYEEFFRSMQSDYPGRIGVRIGFDNGLAHRIEAGADIFLMPSHYEPCGLNQIYSLRYGTVPVVRATGGLDDTIDEGTGFKFAEYSGEALLEAVRAAVAGFSDPGAWRNMMRNGMRKDFSWKTSAAAYSELYRRLLGR

SEQ ID NO: 40326 - protein, 407 aa, Fusobacterium nucleatum subsp. vincentii ATCC 49256
MEKLSLQTKIVLGMQHVLAMFGATVLVPFLTGLNPSIALICAGVGTLIFHSVTKGIVPVFLGSSFAFIGATALVFKEQGVAILKGGIISAGLVYVIMSFIVLKFGVERIKSFFPPVVVGPIIMVIGLRLSPVALSMAGYSNNTFDRDSLIIALVVVITMIFISILKKSFFRLVPILISVAVGYIVAYFMGDVDLSKVHEASWIGLPVGAFDIITTLPKFTFAGVVALAPIALVVFIEHIGDITTNGAVVGKDFFKDPGVHRTLLGDGLATMAAGLLGGPANTTYGENTGVLAVTKVYDPAILRIAACFAIVLGFIGKFGVILQTIPQPVMGGVSIILFGMIAAVGVRTIVEAQLDFTHSRNLIIAALIFVLGIAIGDITIWGTISVSGLALAALVGIVLNKVLPEDK

SEQ ID NO: 40327 - protein, 184 aa, Triticum aestivum
SHPVLAKMMISGVVYSLGDWIAQCYEGKPIFDFDRARMFRSGLVGFTLHGSLSHYYYHICEARFPFKDWWVVPAKVAFDQTIWSAIWNSIYFGGLGFLRVESPTTIYGELKSTFWPMLTAGWKLWPFAHLVTYGVVPVEQRLLWVDCVELVWVTILSTYSNEKSEARNSDSTSTPAASSKDNSR

SEQ ID NO: 40328 - protein, 667 aa, Oryza sativa (japonica cultivar-group)
MSKLRRRRLGVRRGGDVGTRRRKPRLGGDEGGNEVALALGTGMGALVDLVGGAVTGAGVAGVFLKETDGVVVSIVVGASGDGGIDVENDLLLRSNPAISAPPPSSTNRRQWSSSPRTTAESPWLSRGRRSGVPTGDDERPAERDPLTTMGMLDLMRLMSIQRQRDQERRRRQAQAPPRDGLIALRAKRKGSPCQQDGDSQGAADIEIPSLPEDIWRLIHSLMPMRDAARAACVSRSFLSLWRCHPNLNFSSEAFGLNKNACGKEELAGLFYSKVDHILKRHSGIGVKKLKIQIYSDYSGKGSSYLNNWLQISVKPGIEELIISLTQFQAKYNFPCSLLSNGSGDSIQYLHLSNCSFHPTVTLSGLRSLMRLYLCCVRITENELGCLLSHSLALEQLEIRYCDRIVCLKVPCLLQRLISLKVFGCDKLKLIENEAPNVSIFAFQGDKTELKLGETLQIKSLCMVRSGYVYHARAELPSIMPNLESLAIKSRKETAFAPKLCSKFLCLRHLSIGLIGFFPAYDYLSLASYIYAAPSLETFDLNVMQRNVQSVSIFAHPADLRSIREEKHHNLKSVTVTSFISVKSLVELTCHILESTASLECLTLDASQTGFRCDTPGSKISKCPPLDRDIIMEGHRGVLAIRRYIQPRVPSTVKLTVLEPCSCHSTEL

SEQ ID NO: 40329 - protein, 99 aa, Arabidopsis thaliana
  misc_feature (18)..(18): Xaa can be any naturally occurring amino acid
  misc_feature (20)..(20): Xaa can be any naturally occurring amino acid
  misc_feature (28)..(28): Xaa can be any naturally occurring amino acid
  unsure (1)..(99): unsure at all Xaa locations
SQRPTAFSRLVSVLIFPXTXNFLESPNXYVREKEASMILKLAGGLCVVIFCPEWIVLVLAFFLKYYAYVDGDNNGVAMKRTGKVQSEETLKNSPWAFQV

SEQ ID NO: 40330 - protein, 768 aa, Cucurbita moschata
MSVTILPDLGTEIFIPVCAVIGIVFSLVQWYYVSQVKLSPGRDAAHNNSAGSKNGYSDYLIEEEEGVNDHNVVIKCAEIQSAISEGATSFLFTEYKYVGIFMVLFAVLIFVFLGSVESFSTKPQPCTYDKTRTCKPALATAIFSTVSFLLGAVTSVVSGFLGMKIATYANARTTLEARKGVGKAFITAFRSGAVMGFLLAANGLLVLFIAINLFKLYYGDDWGGLFESITGYGLGGSSMALFGRVGGGIYTKAADVGADLVGKVERNIPEDDPRNPAVIADNVGDNVGDIAGMGSDLFGSYAESSCAALVVASISPFGNNHELTPMLYPLIVSSMGILVCLITTLFATDFFEIKAVKEIEPALKKQLIISTVLMTFGIAIVTWLSVPSSFTIFNFGTQKVVTNWKLFLCVAVGLWAGLIIGFVTEYYTSNAYSPVQDVADSCRTGAATNVIFGLALGYKSVIIPIFAIAVSIFVSFTFAAMYGIAVAALGMLSTIATGLAIDAYGPISDNAGGIAEMAGMSHRIRERTDALDAAGNTTAAIGKGFAIGSAALVSLALFGAFVSRAGVTAVDVLTPKVFIGLIVGAMLPYWFSAMTMKSVGSAALKMVEEVRRQFNTIPGLMEGTAKPDYATCVKISTDASIKEMIPPGALVMLTPLIVGILFGVETLSGVLAGSLVSGVQIAISASNTGGAWDNAKKYIEAGASKHARTLGPKGSDPHKAAVIGDTIGDPLKDTSGPSLNILIKLMAVESLVFAPFFASHGGLLFKIF

SEQ ID NO: 40331 - protein, 371 aa, Bartramia pomiformis
SDSGKDAGRLSAAWQMFKAQEDLVKVAKQYGVRLTMFHGRGGTVGRGGGPTHLAILSQPPDTINGSLRVTIQGEVIEQSFGEEHLCFRTLQRFTAATLEHGMHPPIAPKPEWREIMDTMAVASTKEYRSIVFQNPKFVEYFRAATPELEYGRMNIGSRPSKRKPSGGIESLRAIPWIFAWTQTRFHLPVWLGLGSALREVLQTDPRNIAILRRMYNQWPFFRVTIDLVEMVFAKGDPRIAALYDNLLVSNELKPFGEELRRKYNETREFLLKVAGHEDILQGNPTLKQRLRLREPYLTALNVQQALVLKKMRDQSSQFCALQNGQSNEVPKSPRRAAELVELNPTTEFPPGLEDTLILTMKGIAAGMQNTG

SEQ ID NO: 40332 - protein, 1033 aa, Streptomyces coelicolor A3(2)
MAKVRVYELAKEFGVESKVVMAKLQELGEFVRSASSTIEAPVVRKLTDAFQQGGGNGRSAGRPAAPKKAAPRPSAPSPAQAGPSQAAPAAGDRAAAPRPSAAPKAPAAQQPAAPSAPAPAPSQGPRPTPGPKPAPRPAPAAPEFTAPPAAPAAPSTPAPAPSGPKPGGARPGAPKPGGARPSGPGQDRGQQGGQGRPGGQRPGAPAQRPGGRPGGPRPGNNPFTSGGNAGMARPSAPRPQGGPRPGGPGGAPGGGPRPQGPGGQGGGPRPQAPGGNRPSPGSMPRPQGGGAGPRPGGGPRPNPGMMPQRPAAGPRPGPGGGGRGPGGAGRPGGGGGRPGGGGFAGRPGGGGGGRPGGGGGFAGRPGGGGGFGGGGGRPGFGGRPGGPGGRGGTQGAFGRPGGPARRGRKSKRQRRQEYEAMQAPSVGGVMLPRGNGETIRLSRGASLTDFAEKINANPASLVAVMMNLGEMVTATQSVSDETLHLLAGEMNYTVQIVSPEEEDRELLESFDLEFGEDEGSEEDLVVRPPVVTVMGHVDHGKTRLLDAIRKTNVIAGEAGGITQHIGAYQVATEVNDEERKITFIDTPGHEAFTAMRARGARSTDIAILVVAANDGVMPQTVEALNHAKAAEVPIVVAVNKIDVEGADPTKVRGQLTEYGLVAEEYGGDTMFVDISAKQGLHIDSLLEAVVLTADASLDLRANPVQDAQGISIESRLDRGRGAVATVLVQRGTLRVGDTMVVGDAYGRVRAMLDDNGNNVAEAGPSTPVQVLGLTNVPGAGDNFIVVEEDRTARQIAEKRAARERNAAFAKRTRRVSLEDLDKVLKAGEVQQLNLIIKGDASGSVEALESSLLQLDVGEEVDIRVLHRGVGAVTESDIDLAMGSDAIVIGFNVRAAGRAAQMAEREGVDVRYYSVIYQAIEEIEAALKGMLKPEYEEVELGTAEIREVFRSSKLGNIAGVLIRSGEVKRNTKARLLRDGKVIAENLNIEGLRRFKDDVTEIREGFEGGINLGNFNDIKVDDVIATYEMREKPRV

SEQ ID NO: 40333 - protein, 367 aa, Bucegia romanica
SDSGKDAGRLAAAWSMFKCQEDLVKIAKQYGIKLTIFHGRGGTVGRGGGPTHLAILSQPPDTIHGSLRVTVQGEVIEQSFGEEHLCFRTLQRFTAATLEHGMHPPISPKPEWRELMDEISKVSTEEYRSIVFKHPKFVHYFRAATPETEYGRMNIGSRPAKRKPSGGIESLRAIPWIFAWTQTRFHLPVWLGFGGAFKHAFEKSNQNVVLLRQMYNECPFFRVTIDLIEMVFAKGDPRIAALYDELLVDEDLKPLGEKLRTMYAETRDLLLKVAGHEDVLQGNPTLKQRLRLREPYITPLNVQQAFTLKKIRDQSFHVSPGTPKGENSGKQSSELAGLNTTTEYPPGLEDTLILTMKGIAAGMQNTG

SEQ ID NO: 40334 - protein, 181 aa, Oryza sativa (indica cultivar-group)
HINPAVTFGLFLARKVSLVRAILYIVAQCLGAICGVGLVKAFQSAYFNRYGGGANTLAAGYSKGTGLAAEIIGTFVLVYTVFSATDPKRNARDSHVPVLAPLPIGFAWFMVQLATIPITGTGINPARTTGPAVIFNNEKAWHNQWIFWVGPFVGAAIAAFYHQYILRAGPIKALGSFRSNA

SEQ ID NO: 40335 - protein, 190 aa, Neurospora crassa
MLSWYKAQLAARPLLTQAVTTSILFGVGDVAAQQLVDRRGLSNHDLTRTGRMVLYGGAVFGPAATTWFRFLQKRVVVPGSTNKTILARVAADQGLFAPTFIGIFLGSMAVLEGTDVKEKLQKNYWEALSTNWMVWPFVQMVNFKVVPLDHRVLFVNVISIGWNCYLSWLNGQFCCLLGSAERHARSFGWE

SEQ ID NO: 40336 - protein, 153 aa, Zea mays
MSLVRRSSVFDPFSVDLFDPFDSMFRSIVPSSSSAAASETAAFASARIDWKETPEAHVFKADLPGVKKEEVKVEVEDGNVLLISGQRSREEEDKGDKWHRVERSSGQFVRRFRLPENAKTEEVRAALENGVLTVTVPKAEVKKPEVKSIQISG

SEQ ID NO: 40337 - protein, 371 aa, Brachythecium salebrosum
SDSGKDAGRLSAAWQMFKAQEDLVKVAKQYGVRLTMFHGRGRTVGRGGGPTHLAILSQPPDTINGSLRVTIQGEVIEQSFGEEHLCFKTLQRFTAATLEHGMHPPIAPKPEWRELMDSMAITATEEYRSVVFQNPRFVEYFRTATPELEYGRMNIGSRPSKRKPSGGIESLRAIPWIFAWTQTRFHLPVWLGLGAGLKQALAAKPENMNILSRMYDQWPFFRVTIDLVEMVFAKGDPRIAELYDTLLVAPELRPFGDELRRLYNETKLHLLKIARHTDILQGNPTLKQRLRLREPYITALNVQQAFTLKKMREQNPHQVASTNISQPDSPKPMKAASELVTLNPTTEFAPGLEDTMILTMKGIAAGMQNTG

SEQ ID NO: 40338 - protein, 294 aa, Pisum sativum
MEQYEKVEKIGEGTYGVVYKARDRVTNETIALKKIRLEQEDEGVPSTAIREISLLKEMQHRNIVRLQDVVHSEKRLYLVFEYLDLDLKKHMDSSPEFSKDQRQVKMFLYQILCGIAYCHSHRVLHRDLKPQNLLIDRSSNALKLADFGLARAFGIPVRTFTHEVVTLWYRAPEILLGSRHYSTPVDVWSVGCIFAEMINQRPLFPGDSEIDELFKIFRITGTPNEDTWPGVTSLPDFKSAFPKWPSKDLATLVPSLEPSGLDLLSSMLRLDPSRRITARGALEHEYFKDIKFVP

SEQ ID NO: 40339 - protein, 553 aa, Candida glabrata CBS138
MSFAGYSGNSNSNSHFKRRNTTQTDRDGANTHNKRSRPNNYSKNADFAKSNDMNDRNNSKPEFTGSRYQGGKASRFPKKDYEESSNKNRNRNQNTKRFQSTKPNRKLNVNESRFREDYNNKHGRISTRYNNFTTGNTSDIRTNGNNTPLRQDDRNTITRPSNNANNNQDSGRKIFELPKGPKSTISRYNTGEPYKGTKPQSIPTPTLPTTFLSRPMNDSVYERLLQVGEGTYGKVYKARNTVTKELVALKKLRLQGEREGFPITSIREIKLLQSFNHENVSTIKEIMVESQKIIYMIFEYADNDLGGLLLNKQININAAQSKHIFKQILHGIEYLHDNNILHRDIKGSNILIDNQGSLKLTDFGLARKIDCNRDAIRDYTNRVITIWYRPPELLLGTTNYGPEVDMWGCGCILVELFNKMAIFQGTNELEQLEAIFKVMGSPSIEQWPNIFDMPWFFMIMPQQATKYPNVFEEKFRAVLETDNCFKLAQGLLRYDQEKRLTASEALQSEYFKEDPQPQPLILNDAISCHEFEVKLARKQQKKKEQSKSTTSSA

SEQ ID NO: 40340 - protein, 541 aa, Arabidopsis thaliana
RFVIGQAKNLIDQSRRRQLHHHKNLSFVSLIPPFSAPSDSSSRHLSSSSSSDMSASDSSSSLPVTLDTINPKVIKCEYAVRGEIVNIAQKLQEDLKTNKDAYPFDEIIYCNIGNPQSLGQQPITFFREVLALCSYTALLDESATHGLFSSDSIERAWKILDQIPGRATGAYSHSQGIKGLRDAIADGIEARDGFPADPNDIFMTDGASPGVHMMMQLLITSEKDGILCPIPQYPLYSASIALHGGTLVPYYLDEASGWGLEISELKKQLEDARSKGITVRALAVINPGNPTGQVLSEENQRDVVKFCKQEGLVLLADEVYQENVYVPDKKFHSFKKVARSMGYGEKDLALVSFQSVSKGYYGECGKRGGYMEVTGFTSDVREQIYKMASVNLCSNISGQILASLIMSPPKPGDDSYESYIAEKDGILSSLARRAKTLEEALNKLEGVTCNRAEGAMYLFPCLHLPQKAIAAAEAEKTAPDNFYCKRLLKATGIVVVPGSGFRQVPGTWHFRCTILPQEDKIPAIVDRLTAFHQSFMDEFRD

SEQ ID NO: 40341 - protein, 369 aa, Calliergonella cuspidata
SDSGKDAGRLSAAWQMFKAQEDLVKVAKHYGVRLTMFHGRGGTVGRGGGPTHLAILSQPPDTINGSFRVTIQGEVIEQSFGEEHLCFKTLQRFTAATLEHGMHPPIAPKPEWRELMDLMAVTATEEYRSVVFQNPRFVEYFRTATPELEYGRMNIGSRPSKRKPSGGIESLRAIPWIFAWTQTRFHLPVWLGLGAALKQALAANPENVTILSRMYDQWPFFRVTIDLVEMVFAKGDPRIAELYDTLLVAPELRPFGDELRRLYNDTKLHLLKIARHTDILQGNPTLKQRLRLREPYITALNVQQAFTLKKMREQNTQHVANIPQPDSPKPMKAASELVTLNPTTEFAPGLEDTMILTMKGIAAGMQNTG

SEQ ID NO: 40342 - protein, 384 aa, Pisum sativum
MAIHHHHHHHQQLHHNSLLDALYCDEEKLEEEQEDVSSQQSDVTTNNDNNILDSTSLFPLLLLEQNLFSQDEELTTLFSKEKTQQETYYEDLKNVVDFVSLSQPRREAVQWMLKVNAHYAFSPLTATLAVTYFDRFLLTFHFQKDKPWMIQLVAVTCISLAAKVEETQVPLLLDLQVQDTKYVFEAKTIQRMELLILSTLKWKMHPVTPHSFLDHIITRLGLKTNLHWEFLRRCENLLLSVLLDSRFVGCVPSVLATATMLHVIDQIEESDDNGVDYKNQLLSILKINKEKVDECYNAIVEVTNENNYGHKRKYEQIPGSPSGVIDAVFSSDGSNDSWKVGSSSYSTSEPVFKKTKTQGQNRNLSPLNRVIVGILATASATTSP

SEQ ID NO: 40343 - protein, 399 aa, Escherichia coli
MNRIPVIIINGFLGAGKTTLMKNLLTQANRNHLAVSVIVNDMSDLDVDGVLIANTEIVNIANNNFVSITSDSISSQSGIKTVDKAIKNMLRHYLPDVIFVETSGGSHPLPLIKYLQTHERLQLKSLLSLVDIVMLNDDYNGGKALIPAFQENLFYGKRRIENLLAEQIMFCSTLLLTKKDRLSFDIVTDVAKAIHPLNPYVNVIAVSWGNLKLAELLTLPDYDFNRVGLLIRELEDTITVEEAKISAQNGEIISRVIKDDRPFHPQRLWETYHYFMGMGIYRSKGFFWLPGRPDMALLWNQAAGSINLEFISYWNSGVLADPDNHLTHEERSVLQKKVNKTMGRFGDRRCHLTIIGRSDEVHDFTSALINCFLSEEEIVWWQSGGVFADPWPVNISRLN

SEQ ID NO: 40344 - protein, 240 aa, Pseudomonas syringae pv. syringae B728a
MGIADNTRNGIRIGLVGDFSADVPAHQAIPLALHRAAEVAQVAVDIEWLPTPQIGSGAHLAEFDGLWCVPASPYRDMQGALTAIRFAREHRVPFLGTCGGFQHALLEYARHQLGWTDAEHGETAPDAANVIIEPLSCSLVESVAAIQLQPDTLIAQAYGRLDIDERYHCRYGLRRELESVLFGEHLKVSGRGPEGEVRCMELQGHPFYVATLFQPERAALLGQTPPVVAAFVRACLSNLS

SEQ ID NO: 40345 - protein, 367 aa, Kluyveromyces lactis NRRL Y-1140
MNAEVYINDKIEVKRTAYGGRACFASNSMLKGTHLLDLSQWIGSSISHEFRKEVCHFCLKYDGGKPMKVRISWADLLKLDLNLLNHKLEKKYKGSGLWFCTEECKNFFLSGPNIVDLILNYEMILTHFQSIQGKSLCVETDTELYKDYDNKRMHQEIESCWMDLESTWMPRVSKMKLAKATNQLPVIDEDHYSCIRFVIECLFNMTHLDRNSVKWNTWEKLQSNEVEKIMRFPVLLEFQIKVFKWVYTLAPQYRYIMTTSVFRHILGSEYGNSFGIWETSESDDDREYLGYMVHPEASYFNHSCVPNVEKKRVERVFQYILQTDVQKGEELCIDYKGILHLDVNRRRAILKDNWFFECKCSRCLSEL

SEQ ID NO: 40346 - protein, 325 aa, Xanthomonas campestris pv. vesicatoria str. 85-10
MSDTTMTAIAIRDGKGDAEALYATEQPRPRPAPGQVLIRVHAAGINRPDLLQRTGHYPPPPGAPETLGLEIAGEIVEPAGRWKVGERVCALLAGGGYAQYAAVDARHVLPIPAGMDLVHAAALPETIFTAYANLFEHGRLAAGQWLLLHGATSGIGVTAIQMAKAAGAHVLATARSASKAAQARELGADVAIDSTTASFVEVAKAHGGVDVALDMVGAAVFADTLEALNPRGRIVYIASQAGATIEVPIPVLMRKQAVITGSTLRPRNADEKARLAAEVERVVWPWIEQGKLRVLLDKCFPLSEAAAAHRYLEQGSHLGKVVLEM

SEQ ID NO: 40347 - protein, 488 aa, Triticum aestivum
  misc_feature (293)..(293): Xaa can be any naturally occurring amino acid
  unsure (1)..(488): unsure at all Xaa locations
MEVVSSSHSCLAFHQTPTSARRSLGTGLGLRHTKFARPRKSAVLCVGRASNPGDSGKLHVSRSFDVSDVDAALQGISKKVGQIEKVSIPGLPEGPDSSQISTGLWEWKPKLTVYYEKSGTKNSKAPAVLFLPGFGVGTFHFEKQLMDLGRDYKVWTMDFLGQGMSLACEDPAPKAMAEEDEESYWGFGQDSQPWADELVYSVDLWRDQVQHFIEEVIGEPVYIVGNSLGGFVALYLAASSPHLVKGVTLLNATPFWGFLPNPARSPRLSKIFPWAGTFPLPSVVRKLTETSVXQKISDPRSIQKILRQVYADHSTNVDKVFSRIIETTEHPAAAASFASIMFAPMGQISFQEALSRCQRQDIPISLMYGKEDPWVTPYWGIRVKQQVPEAPYYEISPAGHCPHDEVPEVINYLLRGWLKNVESEGSVDLPFLEDSSFQEHGVSKELEFVRTGSKKSVSVRLFGSQISLWSQLSSFLKRHASNIRVVSR

SEQ ID NO: 40348 - protein, 401 aa, Triticum aestivum
  misc_feature (226)..(226): Xaa can be any naturally occurring amino acid
  misc_feature (336)..(336): Xaa can be any naturally occurring amino acid
  misc_feature (385)..(385): Xaa can be any naturally occurring amino acid
  unsure (1)..(401): unsure at all Xaa locations
VTLPEQVLYKKAGCYRSGIPGISSTHASAERGSNALLARAWSPGWQNADKAFTAFINGPLIDYSVNRKKADSANTSLLSPYLHFGELSVRKVFHQVRMKQLTWSNESNGDGEEGCSLFLRSIGLREYSRYLAFNHPCSHEKPLLAHLRFFPWVVNEVYFKVWRQGRTGYPLVDAGMRELWATGWLHDRIRVVVSSFFVKVLQLPWRWGMKYFWDTLLDADLESDAXLGWQYISGSLPDGRELDRIDNPQFEGYKFDPYGEYVRRWLPELARLPTEWIHHPWDAPESVLQAAGIELGSNYPLPIVELDEAKSRLQDALSEMWELEAASRAEIENGMXEEGLGDSSDEPPIAFPQELQHMEVDRATIHTPAMAGRRRADQMVPSITXSFFRAETETELSAAFE

SEQ ID NO: 40349 - protein, 243 aa, Pirellula sp. 1
MPVPSLFASSSRLLAPLAAVGLLTVLTSCVQAAPPVSANSDDPNANPNFNGLPFDSEIVEVKTRPGEEVATLAGGCFWCTEAVFERMEGVNDVVSGYIGGKIKNPNYKQVCGKMTGHAEAVQIYYDPSKTNFEELLKVFFKTHDPTTLNRQGADGGPQYRSSIFVHNDEQREIAKKTMEKLGEEYRDPIVTLIEPATKFYVAEEYHQDYYRRNPNAGYCQAVVAAKVRKFNRNFGDKIKGSGK

SEQ ID NO: 40350 - protein, 190 aa, Eucalyptus globulus
EVDLEFLGNLSGDPYILHTNLYSQGKGNREQQFYLWFDPTADFHTYSVLWNPLHVVYFVDGIPIREFKNLDAAGVPYPKSQPMTLYSTLWDAEDWATRGGLVKTDWSQAPFTASFSGFNASACVWSNGASTCPSSSAASVKYPWFSQQLDAASLQTMKSVQQKYMIYDYCKDTKRFPQGLPLECTLKTKS

SEQ ID NO: 40351 - protein, 285 aa, Crocosphaera watsonii WH 8501
MSNSLTITKSSEGSVTHGALDKRSRELRKTIVKTLKASRRGHLGASFSLIEILRVLYDDILRYDSQNPQWLERDRCILSKGHGCLALYAILADKGFFPESELDKFCQVDGILGGHPEYGKVPGVEASTGSLGHGLSIGIGFALNARIDKADYRTFVILGDGESQEGSIWEAAMCAGKHRLSNLTVLMDYNKHQSYGSTTEVQDLEPLADKWRAFGFAAVEVDGHDVTALRDVLSQVPLETHKPTAIICHTIKGKGVDFAENNLNWHHKSRISDNEIQAMLTALEG

SEQ ID NO: 40352 - protein, 517 aa, Glycine max
  misc_feature (139)..(139): Xaa can be any naturally occurring amino acid
  unsure (1)..(517): unsure at all Xaa locations
METLSYGSAPCCQVVNSKWKLVEKSLSSRQSRVSSIGKLGVYYTGTISACAPVRFYEMGTRVQLRSSKRFNFKVCSGSYDDGYVIGEEEARDISGLEEPVTTKVLIPGLPDDSKGESGAPISSCFWGWKPKLNVHYEKXAGCENVNDLPRVLFLPRFGVGSFHYEKQLKDFGRDYRVWALDFLGQGMSLPFEDPAPLSNEEAASNGSVSSWGFGDETKPWATKLVYSVDLWQDQVRCFIEEVIGEPVYLVGNSLGGLVALYFAANNPHLVKGVALLNATPFWGFLPNPIKSPRLAKIFPWAGTFPLPSSIKRLTELLWEKISDPKSIAEVLSQVYADHSTNVDNVFSRIVETTRHPAAAASFASIMFAPQGELSFNETLSRCRANNVPICLMYGKEDPWVGPIWGLQVKRQVPEAPYYQISPAGHCPHDEVPEIINFLLRGWIRNLESQGSVSLPLLEDLDSMKHSIIDRELEFPREGSKKSVMVRYFASNFSLWDRIRSFIRSQSKFSNILAAKPQ

SEQ ID NO: 40353 - protein, 357 aa, Burkholderia vietnamiensis G4
MDGAALYEALAAAEPDPSRRDVFMQLAEAEHEHAEIWHAKLQQRGVDVATTRPTFKTRALRMLIRSFGPRFVLPALAAAEFADRDKYATQTDAGALSADESTHAAVVAAVARSNPSGGVKGSDIARAESWHRGWSGNDLRAAVLGANDGLVSNFCLVMGVAGAGASNKTILLTGLAGLIAGASSMALGEWLSVTNARELAQTQIARESEELQRTPKAELRELALIYQAKGLDKDDAHRLAEEMMRNRDKALDTLTREELGLDPEDLGGNPWRAAGTSFGLFALGAIFPAVPFFWSHGLVGIGISVSFSVLCLTVIGVVTSLFNGRSPWFSVIRQIVIGCVAAAFTYGAGALLGVSMS

SEQ ID NO: 40354 - protein, 208 aa, Eucalyptus globulus
SAGTVTAYYLSSQGPTHDEIDFEFLGNLSGDPYILHTNVFTQGKGNREQQFYLWFDPTRNFHTYSVIWKPQHIIFLVDNIPIRVFKNGESIGVPFPKSQPMKIYSSLWNADDWATRGGLIKTDWSKAPFTAYYRKFQATACTWSTGSSSCEIGRPASYSGSTWKINELDAYGRRRLRWVQKYFMIYDYCSDGKRFPQGIPAECKRSRF

SEQ ID NO: 40355 - protein, 260 aa, Glycine max
  misc_feature (87)..(87): Xaa can be any naturally occurring amino acid
  unsure (1)..(260): unsure at all Xaa locations
IRLELEPLEPSKHLQLQTNTLHNFAFSLFQCPLLPSPPPLSPPSRSFPSSLPPLPTSSPAPPPPPAPSPSPNSAFHRPLILSPPPAXMPPPPPPSMDTCRECNIAGCLGCNFFPEEKKKQKRAKKKYRGVRQRPWGKWAAEIRDPRRAARVWLGTFGTAEDAARAYDKAAIEFRGPRAKLNFPLVDESLTLQQSEPERVQTEEEQIKTENLNQGMEMDSFGNKDTEFWDRINEADFHQLMMMMDFAGDSSDSATGNALSS

SEQ ID NO: 40356 - protein, 459 aa, Debaryomyces occidentalis
MIKNGLPHEPEFQQAYNELVSALEESTLFTEKPEYKKVIPVVSIPERIIQFRVAWENDNGDVEVNNGFRVQFNSSLGPYKGGLRFHPSVNLSILKFLGFEQIFKNALTGLSMGGGKGGCDFNPKGRSDGEIRRFCVAFMRQLARYIGADTDVPAGDIGVGGREIGYLFGAYKQMQNNWYGVLTGKGLTWGGSLIRPEATGYVSFTTLKKMIEKATNGKESFKGKRVELSGSGNVAQYAALKVIELGGIVVSLSDSKGSIVSKNGIVPEQVLEIAAAKLKFKSLEEITKESVKLFSGENSVEYLAGVRPWAKVGHFDVALPSATQKEVSGEEEAKALVEAGCKYIAEGSNMGSTKEAIDVFEANRSNNVWYAPGKAANCGGVAVSGLEMAQNSQRVQWSAEEVDAKLKNIMYTCFDNCYDPAIKYSAEKNADGLPSLLKGANIASFIKVADAMFDQGDVY

SEQ ID NO: 40357 - protein, 486 aa, Pasteurella multocida subsp. multocida str. Pm70
MGGISMQQFSLLKTKAYINGEYVQAKEHKTFAVTNPANQQIICELPDLSAEETEYAIACAAQAQKKWQKVTPKERANLLRRWYNLVIENQEELAQLLSLEQGKPINESRGEILYGASFIEWFAEEAKRIYGDVLPQDKENHRLLVIKQGIGVVAAITPWNFPNAMITRKAAPAFAAGCAMVLKPAQETPLSALALAELAHQAGLPAGLFNVITSTRSVEIGKVLTEHPTVRKVTFTGSTRVGKILMAQSASTVKKLSLELGGNAPSIVFDDADLENAIEGIIASKFRNSGQTCVCTNRIYVQAGIYDRFVELFSAKVAAFKVGSANEAGVNIGPLISQSAVNKIQEHIDDATAKGANLVIGGKLHTRGGTFFEPTVLRDVTQAMLVAKDETFAPLAPVFKFDTEAQVIEMANDTEFGLASYVYTQDISRIWRVSEALEYGIVGINEGLISNEMAPFGGVKESGLGREGSRYGIDEFLEIKYLCLKV

SEQ ID NO: 40358 - protein, 144 aa, Eucalyptus globulus
DFHTYSILWNPQSIIFSVDGTPIREFKNLESKGVAFPKSQAMWIYSSLWNTDDWATRGGLVKTDWTQAPFTASYRGFNDEQACVGSSGSSSCSSSSGDKSWLSQSLDATGQQRIKWVQKNYMIYNYCADTKRFSQGFPPECSLS

SEQ ID NO: 40359 - protein, 714 aa, Cryptococcus neoformans var. neoformans B-3501A
MAQMLNQAVTAVTGDAKYRQMAENTIEQTSKTPLTTYFGVKVPETDVALRAGARGPTLLEDFHNREKIQHFDHERIPERVVHARGSAAHGEFKLHTPLTGITTAKVLTDTSKVVPAYVRFSTVVGSRGSADTVRDVRGFATRFYTDEGNWDLVGNNIPVFFIQDAIKFPDVIHALKPEPHNEMPQAQTAHDNAWDFISLHQQATHMQQWVTSDRAIPRSYRMMQGFGVHTFRLINEEGKSTFVKYHWIPHLGIHSLVWDEALKIAGQDPDFHRRDLWDAIEAKAYPKWELGVQLIKEEDEHKFDFDILDSTKIIPEELVPVQKIGTLTLTRNPVDFFAEVEQVAFCTQHIVPGMDFTDDPLLAGRNFSYADTQISRLGANWHDLPINRPICPVMTNFRDGQMSMFSKTNRTPYHPNRHDSLPLTSSNNGGFQSYREKISGVKERLNGPKFQEFYSQATLFWNSMSETEREHIIAAYNFELSHCAEDIVIQNVINSLNEIDHGLATSVHATFPHLTLPEAKPTHNKKSEYLSQINGKHQVFTASGRRIGIYLVPGYTYSQVVPLLAAFEADGCMVKFIGPTLGPIKASNGQSFTAEFTFEGCRTTFFDAIVFVGGPDDSFIAKLKIGRLIHAAREAYMHLKPIGVLGNATQWMVNTCLPGDFSEKTKTESSVVVENGVVFAPGDPTLHSIKFAKQFLEGVAHHRVWDRQVAHIAA

SEQ ID NO: 40360 - protein, 443 aa, Staphylococcus epidermidis RP62A
MKNYDLIIIGFGKAGKTLAAHAASHGQKVAVVEQSTKMYGGTCINIGCIPTKTLIHDGIEGSSFKEAITRKKEVVQALNNKNYQGLNSKDNIDVLNYKANFISNEVIELQDNNGTIQETITADKIVINTGSRANIPDIKGIDTAQNIYDSTGLLNIDYQPQELVIIGGGYIALEFASMFANFGTHVTILERGDAIMTNEDQDIANLIVKDLQDKGVTINTNTSTIAFSNNKDQTIIHTNHGEISADTVLLATGRKPNTNHLGLENTDVKIGKQGEVIVNTHLQSTVKHIYAAGDVKGGLQFTYISLDDYRIIKSHLFGDGSRTTENRGAIPYTVFIDPPLSRVGLIASEAKLQGYDILENKVFVSNIPRHKINNDSRGLFKAVINKDTKEILGASLYGKESEELISLIKLAIDQHIPYTVLRDNIYTHPTMTESFNDLFLEPL

SEQ ID NO: 40361 - protein, 446 aa, Oryza sativa (japonica cultivar-group)
MPMRDAARAACVSHSFLSSWRCHPNLNFSSEALGLSKNAYGNEELAGLFYSKVNHILKRHSGIGVKKLTIKVYSDYSGKGSSYLNNWLQIAVKPGIEELIIALTQFQAKYNFPCSLLSNGSGDSIQYLHLSNCSFHPTVTLSGLRSLTRLYLCRVRITENELGCLLSHSLALEQLEIRYCNRIVCLKVPCLLQRLISLKVFGCDKLKLIENEAPNVSMFAFQGDKTELKLGETLQIKSLCMVRSGYVYHARAELPSIMPNLESLALKSCKETAFAPKLCSKFLCLRHLSIGLIGFFPAYDYLSLASYIYAAPSLETFDLNVMQRNVQSVSIFAHPADLRSIREEKHHNLKSVTVTSFISVKSLVELTCHILESTASLECLTLDASQTGFRCDTPGSKISKCPPLDRDIIMEGHRGVLAIRRYIQPRVPSTVKLTVLEPCSCHSTEL

SEQ ID NO: 40362 - protein, 77 aa, Arabidopsis thaliana
MKLSMRLISAVLIMFMIFVATGMGPVTVEARTCESQSHRFKGTCVSASNCANVCHNEGFVGGNCRGFRRRCFCTRHC

SEQ ID NO: 40363 - protein, 481 aa, Glycine max
MPPKPLDYGSINENVKKSQYAVRGELYLRASELQKEGKKIIFTNVGNPHALGQKPLSFPRQVVALCQAPFLLDDPNVGLLFPADAIARAKHYLSLTSGGLGAYSDSRGLPGVRKEVAEFILRRDGYPTDPELIYLTDGASKGVMQILNTIIRGQDDGILVPVPQYPLYSATIALLGGTLVPYYLEETANWGLDVNELRQSVEQARFKGITVKAMVIINPGNPTGQCLSEANLREVLQFCYQENLALLGDEVYQTNIYQDERPFISSRKVLMDLGPPISKEVQLISFHSVSKGYYGECGQRGGYFEMTNIPPETVDEIYKVASISLSPNVPAQIFMGVMLHPPQPGDISYDKFVRESTGILESLRRRARLMTDGFNSCRNVVCNFTEGAMYSFPQIRLPPRALEAAKQAAKVPDVFYCLKLLEATGISTVPGSGFGQREGVFHLRTTILPDEEDMPAIMDSFKKFNDEFMEQYEDNRGYSRL

SEQ ID NO: 40364 - protein, 540 aa, Mycoplasma gallisepticum R
MTSKKTKYIFVSGGVYSSVGKGLIVASIASIFKHQNFKINILKLDPYLNVDSGTMSPYEHGEVFVTSDGTETDLDLGYYERFLVQDLNERSSITSGKVYFSVINKERKGEYLGKTVQLIPHVTNEIKRRIALAATDENNQPYDLVFCEIGGTIGDLESLPFIEAIKQIIRENDKHDTAFIHVVPIISLFNGEQKTKPLQHSLKELNNLGINPDFLVIRSKESLDLKTKHKIASATYLDKDHIFNSVDLNNTYFLPDYLNQQKIHEKIANKLQITIDPKIKLSAWDDLAKKINNQNNLVRKIAIIGKYTQFKDAYLSLIESLNLAGYHNHVKLEIDWIESSLYDDASLEEVNHKLKDVHGIIVPGGFGSRGVEGKIKFIQVARTKKIPFLGICLGMQLACVEYARNVLGMTDANSSEFNSQTTYPIFKIMNPDDLNYGGSLRLGDYLVSLKDQTLTKAIYQQDSIKRRHRHRYEFNNDYLNQFNDGEFIVSGIYLQENLVETIELKNHPFFIGCQYHPEFSSKITAAETLFDSLVKKIKML

SEQ ID NO: 40365 - protein, 235 aa, Pisum sativum
SKMRAILIDWLVDVHTKFELSPEALYLTINIIDRFLAISLVSRRELQLVGISAMLMASKYEEIWPPEVNDFVCLSDRAYTHEQILIMEKTILGKLEWTLTVPTPFVFLVRFLKAASVSLPSSDLALENMAHFLSELGMMHYATLMYSPSMMAAAAVYAARCTLNKSPVWDETLTMHTGYSEEELMGCARLLVSFHSASGSGKLKGVYKKYADPQKGAVAVLPPAKNLVSSAAVGS

SEQ ID NO: 40366 - protein, 313 aa, Schizosaccharomyces pombe
ERRKMIERESYKQVTTHTMQSWTSSLIRSLANKLAATKTDQRIPTLTPEHALSVYSKASKRLFMMDYDGTLTPIVRDPNAAVPSKKLLDNLATLAADPKNQVWIISGRDQQFLRNWMDDIKGLGLSAEHGSFVRKPHSTTWINLAELLDMSWKKEVRRIFQYYTDRTQGSSIEEKRCAMTWHYRKADPENGAFQALECEALLEELVCSKYDVEIMRGKANLEVRPSSINKGGIVKQILSSYPEDSLPSFIFCAGDDRTDEDMFRSLHKNTRINKETSFAVTIGSDKKLSIADWCIADPANVIDILADLANFTN

SEQ ID NO: 40367 - protein, 484 aa, Sinorhizobium meliloti
MYLGLDLGTSGVKAMLMDGEQRIIGSASGALDVDRPHPGWSEQDPADWIRAAEEAIARLRETHAQALAAVRGIGLSGQMHGATLLDEGDAVLRPCILWNDTRSFREAAALDGDPQFRALTGNIVFPGFTAPKLAWVRENEPEIFARVRWVLLPKDYLRLWLTGEHMSEMSDSAGTSWLDTGKRKWSASLLAATHLEERQMPDLVEGTDAAGTLRPELAARWGMGPGVVVAGGAGDNAASACGMGTVGEGQAFVSLGTSGVLFAANASYLPNPESAVHAFCHALPNTWHQMGVILSATDALNWHSGVTGRSAAELTSELGESLKAPGSVTFLPYLSGERTPHNDATIRGVFAGLGHESSRAVLTQAVLEGVSFAIRDSLEALRAAGTKLKRVTAIGGGSRSRYWLSSIATALNLPVDLPADGDFGAAFGAARLGLIAATGADPAAVCTAPETAETIAPEASLVPAYEDAYQRYRRLYPAIKEAAL

SEQ ID NO: 40368 - protein, 77 aa, Glycine max
MKLSMRLISAVLLLFMIFVATGMGPVTVEARTCESKSHRFKGTCVSSTNCGNVCHNEGFGGGKCRGFRRRCYCTRHC

SEQ ID NO: 40369 - protein, 96 aa, Triticum aestivum
  misc_feature (52)..(52): Xaa can be any naturally occurring amino acid
  misc_feature (75)..(75): Xaa can be any naturally occurring amino acid
  misc_feature (78)..(79): Xaa can be any naturally occurring amino acid
  misc_feature (81)..(81): Xaa can be any naturally occurring amino acid
  unsure (1)..(96): unsure at all Xaa locations
MDYMNGPGRNHLFVPGPVNIPDQVIRAMSRQNEDYRSPAIPALTKTLLEDVXKKIFKDHHRHPFLFPTTGTAPGXSAXXKXFPRGTVLPPGELNRL

SEQ ID NO: 40370 - protein, 910 aa, Oryza sativa
  misc_feature (15)..(15): Xaa can be any naturally occurring amino acid
  misc_feature (124)..(124): Xaa can be any naturally occurring amino acid
  misc_feature (141)..(141): Xaa can be any naturally occurring amino acid
  unsure (1)..(910): unsure at all Xaa locations
SKEQQQQRGYQLPRXDSRGSLEVFNPSSASSFRTAAAAPKSASPFLAIPDREEDNVVAQQRAAEWGLVLQTDHHTGLPQGVSARPSSGSARTSSEDNPQQQAERRRHPHGCRKELRAALTVFQXQTFVVSDATHPNHPIMXASAGFFNMTGYTSKEVVGRNCRFLQGSGTDPHEIDKIRQSLANGSNYCGRILNYKKDGTPFWNLLTIAPIKDEDGRLLKFIGMQVEVSKYTEGKKDTVVRPNGLSESLIKYDARQKDHARSSVSELLLALKNPRSLSESSNNTLKRKSQESLSMSMTEVPSKRSSESGSRRNSRSGTRSSLQKINEVPDQGNRTRKSGLRAFMGFLGMGHGSVEKNMLKPRDEDPLIDSDDERPESFEDEFRRKEMRRGIDLATTLERIEKNFVITDPRLPDNPIIFASDSFLQLTEYNREEILGRNCRFLQGPETDRATVRKIRDAIDNQAEVTVQLINYTKSGKKFWNLFHLQPMRDQKGDVQYFIGVQLDGTEHVQDDAAKEGVVLVKKTADNIDEAAKELPDANLRPEDLWANHSKVVLPNPHMKDTASWRAIQKVLESGESIGLKHFRPVKPLGSGDTGSVHLVELLNTGEYFAMKAMDKSIMLNRNKVHRATAERQILDLLDHPFLPTLYASFQTKTHICLITDYCPGGELFVLLDNQPLKVLHEDAVRFYAAEVVVALEYLHCQGIIYRDLKPENILLHRDGHISLTDFDLSCLTSCRPQVFLPEDADEKKGRKNGSYPIFFAEPMRASNSFVGTEEYIAPEIITGAGHTSAVDWWALGILLYEMLYGYTPFRGKTRQRTFANILHKDIRFPASISVSLAARQLMYRLLHRDPANRLGSYEGANEIKGHPFFRGINWPLIRATAPPKLEIPLFSKDDMEKKGLVTNNRTDMF

SEQ ID NO: 40371 - protein, 498 aa, Arabidopsis thaliana
  misc_feature (171)..(171): Xaa can be any naturally occurring amino acid
  misc_feature (185)..(185): Xaa can be any naturally occurring amino acid
  misc_feature (329)..(329): Xaa can be any naturally occurring amino acid
  unsure (1)..(498): unsure at all Xaa locations
MANSSIFYKDNESDYESSTVGPDSSRRTSWLSSSFTASPSCSSISHLSNHGLNSYNQSKPHKANQVAWEAMARLRRCCGRAVGLEHFRLLKRLGSGDIGSVYLCQIRGSPETAFYAMKVVDKEAVAVKKKLGRAEMEKKILGMLDHPFCPTLYAAFEASHYSFLVIEYCPXGGDLYAVRLRQPSXKRFTISSTRFYAAETLVALEYLHMMGIVYRDLKPENVLIREDGHVMLSDFDLSFKCDVVPQFLSDNDRDRGHQEDDDDISIRRKCSTPSCTTTPLNPVISCFSPTSSRRRKKNVVTTTIHENAADLSWWIPIQYLPNQINARSXSFVGTHEYLAPEVISGQGHGSAVDWWTYGIFLYEMIFGRTPFKGDNNEKTLVNILKAPLTFPKVIVNSPKEYEDMVNAQDLIIKLLVKNPKKRLGSLKGSIEIKRHEFFEGVNWALIRSIKPPWVPKEETSHKTKGDNRSVNYYLPPRFMMSRKERNEPYHVSNYFDYF

SEQ ID NO: 40372 - protein, 141 aa, Triticum aestivum
  misc_feature (51)..(51): Xaa can be any naturally occurring amino acid
  misc_feature (114)..(114): Xaa can be any naturally occurring amino acid
  unsure (1)..(141): unsure at all Xaa locations
MLLATRLYGQKASIGASLNIPHLARRASTWANVPQGPADAILGITEAFRSXNSKEKINLGVGAYRDDHGKPFVLNSVRAAENLIVSSGLNKEYSGITGLPDFTKASATLAFGAXSNVPERTVTSQTISGTGALRIGGEFLS

SEQ ID NO: 40373 - protein, 335 aa, Ashbya gossypii ATCC 10895
MSAFMARKSNIGPEQSASVEKNNVELEQKVAIQSIRMFLKSKTSYDVLPVSYRLIVLDTSLLVKKSLNILLQNNIVSAPLWDSGTSKFAGLLTSLDFINVIQYYFSNPDKFELVDKLQLNGLKEIEKAIGVEPPDRGSIHPFKPLYEACCKMIESRARRIPLIDQDEDTHREIVVSVLTQYRILKFVALNCREIRYLKRPLHELNIITSTKMLSCSMSTPVIDVIQLLTTGGVSSIPIVDEQGKLINVYEAVDVLGLIKGGIYNDLSLSVGEALMRRSDDFEGVYTCTMGDKLSTILDTIRKSRVHRFFIVDENGLLTGVLTLNDILKYILYAEN

SEQ ID NO: 40374 - protein, 363 aa, Schizosaccharomyces pombe
MSKKPVLNLDTSNGFSEEYISHPERNDNQGIVEITDLVFSSESKLTQRKESRDSKTFVPSFLEELDDDHLHELVTNGGILYMNSLGEGVSGSVRKCRIRGTQMIFAMKTVKAAPNTALQKQLLRELKINRSCTSPYIVKYYGACYNNAECQLNIAMEYCGAGSLDAIYKRVRSQGGRTGERPLGKIAFGVLSGLSYLHDRKIIHRDIKPSNILLTSKGQVKLCDFGVSGELVNSLAGTFTGTSYYMAPERISGGSYTISSDIWSLGLTLMEVALNRFPFPPEGSPPPMPIELLSYIINMPPPLLPQEPGIKWSKSFQHFLCVCLDKDKTRRPGPQKMLTHPWVKAFERIHVDMEEFLRQVWSD

SEQ ID NO: 40375 - protein, 382 aa, Glycine max
MASIATFFNKFLYFFILLVHLGCFIFTTAGKQSPPSKKRKTSPLSQPSSPSHTKFKTHKALSSSWHFIKHLFSTKSCKTPNTATTQSSPQSTATTTTTTASAAAASSLISLSQPDPDRNQPVSCPESGISTDTNLFFPLRNDIFPCTACGEIFQKPHLLEAHQTLKHAVSDLPGSDPGHNIVQIIFKSGWPESKPFPTITRILKIHNSPKILSKFEEYREAVKSKAARHGAHTRRRDERCIADGNELMRFHCSTFLCDLGHNGDSAICSQQFCNICGIIKSGFSPKLDGIATLSTSWRAHVAIPEDIEREFRFMNVKRAMLVCRVIAGRVGSDSDEVEKEDGGFDSVMASGESGVYTRLDEEELLVFNPRAVLPCFVIVYSV

SEQ ID NO: 40376 - protein, 322 aa, Glycine max
  misc_feature (236)..(236): Xaa can be any naturally occurring amino acid
  unsure (1)..(322): unsure at all Xaa locations
MEKIPNAGFTRVFGFPMEMKNEDQITQQAQRPKYDCLLFDLDDTLYPLNSGLANAIDKNIKDYMVEKLGAEPSKTGELVNLLYSNYGTTIAGLRAIGYDIDYEEYYSFVHGKLPYENLKPDPVLRNLLLSLPYRKLIFTNSDKVHTIKALERLGLEDCFEGMICFETLNPIQKSTVFYYEADIKFEGSKSINPTPKNGVECSEIFDIIEHFAQPEPSAVLPETPIICKPSEHAIKXPLKMANLNPQRTLFFEDSVRNIQSGKRLGLHTVLVGRSYRVKGADYAMESIHNLKEAVPELWEADIKAQVACPGTEKLAVETSDIA

SEQ ID NO: 40377 - protein, 904 aa, Xanthomonas campestris pv. vesicatoria str. 85-10
MNEYRSSLVFATPDLPLRDDVRRLGALVGDLLAEQVSAEFLDEIERVRTTAISRRESDAPPSTLSEQLTGRQPRDAEALVRAFSTYFQVVNIAERVHRIRRRREYQRSGTDTPQPDGLHDALRRLKAQGVTLDELSQWLPRIDVEPVFTAHPTEAVRRALLEKEQLMVASLVDNLDGMRTPNERASDAARFRMALTASWQTADSSPVRPTVDDEREHVGFYLTQVLYRVIPVMYETLEHAIEETYGSVPALPRLLRFGTWVGGDMDGNPNVDAKTIAGTLDAQRRAVLDRYQKELWQLASLLSQSTTLVQVSAELTAQLERYRALLPDAAARSRPRHGDMPYRLLNDLMRARLQATLDDAEGAYSAPSELEHDLQLILDSLQANKGLHAGWFAVRRLLWRVRSFGFHLARLDVRQESSVHARAVADALGQTDWDAQDATQRAAVLGPYAAGQEPLPRVDDEGNARLDAVFAALADARTRHGADALGSYIISMAHNRADVLTVLALARRGGLVDDAGAVPLDIVPLFETVDDLRGGTGTVQDLLADPVYRQHLAARGDTQMVMLGYSDSGKDGGIAASRWGLQRAQVELLEAAAELGVRLTFFHGRGGSIARGGGKTSRALDAAPRGSVDGRLRVTEQGEVIHRKYGIRALALRSLEQMTGAVLLSSLRPRAPEPREAHWRPVMDLVAERSTVAYRAFVGAPEFMQYFRLATPIDVIERMTLGSRPSRRLGQDAALSNLRAIPWVFAWSQARAVIPGWYGVGSGLQAAVDAGHEDTLREMAQDWPFFRTFLDDIAMVLSKGDLNIAELFSRLSGDLHTRFFPLIRDELALTKAWVKALLQQQSLLQHDPRLALSIRLRNPYIDPISVLQVDLLQRWRATDGEDEALLRALVACVNGVSQGVQNTG

SEQ ID NO: 40378 - protein, 693 aa, Photobacterium profundum SS9
MYFRKRPSSRFLTFESFEFFGEINMEQNGLSRKVLANAIRALSMDGVQQANSGHPGAPMGMADIAEVLWRSHMNHNPQNPQWADRDRFILSNGHGSMLIYSLLHLTGYDLSISDLKNFRQLHSKTPGHPEYGYAPGIETTTGPLGQGLTNAVGMAIAEKAMADQFNRDGHKVVDHHTYTFLGDGCMMEGISHEASSLAGTLGLGKLVAFWDDNGISIDGKVEGWFTDDTPKRFEAYGWHVIPAVDGHDADAINAAIEAAKAETGKPTLICAKTIIGFGSPNKAGTHDCHGAPLGAEEIAAAREFLGWNHGPFEIPTDIAAEWDAKEAGSTKESAWDEKFAAYAAAHPALAAEFKRRTVGDLPANWEAETSKIIADLQANPANIASRKASQNALEAFGKLVPEFMGGSADLAPSNLTMWSGSKALEAGDFSGNYIHYGVREFAMTAIINGMALHGGFVPYGATFLMFMEYARNAMRMAALMKIQNIQVYTHDSIGLGEDGPTHQPVEQIASLRLTPNMSTWRPCDQVESAVAWKLAIERKDGPTALIFSRQNLAQQPRTDAQVANIAKGGYILKDCEGKPELILIATGSEVELVTEAYAQLTAEGRKVRVVSMPATDTYDKQDAAYRESVLPSDVTARIAVEAGIADFWYKFVGFDGRIIGMTTFGESAPAGELFKMFGFTVENVVNTAKELLA

SEQ ID NO: 40379 - protein, 316 aa, Photobacterium profundum SS9
MSTKLEQLRALTTVVADTGDIEAISKYQPEDATTNPSLILKAAQIAEYAPLIDASIAYAKAQSNDKTQQVADTCDMLAVNIGKEILKVVPGRISTEVDARLSYDTEGSVIKARQLIKMYNDAGITNDRILIKLASTWEGIRAAEVLEKEGINCNLTLLFSFAQARACAEAGVFLISPFVGRIMDWYKAKEGRDFESSEDPGVVSVTGIYDYYKTYGYNTVVMGASFRNIGEILELAGCDRLTISPNLLQELEDATGEVVEKLIDTNGTKERPAAMTHAEFLWEHNQDPMAVEKLADGIRNFAVDQGKLEVMIAERL

SEQ ID NO: 40380 - protein, 365 aa, Enterococcus faecalis
MAKRIVGSTPKQDGFRMPGEFEPQEKVWMIWPERPDNWRDGGKPVQEAFTNVAKAISQFTPMNVVVSQQQFQNCRRQLPPEITVYEMSNNDAWVRDCGPSFVINDHGEIRGVDWTFNAWGGLVDGLYFPWDQDDLVAQKICEIEHVDSYRTDDFVLEGGSFHVDGQGTVLTTEMCLLSEGRNPQLSKEAIEQKLCDYLNVEKVLWLGDGIDPEETNGHVDDVACFIAPGEVACIYTEDQNSPFYEAAQDAYQRLLKMTDAKGRQLKVHKLCCPVKNVTIKGSFKIDFVEGTMPREDGDICIASYMNFLITNDGVIVPQYGDENDHLALEQVQTMFPDKKIVGVNTVEVVYGGGNIHCITQQEPKR

SEQ ID NO: 40381 - protein, 460 aa, Cryptococcus neoformans var. neoformans B-3501A
MADSIASASNSGAESIAIAARRAFEASQLVNPSERDVALKAIRETLQASKDEIIAANKKDMEAAEALAATGKLSSSLVSRLDLGRPGKFEAMLQGITDVAALPAPTGIVTFAKEIGPELELHRVTCPVGVLLVIFEARPEVVVNIAALAIKSGNAAILKGGKESINTATLLSSLISQALAKTSIPPAFVQSVSTRSEISSLLAQDKYIDLVMPRGGNELVRSIQNNTRIPVMGHADGICAVYLDESAVQEKAVRIAVESKIDYMAACNAAETLLIHSSLLTTVWPAVASALMSNSVCLRCDAATLSALRDANVPKTSEFVTASSPADYSTEFLGPTIAVKAVESVQEAIQHINSHSSHHTDSIVTEDEASMSAWCRGLDSANCFVNASTRFADGTRYGLGTEVGISTGKTHARGPVGLDGLIIYKYMMRSRKQDGSVIADHEKGGKGYTHKDLVKGEPPF

SEQ ID NO: 40382 - protein, 591 aa, Cucumis melo
MATKVANQPLFPMPFPAIFFIFSIFFGFGITLSQAASQTRHFKWEVEYMFRSPDCKENLVMGINHQFPGPTIRANVGDTVVVELINKLSTEDVVIHWHGILQKGTPWADGTASISQCAINPGESFTYQFVVDKPGTYFYHGHLGMQRAAGLYGSLIVDLEEGKKEPFHYDEEINLLLSDWWHESVLKQEVGLSSSPMRWIGEPQSILINGRGQSNCSIGAKYMKNMEQCKLSGSEECAPFILKVKPNKTYRIRIISTTSLSALNFAIGNHKLLVVEADGNYVQPFLTSDIDIYSGESYSVLINTDQNPSQNYWVSLGVRGREPKTPPGLTLLNYLPNSFSKLPISPPPETPKWNDYDRSKNFTYRILAAMGSPKPPVKSTRRIFLLNTQNKMNGGYTKWAINNVSLTLPSTPYLGAIKIGINDTFDQNPPPETYPENYDIHKPPPNGNTITGNGVYRFQLGEIVDVVLQNANTLNDKHSEIHPWHLHGHDFWVLGYGEGKFSAAVDETKLNLKDPPLRNTVVIFPFGWTVLRFVADNPGVWAFHCHIEPHLHMGMGVVFAEGVDKVGRIPTHAMACGGTAKALIQNPTQKP

SEQ ID NO: 40383 - protein, 168 aa, Pirellula sp. 1
MTERAVLAGGCFWGMQDLIRKLPGIESTRVGYTGGEVPNATYRNHGNHAEGIEILFDPEKTSYRQLLEFFFQIHDPTTPNRQGNDRGPSYRSAIYYVDEEQKQIALDTIADVNASGLWPGKVVTEVEPVSDFWEAEPEHQDYLEKVPNGYTCHFPRPNWVLPKRAATE

SEQ ID NO: 40384 - protein, 458 aa, Pirellula sp. 1
MMPSFYHNTSSVPSVRNRFRCVNMLGPPSISPLVPSVPEMPLNFASLRMAPRLTPIRPNRLLNRLPLMLVALAVAVVFSSFEARADETAQDSARSLSRAFRDAAREANPSVVTVFSYGQNQTLSGETQDEPKEETDEESPDESVGPMPPKQSEDGEFELSGLGSGVIINPFVDATDHDEEKDESIYWVMTNNHVITNAKKVVVQLPNETELVAKKVHGDSASDIAVLQITSDEPLKIAQYGDSKSLDIGDWVLAIGSPFKLEATVSAGIISAKNRRLDRIRRSRLLQTDAAINPGNSGGPLVDLDGNVIAINTAIATRSGSYQGIGFAVPIDQAKWIARELASFGTVRRSTMGITTVELNAKMSKMFKLQEGMGVLVYEIIRDSPADRAGLKKLDVITEFAGQEFRKAIDLREAIEREPVGSTQTLKVIRKGEEIELEAILAPVDDPTATPDDEAEEE

SEQ ID NO: 40385 - protein, 594 aa, Kineococcus radiotolerans SRS30216
MCGLCGEVRFDGRAADVAAVQRMSETMAARGPDGEGVWAQGRVAFGHRRLSVIDLSACGAQPMQDPELGLTAVFNGCIYNYPELRAELAGHGYRFTSTSDTEVIVKGYHRWGVDVVDHLVGMFAVVLHERDSGRVVLMRDRLGIKPLYLAETPGRLRFASTLPALLAGGDVDTTIDPVALHHYLSWHAVVPAPRTVLQGVRKLPPATVRVLEADGTSREHRYWAPDHVRREEFAGFSERDWEDAVLESLRTAVRRRTVSDVPVGVLLSGGLDSSLITALLAEQGQTDLATYSIGFESVGGRGGDEFEYSDVIAERFATDHHRIRVSGDELVGALGHAVGAMSEPMVSHDVAAFDLLSQQVSQSIKVVQSGQGADEVFGGYHWYPPLAGLTPQQGVDVYARAFFDRDHAGMAQVLDPRWLTATDVSREFLAEHFARPGADTAVDAALRLDTEVMLVDDPVKRVDNTTMAWGLEARVPFLDHELVELAAAVPPELQLSGGGKGILKRVGYRVIPREVIDRPKGYFPVPAITHLEGKVLGTVKDALTSRAAQDRGLFRPEYVQGLLRDPNGELTPLRGNKLWQLGLLEMWLQQHGIG

SEQ ID NO: 40386 - protein, 637 aa, Arabidopsis thaliana
MMMMSNLPNDLVEEILSRVTVTFMRTVRSICKKWNALTKDRSFTNKYIRNIAALGEREFLMIKEFSIYLVGVNLHGIQNNNFDLSIELKGLWFGTRIVRNQDGSNPVIIIGQLTEEKLAMLLKRWDTCEVEIWVTDKIEPDVSWSKFLKVGIKPRFDFANFVVIDVVKKVALVFDKNKAEKFQYSYNIAYIIGEKASPEELSSHRERKKRVESCLKHEKASPQGFVIGFLPKRPHTSCRDCIQSQPYGQASKAHACGNLRSCQDRLYPTISPSNQRPRTWASFLRHILISNLPDELVEEILCRAPVTSLKAMRSTCKKWYVLTKDQRFAKKRGKEFLMIMNRRVYLIGVNLHNNIDLSIKCRGRLISRDETAQGFYVSQVFHCNGLLLSVSGKTIDDTRLVVCNPYGVKPKWINPKDNYGRLDIFSLGFDKLCGSYKILRIYDFDNKLQIYDLSSNSWMIPRDTLGRDIEYMQNGVSSKENTYWCARDKQSQYCFLFCFDFTRERFGPRLPLPFNGAYVSLSAVKEEQLAVLFQPSDKSEIEIWVTNKIEPEEVSWSVFLKVEMKLRVLSWNFLIDKEKKFAVVFDKDKAKGFKTNYDIAYVIGENGYYRRVDLRESPNKPLCRIVSCYVPSCVQIE

SEQ ID NO: 40387 - protein, 620 aa, Dechloromonas aromatica RCB
MKFRTKTILGVALIEGVLLAILGIGILSLFRDANEQQITRRAAVSARLLAASARDAMVAYDLATIDGIASDVLETGEISYVRFLDGQGRVMVERGALPSQPEFAAGVSQTEDGVLDRAVPITVSGESFGQIQFGIDIAPFTLALNRTQRWFMALSALEMGLVAFFSLILGTYLTRQLTALRNASREIAEGRFDRPLKIDGNDELAETAQAFNHMVEKVAGSISSLRESKAKLRQAKEEAESANAAKSQFLANMSHELRTPMTGIIGMSFLMMRTELDEQQRDFADTIQRSANALLIIINDILDLSAIEAEKLRLAHANYSARKVIGEVLALISPSADAKNISLISQIADDLPEILVGDAIRLRQVLLNLLGNAIKFTEQGSVTLEVAHQPTDDGRQRLNFVVRDTGIGMTPGVVNALFTPFFQADLSNTRRFGGTGLGLSISRRLIELMHGEISAESEPDVGSTFRFHIVADLPETSVAEEQPQKADGERHFDARRILVVDDRQINRKVVGAMLERLGCHVLMAEHGEEALARLATEVVDLVLMDCQMPVMDGFEATRRIREGEDSRIDPATKIIAMTANAMEGDKQRCLAAGMNDYISKPIFAAELERILTTWLPATPA

SEQ ID NO: 40388 - protein, 363 aa, Photobacterium profundum
MTKQLSTSPKQDGFRMPAEHEPQSAIWMAWPERTDNWRYGAKPAQATFVEVAKAIAKTTPVTMVVSAEQFENARVVLPSYIQVLEMSTDDSWMRDIGPSYVVNDHGKRRGVDWHFNALGQIGDGLYSPWDKDDAVARKVCETLGDDSYRAPIVLEGGSIHVDGEGTLYTTEECLLHPSRNPDLTREEIEDVLKVTLSIEKVIWIPQGLYNDETNGHVDNLIHVVRPGEIALTWCDDETDPQYLISRKAMDVLLTETDAKGRQIKIHKLPMPGPLYISEDEANGVDVSEGMERVPGERLAGSYANYLISNEHIIYPLLDEKHDKDVAMLLAKLYPNYEVTGVNAREILLGGGNIHCITQQIPKV

SEQ ID NO: 40389 - protein, 250 aa, Physcomitrella patens
MAKSYPNVSEKYAALIEKARRKIRGMVAEKNCAPIILRLAWHGSGTYDQESKTGGPLGTIRFGQELAHGANAGLDIAVNLLQPIKEQFPELSYADFYTLAGVVAVEVTGGPTIPFHPGRKDHETCPVEGRLPDATKGLDHLRCVFTKQMGLTDKDIVVLSGAHTLGRCHKDRSGFEGAWTPNPLRFDNSYFQVLLEGEKDGLIMLPSDKALLDEPKTRELVELYAKDEDKFFEDYAESHMKLSELGFAEA

SEQ ID NO: 40390 - protein, 77 aa, Arabidopsis thaliana
MKFSMRLISAVLFLVMIFVATGMGPVTVEARTCASQSHRFKGTCVSASNCANVCHNEGFPGGDCRGFRRRCFCTRHC

SEQ ID NO: 40391 - protein, 1108 aa, Chlorobium tepidum TLS
MPKKQAVTSYQPESLWYKDAIIYELHVKTFCDSDNDGIGDFRGLKSRLGYLESLGVTAIWILPFYPSPLRDDGYDIADYKSVNPDYGTIEDFRDFLEEAHRRGIKVITELVVNHTSDQHEWFKKARKAPKGSPERDFYVWSDDPTKYGEARIIFQDFEASNWTWDPVAGQYYWHRFFHHQPDLNFENPAVHQALFDVLDFWLGMGVDGLRLDAVPYLYEAEGTNCENLPQTFEFLRKLRSYVDEHYPNRMLLAEANQWPEDSAAYLGKGDMCHMNFHFPLMPRMYMALATEDRFPIIDILAQTPEIPESCQWASFLRNHDELTLEMVTDEERDYMRRVYAHDVKARINLGIRRRLAPLMSNDRRRIELMNIMLLSLPGTPVLYYGDEIGMGDNYYLGDRDGVRTPMQWNADRNAGFSRANPQRLLLPVIIDPEYHYEAVNVEVQESNPNSLLWWMRHTIATARRFRAFSRGTIEFLNANNPKVLMFIRSYEDETILTVINLSRNAQVINVDLSAYEGCVPEEIFSMNRFPRVHKTPYMVALGPYGYFWLRLIREESPADRSALLEKVALRAGSWQELFVGRSLDQFETAILPPYYKSVRWFGGKARNIIRIRVTDTVPVAGMENTAFAMTEVNYPSGENERYQLPLTFVPVERGNLADELFYRHAIARVELDGLEGFLIDASADETFRSRLLDLILHRETWSGAAGKITADAGKMLENSCLSTAGEEPPASHLMGLEQSNTSIRYGEQLCLKLYRKIDSGMAPEIEISRVLTDQTEYRNIPVYLGSFDYGKSYRERCSLGILQNFVPNESDGWQLSLGHVRRYYEDVLSRCSQGVLPPTLPELSGTTSKLPELIHELIGEFYFQMVGKLAERTAGMHRALGSVDTDAAFSPEPFTTLYQRSIYQAMTDQVKRSMIFLRESIHAVPKEARPLAHKLLDMQKEILEQFEPIRKEKIDTVKIRIHGDYHLGQVLYTGNDFVILDFEGEPARSLSERKIKRSVYRDLAGMLRSFDYAAFNVLMQNQAIRPEDRKALEPWAELWSYYVGQHFIDVYTQQTEGSGLIPKEPRQRELLLRSYLMNKAIYELNYELNNRPEWLPIPMNGILRLIRN

SEQ ID NO: 40392 - protein, 427 aa, Bordetella parapertussis 12822
MVCRPGRTIPQETAMNMPAPAATRRDRIEDELGAHNYQPLDVVLARGSGVWLYDTAGRRYLDCLSAYSAVNQGHCHPRILAAMVEQAQRLTLTSRAFRHDQLAPLYEDLARLTGAHKVLPMNSGAEAVETALKAVRKWGYEARGVPAGQAEIIVCANNFHGRTLGIVGFSTDPDARGGYGPFAPGFTVVPFGDFAALQAAVTPRTVAFLVEPIQGEAGVILPPPGYFRQVRKLCSERDIVLILDEIQTGLGRTGAFLAEAHEGIEADVTLIGKALSGGFYPVSAVLSNQAVLGIFQPGQHGSTFGGNPLACAVARAALRVLHDEGMIDNAREQGAYFMQRLRALPGPVREVRGRGLMLALELEPDAGPARAYCERLMARGMLVKDTHGQTLRLSPPLIVTREQIDWACAQLAHVLAHSAPGSSGGPS

SEQ ID NO: 40393 - protein, 402 aa, Streptomyces avermitilis MA-4680
MEFRQSSKLSEVCYEIRGPVIEHANALEEAGHSVLRLNTGNPALFGFEAPEEILQDMIRMLPRAHGYTDSRGVLSARRAVAQRYQDRGLEVDVDDVFLGNGVSELVSMAVQALIEDGDEVLIPAPDFPLWTAVTTLAGGKAVHYLCDEQADWYPDLADMAAKITDRTRAVVIINPNNPTGAVYPKEIVEGILDLARRHGLMVFADEIYDQILYDDAVHHSAAALAPDLVVLTFCGLSKTYRVAGFRSGWLVVTGPKQHARSYLEGLTMLASMRLCANAPAQYAIQAALGGRQSIQELTAPGGRLYEQRDRAWQKLNEIPGVSCVKPKGALYAFPRIDPTVHKIHDDEKFVLDLLLREKIQVVQGTGFNWPRPDHFRILTLPHADDLDAAISRIGRFLSGYRQ

SEQ ID NO: 40394 - protein, 577 aa, Candida glabrata CBS138
MSTKEFKEEIHTSTSEFTKYDSQKPYYSSGESPEPVVTKRNIFQRCVDSFKPPVDGSFDTSNLKRTLKSRHLIMIAIGGSIGTGLFIGSGQALATGGPLAVIIGWTIAGSQIVGTIHGLGEITVRFPVVGAFADYSTRFLDPSISFVVSTIYVIQWFFVLPLEIIASAITIQYWNSSIDPVVWVAIFYGVIVSINLFGARGFGEAEFVFSTIKAITICGFIILCIVLICGGGPDHEFIGAKYWHDPGALAHGFPGVLSVLVVASYSLGGTEMTCLASGETDPKELPSAIKQVFWRILFFFLASLTLVGFLVPYTNENLLGGSSVDNSPFVIAIKLHHIKALPSIVNAVILISILSVGNSCIFASSRTLCSMAHQGLIPRFFGYIDRAGRPLAGIVTNSLFGLLAFLVKSSSVSEVFDWLMAIAGLATCIVWLSINLSHIRFRLAMKAQNKTLDELEFVSAVGIWGSAYSALINVLILIAQFYISLWPIGGWTDSSQRAKKFFQSYLCALIMLLIFCIHKVYYRVSFGKWWDVKPLKDIDLETGRKNVDIDVIKAEIAERKMYLKKKPWIVRWYHFWC

SEQ ID NO: 40395 - protein, 162 aa, Zea mays
MAMRALPLTPSRSSSFGAHQTRPSGGGPRSVRAYAKGDEEGDKQSLFGSITEALDFSQVRSEKDAELLYEARESTRGGGRMTREQYGALRRKIGGTYQDFFKSYVEVDGQYVEEGWVDKTCKICKKDTRGEPRQVDKLGRYAHVACLDNPKPANFFAKIFAR

SEQ ID NO: 40396 - protein, 451 aa, Lycopersicon esculentum
MREILHIQGGQCGNQIGSKFWEVICDEHGVDPTGRYKGTAAESDLQLERINVYFNEASGGRYVPRAVLMDLEPGTMDSIRSGPYGQIFRPDNFVFGQSGAGNNWAKGHYTEGAELIDAVLDVVRKEAENCDCLQGFQVCHSLGGGTGSGMGTLLISKVREEYPDRMMLTFSVFPSPKVSDTVVEPYNATLSVHQLVENADECMVLDNEALYDICFRTLKLTTPSFGDLNHLISATMSGVTCCLRFPGQLNSDLRKLAVNLIPFPRLHFFMVGFAPLTSRGSQQYISLTVPELTQQMWDAKNMMCAADPRHGRYLTASAMFRGKMSTKEVDEQMINVQNKNSSYFVEWIPNNVKSSVCDIPPTGLKMASTFVGNSTSIQEMFRRVSEQFTAMFRRKAFLHWYTGEGMDEMEFTEAESNMNDLVAEYQQYQDATADDEEEYDDDEVADDQYQS

SEQ ID NO: 40397 - protein, 486 aa, Streptomyces avermitilis MA-4680
MAAQPSPSTDAVPTDQPRHPVDEKLPLLKMTTSGLQHVAAMYAGVVAPPLIVGAAAGLSGTELTFLTGACLFTAGLATFLQTLGFWKIGARLPFVNGVTFAGVAPMTAIVASTKDRSDALPIIFGAVIVAGALGFVAAPFFSKAVRFFPPVVTGTVITLIGVSLLPVAFGWAQGPDPTADSYGSTTYLGLAAATLVIVLLLRRFTHGFVKQIAVLLGLVIGTLLAIPLGVTDFGPVAGADLIGFPTPFHFGAPRFQLAAILSLSVVMVVSMTESTADMLALGEIVGRPADERTIAAGLRADTLGSALSPLFNGFMCSAFAQNIGLVAMTRIRSRYVVATGGGFLVLMGLCPVAASLIAVVPRPVLGGAGVVLFGSVAASGIQTLVRAGLEKDNNVLIVAVSLAVGIIPITAPEFYHAFPQTAKIVLDSGISTGCVAAVVLNLLFNHLGRRQGDDEVTAPMEPGEEIAGQRGGAGSPAAGPSAVTAH

SEQ ID NO: 40398 - protein, 418 aa, Glycine max
MEDGSEKWNFQGNKKLNASSISVRGVYNMLMERVNNSRDKKPLVPLCRVDPTENPLFRTTPEATDSVSTAVNSYNFNCYPPTVGLPDAKRAIANYLSSDLPYQLSPENVFLTIGGTQAIDIILPALARSDANILLPRPGYPQYDSRASCCLLEVRHFDLLPERGWEVDLDSLESQADENTVAMVLINPSNPCGNVFTYQHLKRVAEIARKLGIFVISDEVYAHVTYGSNPFVPMGVFSSIVPVITIGSLSKRWLVPGWRTGWIATCDPHGIFQKTGVVKSIISYLEITTDPPTFLQAAIPEILGKTKDDFLSKNLNILRETANIFYDLCKEIPCLTCPHKPEGAMCVMVEINFSQIKDIVDDMDFCAKLAEEESVLLLPGVTVGLKNWLRISFAVDTSNLVEGLSRIKAFCLRYAKMP

SEQ ID NO: 40399 - protein, 422 aa, Nicotiana tabacum
HLTDISPRKMSCGYPDTGGQVVYILDQVPALEREMLKRIKEQGLDIKPRILIATRLLPDAVGTTCGQRLEKVFGTEHSHILRVPFRTEKGIVRKWISRFEVWPYMETFTEDVAKEIAAELQAKPDLIIGNYSEGNLAASLLAHKLGVTQCTIAHALEKTKYPDSDIYLKKFDEKYHFSAQFTADLTAMNHTDFIITSTFQEIAGSKDTVGQYESHMAFTMPGLYRVVHGIDVFDPKFNIVSPGADMNLYFPYFEKEKRLTAYHPEIEELLFSDVENDEHMCVLKDRNKPIIFTMARLDRVKNLTGLVELYAKNPRLRELVNLVVVGGDRRKESKDLEEQAEMKKMYELIKTHNLNGQFRWISSQMNRVRNGELYRYIADTRGAFVQPAFYEAFGLTVVEAMTCGLPTFATNHGGPAEIIVHG

SEQ ID NO: 40400 - protein, 300 aa, Nicotiana tabacum
LCGPISGMIVQPVVGYYSDNCSSRFGRRRPFIAAGAALVTIAVFLIGFAADLGHASGDPLGKGSKPRAIAVFVVGFWILDVANNMLQGPCRALLADLSGGKAGRMRTSNAFFSFFMAVGNVLGYAAGSYSRLYKIFPFSKTPACDIYCANLKSCFFIAVFLLLSLTILALTVVRENELPEKDEHEIDEKAGGGGKSKVPFFGEIFGALKDLPRPMWILLLVTCLNWIAWFPFFLYVTDWMAKEVYGGKVGDGRLYDLGVHAGALGLLLNSVVLGFMSLSVEFLGKKIGGVKRLWGILNFV

SEQ ID NO: 40401 - protein, 213 aa, Pasteurella multocida subsp. multocida str. Pm70
MLAYSLEGRPVHISLSGGSTPKLLFKTLAQAPYNTEIQWQNLHFWWGDDRMVPPTDPESNYGEVQKLLFDHIQIPAENIHRIRGEAPVESELQRFEQALSAVIPGQVFDWIILGMGTDGHTASLFPHQTDFDDPHFAVIAKHPETGQIRISKTAKLIEQAKRVTYLVTGSGKAEILKEIQTTPAEQLPYPAAKIKAKHGVTEWYLDKDAAKLL

SEQ ID NO: 40402 - protein, 334 aa, Pediococcus pentosaceus ATCC 25745
MAVLVLGGAGYIGSHAVDRLITKGYDVAVVDNLVTGHRAAVNQQARFYEGDVRDAEFMDSVFTKENVEGVIHFAAFSVVPESMKNPLKYFDNNTAGMVKLLEVMAKHDVKRIVFSSTAATYGEPERVPIQESDPQVPTNPYGESKLAMEKIMHWSDVADGIKFVALRYFNVAGAKPDGSIGEDHQPETHLVPIILQVAAGERDQLQIFGDDYPTADGTNVRDYVHVVDLADAHILALEYLKQGHDSNAFNLGSSTGFSNRQMLEAAREVTGKEIPAVMAPRRAGDPSTLIAASDKAREILGWQPQYDDVKEIIKTAWNWKVNHPAGYDDRGGQA

SEQ ID NO: 40403 - protein, 229 aa, Triticum aestivum
  misc_feature (198)..(198): Xaa can be any naturally occurring amino acid
  unsure (1)..(229): unsure at all Xaa locations
HSRTSLYKKAGWYRSGIPGISSTHASAIEHLEQQQAMAMAAVASSTMEVDQDLPGFRFHPTEEELLGFYLSRVALGKKLHFDIIGTLNIYRHDPWDLPGMAKIGEREWYFFVPRDRKAGSGGRPNRTTERGFWKATGSDRAIRSTGDPKRVIGLKKTLVFYQGRAPRGTKMDWVMNEYRLPDNGAPPPQEDTVLCKVXRKETPPKELNQKPFQMEGNEPKVPGETGGYG

SEQ ID NO: 40404 - protein, 308 aa, Nicotiana tabacum
WLGLQKHFLIILRQNLQNLSTEEGEKFQQPPGKQRELGFTFSFPVMQTSINSGTIMRWTKGFSIDDAVGQDVVGELAKAMKRKGVDMRVSALVNDTVGTLAGGKYTHNDVAVAVILGTGTNAAYVERVQAIPKWHGPVPKSGEMVINMEWGNFRSSHLPLTQYDHALDTNSLNPGDQIFEKMTSGMYLGEILRRVLLRVAEEAGIFGDEVPPKLKSPFVLRTPDMSAMHHDASSDLRVVGDKLKDILEISNTSLKTRRLVIELCNIVATRGARLAAAGILGILKKMGRDTPRQGGPEKTVVAMDGGLY

SEQ ID NO: 40405 - protein, 687 aa, Oceanobacillus iheyensis HTE831
MSDQDNQQEKRKQDDNKKIDQLKKFYRDNTDKIMTTDEGVKISNDENTLSAGDRGPQLLEDFMYREKLAHFDRERIPERNVHARGYGAHGVFECYESQSDLTKAHFLQKAGQQTPVFVRFSQVAGSKGANETLRDVRGFATKFYTNEGNFDLVGNNIPIFFIQDGIKFPDLIHALKPEPNNEIPQGQTAHDTFWDFIGSNEESAAMMMWIMSDRTIPRSFRTIQGFGVHTFRLVNAEGKSVFCKFHWRPVLGIHSLIWNEAQKIGGADPDFHRRDLWENIEQGFYPEYELGVQVIEEGQEFDFDFDILDATKLWPEEEVPLQMIGKMTLNKNVENVFAETEQVALHPGNIVPGIDFTNDPLLQGRLFSYTDTQIYRVGTNFKQLPINRPVCPFHNNHRDGSQRYIIDKGQVAYHQNYLAGNTPYTVPGSQGGFVTYPSLVEGLKVRKTAPSFLDHFSQARLFWNSMTDVEQSHILQAFSFELGKVNVPEVRQRVVNLIGHISRPLATAVAEQVGVEPPDKSIKQSDVTKSSPTLSLMNTKFLPNTLKVAIIVGNGYGGNALESLLESLKEVELKPYIISERLGEITADNGDTLNVDATFLTTSPVLYDGLLVVGGDHINDQFAYEAGNFITEQFNHYKPIGGMEEGATLIQQLGIANRPGVFISQSGSRQFTRQFIDGMAKQRFWDR

SEQ ID NO: 40406 - protein, 421 aa, Symbiodinium muscatinei
MPSAVENVALLFGGAVATTALSSAFVASGPVAQEAKTGLRAAGYAKSSQSSSQSMGAMAGVGAVAGLAVAGVAGRRAGKNRTSMEAVGVGINGFGRIGRQVARIAMKDPETELKLINASYDSDYLAYMMKYDTIHGKYDGTVEADGDSLIVDGEKIALSHTRDPAEIPFGEHGAEYVCESTGVFLTTEKVQGHLKAGAKKVIFSAPAKDDSHTIVMGVNEDTYDPSMECVSCASCTTNGLAPAVRVLQEKWGIKRGLMTTCHAMTASQPTVDGTSKKDWRGGRAGPGNIIPSSTGAAKAVAKVIPDVKGKLTGMALRVPTIDVSVVDLTVELEKETTYEEICAEMKKRSEGDMKGFLGYTDEALVSTDFETCPISCTFDAKAGIMLDPTFVKVVCWYDNEWGYSSRVVDLIKHMAAEDAKA

SEQ ID NO: 40407 - protein, 347 aa, Symbiodinium muscatinei
MATKIGINGFGRIGRMVFQAICDQNLLGTKLDVVGVVDMSTDAEYFAYQMKYDTVHGRFKHEVKIGEKDELIVNGHKIKCIQASREGPKALPWKDMGVEYVIESTGLFVEAEKAAGHIEAGAKKVIISAPGKGDLKTLVCGVNHTEYDKANHNVVSNASCTTNCLAPIVHVLLKEGVGIEKGLMTTIHSFTATQKTVDGVSAKDWRGGRGAACNIIPSATGAAKAVGEVLPTTKGKLTGMAFRVPTPDVSVVDLTFTAEKDTSIEEIDALFKKASETYMKGVLSFTDEELVSSDFIHNVNSSIYDSKATLQNNLKGEKRFFKIVSWYDNEWGYSNRVVDLLMHMISA

SEQ ID NO: 40408 - protein, 370 aa, Shewanella oneidensis
MTNVNVDVTPLTTKPSQDGFYMPAEWAAQQAVWMIWPYRPDNWRAAGAYAQATFAKVVDAIGAATPVYMGVPKAFLAKAKTVMPSHVTLVEMDSNDCWARDTGPTVVVNAEGECRGVDWGFNAWGGHNGGLYFPWDKDEQVAQQMLAQHGFARYRAPLILEGGSIHVDGEGTCMTSAECLLNANRNPELTKEQIEGLLRDYLNVKQFIWLQDGVYMDETDGHIDNMCCFARPGEVILHWTDDESDPQYPRSKAALEVLQNTVDAQGRKLKIHLLPQPGPLYCSEEESKGVTEGTGVPRTAGERLAGSYVNFLITNHRIVFPLLDPATDDIAAQKLQEIFPEHEIVGVPAREILLGGGNIHCITQQIPAGK

SEQ ID NO: 40409 - protein, 328 aa, Crocosphaera watsonii WH 8501
MPTANVNTKTKQPMYSADMVRTYLHEIGRVPLLTHEQEIIYGKQVQKMMNFLEKKEELADKLGKEPTVKEWSKELEIEQKALNQALEQGERAKRKMIEANLRLVVAIAKKYQKRNMEFLDLIQEGSLGLERGVEKFDPTKGYKFSTYAYWWIRQAITRAIAQQSRTIRLPIHITEKLNKIKKTQRELSQTLGRSATPSEIAQELEIEPSQIREFLSIARQPISLDVRVGDNQDTELSELLEDQGVSPDLYITQELLRQDLRNLMAELTPQQRTVLTLRFGLEDGKELSLAKIGKRMNISRERVRQLEHQALAQLRRRRANVKEYLAAS

SEQ ID NO: 40410 - protein, 251 aa, Zymomonas mobilis subsp. mobilis ZM4
MRFQDKIVVITGGGNGMGKAAAERFSSEGAIVVLADWQIKDAEEVAASLPKDRAWPYKIDVSDPDAVKKMMDDIAAKYGKIDVLVNNAGILIPGKIMDASIEDWKKISSVNIDGVIYCAKFAMPYLVKSKGCIVNTASVSGLGGDWGMVYYCTTKGAVVNFTRALALDSGVNGVRVNSVCPCLVKTKMAANWPESAQAQFKNRVSLGRIPEAEEIASVMAFLASDDARFITGVNLPVDGGATASDGQPHLG

SEQ ID NO: 40411 - protein, 397 aa, Pediococcus pentosaceus ATCC 25745
MMILNGISNYKKLLAASGVAWLFDAMDVGILSFVIAALTSEWHLTESQVGMIGSISSLGMAVGAILFGALADRYNRKTILIISLLIFSIFNGISAFTTTYAAFVMIRFIVGCGLGGELPVASTLISESAPAHVRGRAVVLLESFWAGGWLISALISYFIIPSWGWRIAVFITSLAALYALVLRFSIREADSNHSFTPKARLALRLKNIWSRPYAKATLMLWIVWFMVVFSYYGMFLWLPSVMVMKGYSIVHSFGYVLIMTVAQLPGYFMAAWLIERWGRKWTLMVFLFGTAVSAIAFGFAQGLMMLLLAGILLSFFNLGAWGALYAYSPEQYPEEIRGTGSGLAAGIGRIGGIVGPLLVGFLTEKGVALSTTFIIFFISIMIAVIAIGFLGKETMEK

SEQ ID NO: 40412 - protein, 51 aa, Saccharomyces cerevisiae
MAAQKSFRIKQKMAKAKKQNRPLPQWIRLRTNNTIRYNAKRRNWRRTKMNI

SEQ ID NO: 40413 - protein, 231 aa, Arabidopsis thaliana
  misc_feature (4)..(5): Xaa can be any naturally occurring amino acid
  misc_feature (8)..(9): Xaa can be any naturally occurring amino acid
  misc_feature (11)..(11): Xaa can be any naturally occurring amino acid
  misc_feature (14)..(15): Xaa can be any naturally occurring amino acid
  misc_feature (18)..(19): Xaa can be any naturally occurring amino acid
  misc_feature (23)..(24): Xaa can be any naturally occurring amino acid
  misc_feature (26)..(27): Xaa can be any naturally occurring amino acid
  misc_feature (32)..(34): Xaa can be any naturally occurring amino acid
  misc_feature (36)..(36): Xaa can be any naturally occurring amino acid
  misc_feature (39)..(39): Xaa can be any naturally occurring amino acid
  misc_feature (43)..(43): Xaa can be any naturally occurring amino acid
  misc_feature (47)..(47): Xaa can be any naturally occurring amino acid
  misc_feature (49)..(49): Xaa can be any naturally occurring amino acid
  misc_feature (52)..(52): Xaa can be any naturally occurring amino acid
  misc_feature (54)..(56): Xaa can be any naturally occurring amino acid
  misc_feature (58)..(58): Xaa can be any naturally occurring amino acid
  misc_feature (62)..(62): Xaa can be any naturally occurring amino acid
  misc_feature (67)..(67): Xaa can be any naturally occurring amino acid
  misc_feature (85)..(85): Xaa can be any naturally occurring amino acid
  misc_feature (94)..(94): Xaa can be any naturally occurring amino acid
  misc_feature (133)..(133): Xaa can be any naturally occurring amino acid
  misc_feature (143)..(143): Xaa can be any naturally occurring amino acid
  misc_feature (151)..(151): Xaa can be any naturally occurring amino acid
  misc_feature (158)..(158): Xaa can be any naturally occurring amino acid
  misc_feature (164)..(164): Xaa can be any naturally occurring amino acid
  misc_feature (167)..(168): Xaa can be any naturally occurring amino acid
  unsure (1)..(231): unsure at all Xaa locations
MQIXXKTXXGXTIXXEVXXSDTXXNXXAKIQXXXGXPPXQQRXDLRXKXQLXDXXXLXDYNXQKESXLHLVLRLRGGMQIFVKTXTGKTITLEXESSDTIDNVKAKIQDKEGIPPDQQRLIFAGKQLEDGRTXLADYNIQKEXTLHLVLRXRGGMQIXVKTLTXKTXXLEVESSDTIDNVKAKIQDKEGIPPDQQRLIFAGKQLEDGRTLADYNIQKESTLHLVLRLRGGF

SEQ ID NO: 40414 - protein, 186 aa, Triticum aestivum
AYLGDLQNKFVQKSRLVPVRNSRDIVDPRVRKKKGLKEKLQGKLPGHKDTEGEHVTGLPAPAAPASVQTHGGHHDTDVVVEKIDGDVKTEAAPAVPEEEKKGFLEKIKEKLPGGHKKPEDAAAVPVTHAAPAPVHAPAPAPEEVSSPDAKEKKGLLGKIMDKLPGYHKTGEEDKAAAATGEHKPSA

SEQ ID NO: 40415 - protein, 463 aa, Azoarcus sp. EbN1
MSAPILFPLSAPESSFTIAGRLFHHAWPVLVAQLLSMSMLIADTVITGRYGTLDLAAVAVGSGVYISIVMLLVGVLQAVAPTVAHHFGARRVDAIGPALQQGFWLALMLALPGIALLAFPGFLLELSSVPADVAGKTRDYLLATAFGLPAVLLYRTFYAFNNALGRPRALMMISFIVTSTHIPLAWALVHGAFGLPPLGAIGCGISTAIVNWIAFACGAGYLAHNRDYRPYRLFANWQPPRRRDLLALLKLGIPMGLSTFIEVSSFTLIALFAARLGAEAVAGHRVVANLAALIYMLPLAISIAILVLVGQAAGAREPARARATVRVGMGLTVGLVALIGVLLWVGREPVVALFSADPAVRAVALGLVFYICIYQIFDAVQTVAAHALRGYKVTFMPMLLHALCFWGIALAGGYWLAFHAPGREQSPTVAGFWEASVVATILASVLFGWLLRVVMRRPQNVQT

SEQ ID NO: 40416 - protein, 105 aa, Arabidopsis thaliana
MVNNPPYFFRMPLLGGVFFFAPVMGSKITCFKFFPVVKTAFKTKVPTLKFNVAKVLQSPLPKVDQPVVEKTIFPGLVELNEDPNFYVRFFPNQAFQFFANVMMFS

SEQ ID NO: 40417 - protein, 364 aa, Populus balsamifera subsp. trichocarpa x Populus deltoides
MGSTGETQMTPTQVSDEEAHLFAMQLASASVLPMILKTAIELDLLEIMAKAGPGAFLSTSEIASHLPTKNPDAPVMLDRILRLLASYSILICSLKDHPDGKVERLYGLAPVCKFLTKNEDGVSVSPLCLMNQDKVLMESWYYLKDAILDGGIPFNKAYGMTAFEYHGTDPRFNKVFNKGMSDHSTITMKKILETYKGFEGLTSLVDVGGGTGAVVNTIVSKYPSIKGINFDLPHVIEDAPSYPGVEHVGGDMFVSVPKADAVFMKWICHDWSDAHCLKFLKNCYDALPENGKVILVECILPVAPDTSLATKGVVHIDVIMLAHNPGGKERTEKEFEGLAKGAGFQGFEVMCCAFNTHVIELRKN

SEQ ID NO: 40418 - protein, 328 aa, Pyrobaculum aerophilum str. IM2
MAKIYTDREASLEPLKGKTIAVIGYGIQGRAQALNLRDSGLEVIIGLRRGGKSWELATSEGFRVYEIGEAVRKADVILVLIPDMEQPKVWQEQIAPNLKEGVVVDFAHGFNVHFGLIKPPKNIDVIMVAPKAPGKAVREEYLAGRGVPALVAVYQDYSGSALKYALALAKGIGATRAGVIETTFAEETETDLIGEQIVLVGGLMELIKKGFEVLVEMGYQPEVAYFEVLNEAKLIMDLIWQRGIYGMLNGVSDTAKYGGLTVGPRVIDENVKRKMKEAAMRVKSGEFAKEWVEEYNRGAPTLRKLMEEARTHPIEKVGEEMRKLLFGP

SEQ ID NO: 40419 - protein, 578 aa, Glycine max
MASSSGSLDTSASANSFTNFTFSTHPFMTTSFSDLLASPTDNNKPPHGGGGGLSERTGSGVPKFKSTPPPSLPLSPPPISPSSYFSIPPGLSPAELLDSPVLLNSSNILPSPTTGAFVARSFNWKSSSGGNQRIVKEEDKGFSNFSFQTQQGPPASSTATYQSSNVTVQTQQPWSYQETTKQDNFSSGKSMMKTEKSSSMQSFSPEIASVQNNHSNGFQSDYGNYPPQSQTLSRRSDDGYNWRKYGQKQVKGSENPRSYYKCTYPNCPTKKKVERSLDGQITEIVYKGTHNHPKPQNTRRNSSNSSSLAIPHSNSISTEIPDQSYATHGSGQMDSAATPENSSISIGDDDFEQSSQKCKSGGDEYDEDEPDAKRWKIEGENEGMSAPGSRTVREPRVVVQTTSDIDILDDGYRWRKYGQKVVKGNPNPRSYYKCTHPGCPVRKHVERASHDLRAVITTYEGKHNHDVPAARGSGSHSVNRPMPNNASNPTNTAATAISPLQVIQHSDNSHQNQRSQAPPEGQSPFTLEMLQSPGSFGFSGFGNPMQSYMNQQQLSDNVFSSRTKEEPRDDMFLESLLC

SEQ ID NO: 40420 - protein, 387 aa, Oryza sativa
MARHRHRLAAAAALLLLLLSSAAALSSSAAEGEEDPLIEQVVGGGEEEDAQLDAEAHFASFERRFGRTYRDAGERAYRMSVFAANLRRARRHQRLDPTATHGVTKFSDLTPGEFRDRFLGLRRPSLEGLVGGEPHEAPILPTDGLPDDFDWREHGAVGPVKDQGSWIWGGSCGSCWSFSTSGALEGAHFLATGKLEVLSEQQMVDCDHECDASESRACDSGCNGGLMTTAFSYLMKSGGLQSEKDYPYAGRENTCKFDKSKIVAQVKNFSVISVNEDQIAANLVKHGPLAIAINAAYMQTYIGGVSCPFICGRHLDHGVLLVGYGSAGYAPIRFKEKPYWIIKNSWGENWGEKGYYKICRGPHDKNKCGVDSMVSSVTAIHTSKKEE

SEQ ID NO: 40421 - protein, 314 aa, Helianthus annuus
MALGFSDRNTEMSPYSQQSNTSAVPMDSSKKRKTRSRKEAPEKVAATLAKWIEYNKANEDGKAKTRKAPAKGSKKGCMKGKGGPENSRTNFRGVRQRTWGKWVAEIREPNRGRRLWLGTFGSAVEAALAYDEAARAMYGTSARLNLPNCRSKNDILPLLVTNPASSCDSTTTCSYSEVDATHDSKPGPAVFPSVKHEESVQVKHEPEIVAKEEHCVDNNDLGFDIGDEMFDLEELLGAVEDSNPEAGSGDGYDGRFVNGADANENMQMYMQPDPCVSGQDYSFDFLQPGRPEDCSFTLEELGLGLDAELDLYSN

SEQ ID NO: 40422 - protein, 206 aa, Ashbya gossypii ATCC 10895
MSFSNFSKIETVQELNSFLADKSYIEGTSATQADVAAFKAFQETYPEFSRWFNHIASKQEEFESLPAASKAAAAEEEEDEDDVDLFGSDDEVDEEAEKLKAQRLAEYNARKAAKPKPAAKSIVTMDVKPWDDETDLEEMLANVKSIEMDGLSWGAHQWIAIGFGIKKLQINLVVEDAKVSLDDLQQLIEEDEDHVQSTDIAAMQKL

SEQ ID NO: 40423 - protein, 581 aa, Candida albicans SC5314
MTIQDHNTIHPNVIQDVSTEAPGIVAGELAAEDEGLLSNDALKTHTYGSVSTPETTHYEIDDPNGGYALPKTQLYTVVSSLFMASFLAALDGTVVTTLLTLIASELHAVSNISWIATAYLLSSAAFQPIFGKLSDIFGRKALLLGCSTLFAVGCAICGAADSVLVLVIGRFVTGCGGSGLTSLGTITMSDIIPLRDRGYYQGLANIFFGLGAASGGAIGGLLADWLGWKYVFILQVPLALSVFFAIYFFLNLPEGSPGLGMEGNVSEKLKRVDFLGSFFLVSSLMVFLSAASLGGREIAYSSFTFIGLIISAFVLLTAFVAVELYVSEEPILPIELFANRTVLASSLTNWFYTMSIFTTLFYVPIYYSSVIGLTPTENGLRLVPNFFGVSFGSVGAGIYMKKTGRYYKLAVLAGIFAIFGIGKIALLTPNIPTWQQFLLLIPSGLGYSCILTVTLLALIAAAPLKYQACTTSIQYTFRSTGSTLGVSAATAVFQNVLLLQLTKKINELVSDPREAAKIIAKALDSTEYVNEAPKYVREAIRASYDAGCKGAFGFAFATIVLGVISSLFMREHVLHTSINRD

SEQ ID NO: 40424 - protein, 423 aa, Actinomadura verrucosospora
MTRRAVAITGMGVVAPGGTGRKAFWNLLTDGRTATRTISLFDPGGFRSRIAAECDFVPVAVGLSPREVRRMDRAAQLATVSAREAIDDSGLEIDELDPARTAVSLGSAVGCTMGLEAEYVVVSDQGRDWLVDHTYGAPHLYRHLVPSSLAAEVAWVCGAEGPVALISTGCTSGLDAVGHGARVSREGGADVALAGATDAPISPITVACFDASGATSPNNDDPEHASRPFDREGKGFVLGEGAAVFVLEELEHARRRGAHVYCEVAGYATRGNAYHMTGLKPDGREMAEAIRVAMEAARIGPDDIDYINAHGSGTRQNDRHETAAFKRSLGHRAYEVPVSSIKSMVGHSLGAIGSIEVAACALAIEHGVVPPTANLHTPDPECDLDYVPLAARERPVGTVLSVGSGFGGFQTATVLTAPGRRAS

SEQ ID NO: 40425 - protein, 570 aa, Archaeoglobus fulgidus DSM 4304
MHMSEIMEMLIRRGFLWQSFEIYGGMAGFIDYAPLGNNLRRKIENIWRKYFVINERAAEIDTPTIGIEEVFIASGHATSFTDVAIECENCGRVYRADHYVKEKLGIEVDETVEAVKEVMEVYDLKCECGGRFKDPAPMNLMFSTTIGPGKGKKGYLRPETAQGMFVDFKRLANFFREKLPFGVAQIGRAYRNEISPRQGVIRLREFNQAELEFFVHPGEKKHPHFSLYAKDVVKLVDKFDSQHEITLEEAVEKGIIANQILAYFIGKTRRFLLEIGIKDEKLRFRQHKDVERAHYATDCWDAEVLTSYGWIEVVGIADRTNYDLKRHSKFSGEDLSVFVPYEEPVKVKRRKIVPILSKLGPEFRQKAKKVAEALEALNVEADLDEVEVEVDGEKVKVTKEFFEIQEVEEEVTGEKVIPHVIEPSFGLDRITYSVLEHAFDKDVVDGEERRVLRLKRWVSPIEVAVLPLLSREPFESKGMEIVQMLREEGIFTDYDDSGSIGRRYRRFDEIGTPFCVTVDHQTFEDETVTIRDRDTTAQVRVKLGELPSILKELLRSEKDITEFGEVFRQV

SEQ ID NO: 40426 - protein, 504 aa, Cryptococcus neoformans var. neoformans JEC21
MRTALQAVTSYSRLPLAANASRRSLITGPPPNIPPIHNTTSTSAPLPLPTPLPSFSPPSIQDAKPLYVPGSQAERQARAGRMSRPLRRGTHESWWSAEMGWFNAVAKTIPTFRVLDEEGHMVKDGHESQATKEQTLSIYRTMTLIPIVDNVLYQSQRQGRISFYMQCAGEEAAIVGSAAAMLANDEIFGQYRESAALLHRGFTLDALMAQCFGNVDDKGTKGRMMPVHYSSPEHGFHTITSPLATQMPQAAGAAYMLKLDEERQGDCVICYFGDGAASEGDFHAALGMNSVLGGPCIWFCRNNGFAISTPIIDQYAGDGIASRGPAYGLDTIRVDGNDALAVYAAVCEARKRAVEGKKGVLVEAMTYRVGHHSTSDDSSMYRAIEEVKEWSVVDNPIHRLRSYLVSKKWWSEEEEKALLKKNKADVLKAFSRAEKLPKPKLGEMFNDVWGVAPGEEVPAVIMEQRAELGRLLKKYGEVWPPWKKELKKFVEQGEDVMDCDGKGA

SEQ ID NO: 40427 - protein, 638 aa, Bradyrhizobium sp. BTAi1
MNMRVPSAAPATPNGTTRPQVSIVIVGHVDHGKSTLVGRLLHETGSLPDGKLEMLQAVSARRGMPFEWSFLLDALQTERDQGITIDTTQIRFRTNAREVVLIDAPGHAEFLRNMITGASQADGAVLIIDALEGVRDQTRRHGYLLHLLGVKQVAVVVNKMDRVDFGQDRFNEIKTEISAHLEGLGVKPVAVIPISARDGDGVAQHTSRIRWYDGPTVVEALDGLEPAKPLSSLPLRLPVQAIYKFDDRRIVAGRVEAGELQTGDEIVIMPAGKIAKIKTVEGWPQTPVTAPQGAGRSVGITLDRELFIERGDVIAHVGREPQAARRLHARIFWLHDQPLAKGDNILVRLGTREARGSVVAIEKAVDPGSLSNEENAAIARNHVGEIEIALTQPVAVDPYTENARTGRLVIEVQGRIAGGGLVLSIAAGKRAAPVDIMPVESALQPQERADRYRHKGAVVWMTGLPGAGKSTLARALERRLFSRGGNPVLLDGDTLRAGLNKDLGFTPEDRAENIRRLAEVATHLARNGQIAIVAAVSPARDDRAAARRIAGDLFREVHVATPAEICESRDPKGHYAKARAGALQNFTGIGTDYEPPLDAELVIDTATRGIADATDELEALLSKTGVLFDDIADLGANI

SEQ ID NO: 40428 - protein, 465 aa, Candida glabrata CBS138
MSERREEERGRTGFSMKKNHNSNFNRRNQEQIHQKLPTKISGPLTLEQLCAYQHMFRIQEISSIIKSHSFEVPNARNRSPSPPPVYDAEGKRINTREQLYKKKLMNERFKLVEVVSKLIPGYSAPKDYKRPTTFQEKYYIPVSQYPQINFVGLLLGPRGKTLRKMQEDSGCKIAIRGRGSVKEGKTSSDLPPGAMDFSDPLHCLIIADNEEKIENGIKACRNIVIKAVTSPEGQNELKRGQLRELAELNGTLREDNRPCATCGQQGHKKYECPHRETFAMKIICRRCNQPGHTIRDCTSDSNYGKQIHSSRYNNEMPYHRTSTAVDQPSAYSRYGYTPRNHNGSSRFNDNSKYLNNGNKRATPQPELELETSHKRQQINPTSSSQDTLSHQTNHMTMTTIEDSGIDKLQLPAGMSNENPIPQPVNFNEIQINDVSGPNGTLEAPPGLDLGNNDSNITLQGPPGLN

SEQ ID NO: 40429 - protein, 362 aa, Pseudomonas putida KT2440
MNDLSHTHMRAAVWHGRHDIRVEQVPLPADPAPGWVQIKVDWCGICGSDLHEYVAGPVFIPVEAPHPLTGIQGQCILGHEFCGHIAKLGEGVEGYAVGDPVAADACQHCGTCYYCTHGLYNICERLAFTGLMNNGAFAELVNVPANLLYRLPQGFPAEAGALIEPLAVGMHAVKKAGSLLGQTVVVVGAGTIGLCTIMCAKAAGAAQVIALEMSSARKAKAKEAGANVVLDPSQCDALAEIRALTAGLGADVSFECIGNKHTAKLAIDTIRKAGKCVLVGIFEEPSEFNFFELVSTEKQVLGALAYNGEFADVIAFIADGRLDIRPLVTGRIGLEQIVELGFEELVNNKEENVKIIVSPGVR

SEQ ID NO: 40430 - protein, 485 aa, Streptomyces avermitilis MA-4680
MSKRVLTTESGAPVADNQNSATAGVGGPLLLQDQHLLEKLARFNRERIPERVVHARGSGAYGHFEVTDDVTGFTYADFLNTVGKRTEVFLRFSTVADSLGGADAVRDPRGFAVKFYTEEGNYDLVGNNTPVFFIKDPLKFPDFIHSQKRDPFTGKQEPDNVWDFWAHSPEATHQVTWLMGDRGIPASYRHMNGYGSHTYQWTNAEGEAFFVKYHFKTNQGIRSLSAEQAQEIAGTDPNSHQTDLLQAIERGVRPSWTLYVQIMPAAEAAEYRFNPFDLTKVWPHTDYPLQRVGRLVLDRNPDNVFAEVEQAAFSPNNFVPGIGPSPDKMLQGRLFAYADAHRYRLGVNHTQLAVNAPRATVVSNYGRDGLMASPAQGRAAKNYEPNSYDGPAETGRPLSAPLAVTGHTGTHEAPPHTKDDHFFQAGELYRLMSAEERSRLVANIAGGLSQVSRDDVIEKNLTHFHAADPEYGTRVEEAVRALRED

SEQ ID NO: 40431 - protein, 343 aa, Sporidiobolus salmonicolor
MAKIDNAVLPEGSLVLVTGANGFVASHVVEQLLEHGYKVRGTARSASKLANLQKRWDAKYPGRFETAVVEDMLKQGAYDEVIKGAAGVAHIASVVSFSNKYDEVVTPAIGGTLNALRAAAATPSVKRFVLTSSTVSALIPKPNVEGIYLDEKSWNLESIDKAKTLPESDPQKSLWVYAASKTEAELAAWKFMDENKPHFTLNAVLPNYTIGTIFDPETQSGSTSGWMMSLFNGEVSPALALMPPQYYVSAVDIGLLHLGCLVLPQIERRRVYGTAGTFDWNTVLATFRKLYPSKTFPADFPDQGQDLSKFDTAPSLEILKSLGRPGWRSIEESIKDLVGSETA

SEQ ID NO: 40432 - protein, 344 aa, Vibrio sp. Ex25
MTMKTLLPTSTAGSLPKPSWLAEPEKLWSPWKLQGEELIDGKRDALRVALQEQELAGVDIVSDGEQTRQHFVTTFIEHLSGVDFENRKTVTIRNRYEASVPTVVGPVSRTKPVFVEDAKFLRQQTKQPIKWALPGPMTMIDTLYDDHYGSREKLAWEFAKILNQEAKELEAAGVDIIQFDEPAFNVFFDDVNEWGIACLERAIEGLKCETAVHICYGYGIKANTDWKQTLGTEWRQYEEVFPKLQQSNIDIISLECHNSRVPIELLELIRGKKVMVGAIDVATNEIETPEEVANTLREALKYVDADKLYPCTNCGMAPLSREVSTAKLSALSAGAEIIRKELVG

SEQ ID NO: 40433 - protein, 325 aa, Pseudomonas putida KT2440
MSNQLSTEQLLHAYEVMRTIRAFEERLHVEFATGEIPGFVHLYAGEEASAAGVMAHLRDSDCIASTHRGHGHCIAKGVDVYGMMAEIYGKKTGVCGGKGGSMHIADLEKGMLGANGIVGAGAPLVAGAALAAKLKGRDDVSVAFFGDGASNEGAVFEAMNMASIMNLPCIFVAENNGYAEATASNWSVACDHIADRAAGFGMPGVTIDGFDFFAVYEAAGAAIERARSGQGPSLIEVKLSRYYGHFEGDAQTYRAPDEVKNLRESRDCLMQFRNKTTRAGLLTAEQLDAIDARVEDLIEDAVRRAKSDPKPQPADLLTDVYVAYP

SEQ ID NO: 40434 - protein, 418 aa, Kluyveromyces lactis NRRL Y-1140
MVKQFVIVIKLGSSSLVDEETKEPKLSIMSLIVETVVKLRRRGHKVIIVSSGGIAVGLKTMNMKGRPKKLSKVQAIAAVGQGRLIGRWDSLFSEFDQRIAQILITRNDIVDWTQYKNAQNTISELLSMGVVPIVNENDTLSVSEIKFGDNDTLSAITAALTGADYLFLLTDVDCLYTDNPRANPDAKPILVVPDISQGLPGVNTDGGSGSDVGTGGMKTKLIAAELATNAGVHTIIMKSDTPENISKIVLYMQERDDGVNELTQDLADLQLTEMQSLVNNHVPLHTRFIANSNHHHLKNRQFWMLHGLVSQGAVIIDIGAYEALTRKNKAGLLPAGVIEVQGSFHEHECIDIKLGVRDSDGNLDKSVALKTVGRARCNYTSTELSKIKGLQSDQIEDILGYADSEYVAHRENLAFPPH

SEQ ID NO: 40435 - protein, 848 aa, Brassica napus
MASSEVSMKGNRGRGENFSSAGYSDPTVAGEAQKTQSNRSVAAERVVDPEAALYRELWHACAGPLVTVPRQDDRVFYFPQGHIEQVEASTNQAAEQQMPLYDLPSKILCRVINVDLKAEADTDEVYAQITLLPEPVQDENSIEKEAPPPPPPRFQVHSFCKTLTASDTSTHGGFSVLRRHADECLPPLDMSRQPPTQELVAKDLHASEWRFRHIFRGQPRRHLLQSGWSVFVSSKRLVAGDAFIFLRGENGELRVGVRRAMRQQGNVPSSVISSHSMHLGVLATAWHAISTGTMFTVYYKPRTSPSEFIVPFDQYTESVKINYSIGMRFKMRFEGEEAPEQRFTGTIVGIEDSDPTRWAKSKWRSLKVRWDETTSIPRPDRVSPWKIEPALSPPALSPVPMPRPKRPRSNLASSTPDSSMRIREGSSKANMDPLPASGLSRVLQGQEYPTLRTKHVESVECDAPENSVVWQSSTDDDKVDVISASRRYENWISSGRHGPTCTDLLSGFGTNIEPPHGHQIPFYDRLSSPPSVAARKILSDQDGKFEYLANQWMMHSGLSLKLHESPKVPAASDASFQGIGNPNYGEYALPRAVTTENAAGNWPIRPRALNYFEEAVHAQAREHVTKRPAVVQEEAAKPRDGNCRLFGIPLVNNVNGTDTTLSQRNNLNDPAGPTQMASPKVQDLSDQSKGSKSTNDHREQGRPFPVSKPHPKDVQTKTNSCRSCTKVQKQGIALGRSVDLSKFQNYEELVTELDRLFEFNGELMAPKKDWLIVYTDDENDMMLVGDDPWQEFCCMVRKIFIYTKEEVRKMNPGTLCCRNEEEPVVGEGSDAKDAKSASNPSLSSAGNS

SEQ ID NO: 40436 - protein, 635 aa, Zea mays
  misc_feature (263)..(263): Xaa can be any naturally occurring amino acid
  misc_feature (267)..(267): Xaa can be any naturally occurring amino acid
  misc_feature (289)..(289): Xaa can be any naturally occurring amino acid
  misc_feature (582)..(582): Xaa can be any naturally occurring amino acid
  unsure (1)..(635): unsure at all Xaa locations
MPEAPVVTMRDTAAAAAPATHRDLLEYIERVTAGAAQVQRRVLSEILAQNAPAEYLRRLGVSGAAPGAVEAFRRAAPLVTYEDILPDVLRIANGDTSPILSGKPIREFLTSSGTSGGERKLMPAIADEMDRRSLLYSLLMPVMSQAVPGLDRGRCMYLYFVKAESRTPGGHPARPVLTSFYRSRHFLERPHDPYTVHTSPDEAVLCVDAYQSMYAQLLCGLVHRADVLRVGAVFASGFLRAIRFLEKHWQRLCRDLRRGALGXEVTXDRSVRAAVARVLRADPALADAXEAECARPSWQGIIRRVWPGTKYIDVIVTGAMAQYIPTLEFYGGGLPLTCTMYASSESYFGINLNPMCKPSGVPHALIPTMCYFEFLPLPQPGPGGTDDADPDHRDLVDLVDVKLGHEYELVVTTYSGLYRYRVGDVLRVAGFKNQAPMFKFLRRKNVVLSIDSDKTDEAELHAAVSGAVQHLAPFGASLVEYTSYADAGTIPGHYVLFWELRLRAGDVPVPVPASVFEDCCLAVEEALNSVYRQGRAADRSIGPLEIRVVSDGTFDRLMDYALARGASINQYKVPRCVHPGPXVVELLDGRVQASYVSPKCPKWSPGGGKQWSSDAAAKKPAAAAGSNNGGGAVVA

SEQ ID NO: 40437 - protein, 371 aa, Pseudomonas fluorescens PfO-1
MARLLDTTPKQDGFRLPGEFEAKAGCWLGWPERTDVWRNGAKPAQKVWVQIVTAISQSEPVTVCASASQFATARRQLPPQVRVVEMTCNDTWFRDSGPCFVVNDQSGEVRGVDFEFNAYGGLDGGLYYPWDKDDQIASKILEIERFDRYRAPLIAELGGIQSDGQGSILTTEQCLLNRNRNQHLGKDEVTRRLTDYLGAEQVIWLPRGCKFDETDGHVDDLACFVRPGEVVLQWTDNRDDPQWEIYQEAYDILRSTRDSRGRELIVHKLPQPDVLEWTAEEAEGLDQQDSTHTRQAGTKICASYINYYAGNSSIVVPLFGDRNDQVALATLAELFPQHKIVGIENSREILLGGGNVACITMPQYAGQKKGA

SEQ ID NO: 40438 - protein, 701 aa, Cryptococcus neoformans var. neoformans B-3501A
MSARNLASGTPYRKNLSPANSPHFDAPSVSSTSDSVKSAYSVGYTPVPTADRSYSGLLHGTLSKVFRKGGQEIIVSEEPVSFSSSKEDSESTRFNGCPYMNGSIPQTPTPKSTPKSASVAVPVPLPPPSAARLKVQKQNDSIPRENGNALADDVGKLTVRSYEKDRDLKSQEVIYTTSNGVPVPHPYAVQRAGVNGPLLLQDFHLIDLLSHFDRERIPERVVHAKGSGAHGTWECTDGLEDLCLANMFQKGATCPLTIRFSTVGGESGSPDLARDPRGFAVKFRTAEGNWDFVANNTPVFFLRDPAKFPHFIHTQKRDPATHLSGGDDSTMFWDYLSQNPESIHQVMILMSDRGIPAGWRHMHGYYGHTLKIVNDNGDWVYAQFHLISDQGNKFFTSEEASTKSPDWGQKDLYEAIGRGEYPSWTMKVQVMTQEQAEEAWEKKRINVFDLTHVWPHGDYPLRTIGKITLNENPSNYFAEVEQATFNPAHMIPGVEPSADPVLQARLFSYPDAHRHRVGANYQQLPVNQSATPYATGNFQRDGAMAFYNQGGRPAYLSSIEPIKFREKRVNLNKVHGQFIGEAVSFLSEIRPEDFNAPRALWQKVFSDESKERFIQTVAGHMSTCKRKEIIARQIAIFRQVSPDLGARLEKATNVRGYGSIEGMSFNGTHNGFGVKRGANGLRQDADVVFNNGAPQKTQRAR

SEQ ID NO: 40439 - protein, 392 aa, Streptomyces kanamyceticus
MSTHPVLDWSRSAEHLRRSHGVTTDPRPDEDGHYPCVLTRGSGTRVYDLDGNAYLDLTGSFGSVLIGHAEPAVVRAVTDVLSEGNLFYTGASPRRLALAERLLDWFPWSEQAIFYRTGSCAVSAAARLAQHATGRNRVLSSGYHGWHDWHLEAVPEAKPKTFESYATEFHNDLALYRSWLDRHGEEIAAVVVTPEPHRFDHAYYQELREVAKEHGCLFVVDEVKTGFRAGAGGFSALAGIEPDAVTVSKGMANGHSISAVVGQRQLTQELSEAHVWSTYQNEQVGFAAALASLDFLERHDVAAVTRRTGEAVRQGVLQLFAEHGLPVGAPGWGPMFELDFDAADEGLAERLEAALLRHGIFCDTGDDFNMMFHTAEHTDELLERFAAALGDL

SEQ ID NO: 40440 - protein, 358 aa, Cryptococcus neoformans var. neoformans B-3501A
MPINVALLGGGIFAVDAHLPALAKSGTLASLEAVWSRSESSSTKAAEAWKSLTGQEVTKYSETGCDNLDKLLSREDIEAVIIALPILSQSDIIARALKAGKHVLSEKPVSQDVTSATKMLKDYQENYQAQGLVWRVAENWEVEPAHIFAAQALKAGHIGNLNTFSISSVLFVDSEDNKYFETEWRKRPQHQGGYLLDAGVHNAGVLRTVLPSPITHLSAHTALNNEHLPPYDWLSVITRSKPNNIHGQILIDYGARGREPMWELRLTGSDGEIYSEDINDDGVDSIKVQVRSGKFGRTKREIKIFPKTGVYEEQRRFFEAIAGKPDEYGSVQGALNDVALIQAALTSNGNEVALNILK

SEQ ID NO: 40441 - protein, 422 aa, Streptomyces antibioticus
MRRRVVITGVGVMAPGGIGVKNFWSLLSEGRTATRGITFFDPAPFRSRVAAEIDFFPEKHGLGPQKIRRMDRAAQLAVIATREAVADSGLDLDATDPHRRGVTVGSAVGATTGLDQEYRVVSDDGRLGLVDHRYAPPHLYGHFVPSSFAAEVAWASGSEGPSTVVSTGCTSGLDSLGHAVELIREGSADVMIAGATDAPISPITMACFDAIKATTPRNDDPAHASRPFDRSRNGFVLGEGHAVLVLEELGAAQRRGARIYAEIGGYASRCNAFHMTGLRPDGREMAEAIRVALDEARLNPEDIDYINAHGSGTKQNDRHETAAFKRSLGDHAYRTPVSSIKSMVGHSLGAIGSIEIAACVLAMAESVIPPTANLHDPEPECDLDYVPITAREARLDRVLSVGSGFGGFQSAMVLTRPERNTA

SEQ ID NO: 40442 - protein, 390 aa, Magnaporthe grisea
MSKQQHPSSKTQITRRRDTADMTFEQVLHKGSSANMGGLSSMLGKDREASKTAVDQYFRHWDGKTAKTETTKVREERKADYATLTRQYYNLVTDFYEYGWGQSFHFCTFAPGETFASAITRYEHTLAHRIGIKKGMKVLDIGCGVGGPARQIAKFTGANITGITINEYQVERARRYAEMEGYGAGEQLKFVQGDFMALPFEKETFDAVYSIEATVHAPKLEDVYKQIFNVLKPGGIFGLYEWVMTNAYDENDPHHKEIRFGIEHGGGIANLQTAQTAIAAIKAAGFELLESEDLADNSDRAPWYWPLGGNAWQYASTFGDILSTFTMTPAGRAIAHTVLGVVESIGLVPPGTKKTADSLSTTAAALVAGGKEGLFTPMFLMVARKPVAKE

SEQ ID NO: 40443 - protein, 546 aa, Zymomonas mobilis
MAAKDVKFSRDARERILRGVDILADAVKVTLGPKGRNVVLDKAFGAPRITKDGVSVAKEIELKDKFENMGAQMLREVASKTNDLAGDGTTTATVLAQAIVREGMKSVAAGMNPMDLKRGIDLAATKVVESLRSRSKPVSDFNEVAQVGIISANGDEEVGRRIAEAMEKVGKEGVITVEEAKGFDFELDVVEGMQFDRGYLSPYFITNPEKMVAELADPYILIYEKKLSNLQSILPILESVVQSGRPLLIIAEDIEGEALATLVVNKLRGGLKVAAVKAPGFGDRRKAMLEDIAILTKGELISEDLGIKLENVTLNMLGSAKRVSITKENTTIVDGAGDQSTIKDRVEAIRSQIEATTSDYDREKLQERVAKLAGGVAVIKVGGATEVEVKERKDRVDDALHATRAAVQEGIVPGGGTALLYATKTLEGLNGVNEDQQRGIDIVRRALQAPVRQIAQNAGFDGAVVAGKLIDGNDDKIGFNAQTEKYEDLAATGVIDPTKVVRTALQDAASVAGLLITTEAAVGDLPEDKPAPAMPGGMGGMGGMDF

SEQ ID NO: 40444 - protein, 168 aa, Rhizobium sp. NGR234
MTKRAVLAGGCFWGMQDLIRKLPGVIETRVGYTGGDVPNATYRNHGTHAEGIEIIFDPEKISYRRILEFFFQIHDPTTKNRQGNDIGTSYRSAIYYVDDEQKRIAEDTIADVEASGLWPGKVVTEVEPVGDFWDAEPEHQDYLENYPTGYTCHFPRPDWVLPRRAAAE

SEQ ID NO: 40445 - protein, 110 aa, Gossypium hirsutum
MASQQERQQLDARARQGETVIPGGTGGKSLEAQEHLAEGRSRGGQTRKEQLGREGYQELGSKGGQTRKEQIGTEGYQEMGRKGGLSTMDKSGVERAAEEGIDIDESKYRT

SEQ ID NO: 40446 - protein, 147 aa, Rhizobium sp. NGR234
MTYRKTDEAVSKLTPEQYRVTQQNGTERPFTGEYTDNKRPGIYVDIVSGEPLFASADKFDSGCGWPSFTKPIVPANVNELRDASHGMIRTEVRSKHGDSHLGHVFPDGPEDRGGLRYCINSAALRFIPREEMEAEGYGAYINQVEDI

SEQ ID NO: 40447 - protein, 176 aa, Ashbya gossypii ATCC 10895
MDANSDQRDKHNQYIAELREQDRWLPINNVARLMKNTLPVTTKVSKDAKECMQECVSEFISFVTSEASDRCASDKRKTINGEDVLISLHALGFENYAEVLKIYLAKYRQQQALKNQMIFQRREDGADGLDGAADDGSDDAGEEEGEHGAGAAAGAPGAGALPEQDQFINQDGSLYI

SEQ ID NO: 40448 - protein, 324 aa, Neurospora crassa
MSNSLEQLKATGTVVVCDSGDFATMAKYKPQDATTNPSLILAASKKPEYGALLDAAIADAKKGPGSPEEKVDAALDYLLVQFGKKILEIVPGKVSTEVDAALSFDTKASVDKALHIIKLYEAEGISKDRILIKIASTWEGIKAAEILQRDHGINCNLTLMFSLTQAIAAAEAGAFLISPFVGRILDWFKAHTGKNYSKEEDPGVASVKTIFNYYKKFGYKTIVMGASFRNIGEITELAGCDYLTISPNLLEELLNSDAPVPQKLNAADAASLSIEKKTYINSEPTFRFDFNEDQMAVEKLREGISKFAADAVTLKEIIKQKLAE

SEQ ID NO: 40449 - protein, 456 aa, Escherichia coli
MMEGQQHGEQLKRGLKNRHIQLIALGGSIGTGLFLGSASVIQSAGPGIILGYAIAGFIAFLIMRQLGEMVVEEPVAGSFSHFAYKYWGSFAGFASGWNYWVLYVLVAMAELTAVGKYIQFWYPEIPTWVSAAVFFVVINAINLTNVKVFGEMEFWFAIIKVIAVVAMIIFGGWLLFSGNGGPQATVSNLWDQGGFLPHAFTGLVMMMAIIMFSFGGLELVGITAAEADNPEQSIPKATNQVIYRILIFYIGSLAVLLSLMPWTRVTADTSPFVLIFHELGDTFVANALNIVVLTAALSVYNSCVYCNSRMLFGLAQQGNAPKALASVDKRGVPVNTILVSALVTALCVLINYLAPESAFGLLMALVVSALVINWAMISLAHMKFRRAKQEQGVVTRFLLLYPLGNWICLLFMAAVLVIMLMTRGMGIWVYLIPVWLIVLGIGYLFKEKTAKAVKAH

SEQ ID NO: 40450 - protein, 187 aa, Escherichia coli O157:H7 EDL933
  misc_feature (13)..(13): Xaa can be any naturally occurring amino acid
  misc_feature (16)..(16): Xaa can be any naturally occurring amino acid
  misc_feature (67)..(68): Xaa can be any naturally occurring amino acid
  unsure (1)..(187): unsure at all Xaa locations
MMTTILTIHVPSXPGXAWNMLVALQAGNIVARYAKLHLYDAFAIQESRRVDAGNEIAPLLEVEGMKXXLMTCYDLRFPELALAQALQGAEILVLPAAWVRGPLKEHHWSTLLAARALDTTCYMVAAGECGNKNIGQSRIIDPFGVTIAAASEMPALIMAEVTPERVRQVRAQLPVLNNRRFAPPQLL

SEQ ID NO: 40451 - protein, 693 aa, Ustilago maydis 521
MADSPASISHPANLGTADANAPIHVYPHDSATMRPTSSGSNLHLNISGLSVKSEGEQHQQHQQYQQHQQPHLANSLNFAGTAASSPPSNLASPADASASFSIGAAAASTSPHLHPDSIATSDAHLGAPNVSSPLRAEYNMSTETAPLTAAMRSYSSTSIKSATGSQNAESPTSGFGGGAGNQSVGDVSVDDPNVTSQSDADLAAEKRQSSKFVYKLFRMVSDPDYQHLISWNRNGTSVMVCNFDEFAKEVLGKHFKHSNFSSFIRQLNMYGFYKVNKTPRGHRQSADAQIWEFSHPKFLRGRPDLLDDIRRKALDSEHARVEARDLQYSVSVGQMQLRQQVDEMQFRLEELAEQNMALRTFTTQLRDVLGMVLEHVKKTSGGNLGFDVRVPTLDIPSPMPPQGLWTPQGHDGPPIFVTEPEFGPGVGPGGLRMGAGATHLSRGMHGTSSAFGVSMEGYGMAATPISRRVSVSSAHSESMLTMNGSPMHSSMHGDGAMMAMGANMTPQRSASFGEGQMPPPQFNIGRGDGPGANRAGLAGLAIDTSGATAGMFAPGMHPGVSPTSAGLSAGNAGLGVMSMPPSPLTPQHQAMMTAINTPLPPSPAPGSMAGGQFKSFEGSPFIASNGFAPQFGQNVISMADQSFFGPDGSEGPNAKAMRTPLKRTASNSGPSGQSTPVLMHSTSPGLAKRKSPV

SEQ ID NO: 40452 - protein, 393 aa, Nocardioides sp. JS614
MKAVTWQGRKDIRVEEVPDPRIEEPTDAIIRVTTTGLCGSDLHLYDPLTPFMTPGDIVGHEPMGVVEAVGSEVTELAVGDRVVVPFNISCGSCWMCERGLHSQCETTQNRDTGTGASLFGYSSLYGAVPGGQAELLRVPFADFLPVQVPHGPPDDRFIYLSDVLPTAWQGIAYAGVPEGGTLLVLGAGPIGDMATRIALHRGIRVIVVDRVPERLARVSARGAEILDLGEIDDVAEQVRGLTGGRGADSVLEAVGMEAHGSPVAEAVQKSLRLLPKKLQQLMMTNLSVERLAALYLAFEAVRRGGTVSISGVYGGTSDPMPMMQLFDKQLQLRMGQANVRAWTDELRTLLEQDEDHLDVEGFATHHLPLDAAPQAYASFQAKDDGMVKVLFRP

SEQ ID NO: 40453 - protein, 410 aa, Sinorhizobium meliloti
MDEFSRLSLHVPEPAVRPGDLPDFSNVKIPKAGSVPRPDVDVDPEEIRDLAYSIIRVLNREGEAVGPWAGFLSDEELLTGLRHMMLLRAFDARMLMAQRQGKTSFYMQHLGEEAVSCAFRKALRKGDMNFPTYRQAGLLIADDYPMVEMMNQIFSNELDPCHGRQLPVMYTSKEHGFFTISGNLATQYVQAVGWAMASAIKNDTRIAAGWIGDGSTAESDFHSALVFASTYKAPVILNIVNNQWAISTFQGIARGGSGTFAARGLGFGIPALRVDGNDYLAVYAVARWAAERARLNLGPTLIEYVTYRVGAHSTSDDPSAYRPKTESEAWPLGDPVLRLKKHLILRGAWSEERHAQAEAEIMDEVIQAQKEAERHGTLHAGGRPSVRDIFEGVYAEMPPHIRRQRQKAGY

SEQ ID NO: 40454 - protein, 328 aa, Trichodesmium erythraeum IMS101
MANYAPAIETMTANYLEKWVEMGTLTWYPEIRNYTFDIASLLFMGSDESSQTKLVSLFEEWVKGLFSIPLSLPWTRFGKSLRCRQKLLQHIEEIILQRQQQQNLGEDALGILLQAQDKEVNGLSLDELKDQILLLLFAGHETLTSAIASFCLLTSQHLDVLTRLRQEQKQFSAIEPLTLENLKRMTYLDMVLKEVLRLIPPVGGGFRQVTQDCEFCGYSIPKGWLVQYQIAKTHQDETLYPDDKNFDPERFAPENAVDKQKVFGYVPFGGGMRECLGKEFARLEMKIFAVMLLRGYEWELLPEQDLSVVAAPTPYPRDGLKVKFRKVE

SEQ ID NO: 40455 - protein, 490 aa, Photorhabdus luminescens subsp. laumondii TTO1
MQQGKIWIVDDDSSIRWVLERALSNAGMECTSFADADSALTALAQNTPDVLISDIRMPGMNGLNLLNNIKQSNPLLPVIIMTAHSDLDAAVNAYQQGAFDYLPKPFDIDEAVALLERALSHSRDQNQSIKSPQVVTPVSDMIGEAPAMQDVYRIIGRLSRSSISVLINGESGTGKELVAHALHRHSPRANEPFIALNMAAIPKDLIESELFGHEKGAFTGANQVRHGRFEQANRGSLFLDEIGDMPLDIQTRLLRVLAEGQFYRVGGYAPVKVDVRIIAATHQDLERLVQKGKFREDLYHRLNVIRMQLPPLRDRVEDIPRLTRHFLQQTAKELGVETKILHPDAEIALMRLPWPGNVRQLENICRWLTVMAASQEVLVQDLPSELFETHHNTESGMTTSVNTVSINTVPANTTPTNTIPKNWSQLLAQWATTALEHGQQDLLSEALPLLERTLLDCALKHTKGHKQEAARLLGWGRNTITRKLKELGLE

SEQ ID NO: 40456 - protein, 198 aa, Zea mays
MEERYEALKELGAGNFGVARLVRDKRTKELVAVKYIERGKKIDENVQREIINHQSLRHPNIVRFKEVCLTPTHLAIVMEYAAGGELFEKICSAGRFSEDESRYFFQQLISGVSYCHSMEICHRDLKLENTLLDGSPTPRVKICDFGYSKVLYTDTAPALLCVLTLPATDFSCVVESVTNFASVLFSLLCCIPNQNQQL

SEQ ID NO: 40457 - protein, 293 aa, Zea mays
  misc_feature (150)..(151): Xaa can be any naturally occurring amino acid
  misc_feature (239)..(239): Xaa can be any naturally occurring amino acid
  unsure (1)..(293): unsure at all Xaa locations
MEDERNTQQHQGGEQAQDQENEVKDRGLLDSLLGRNKHDDQEKKNQQQQQAEEEELATGMEKKVTVADPDHKEEGHEAAEKKDSLLAKLHRTSSSSSSSSDDEEEEVIDENGEIVKRRKKKGLKEKVKEKLAAHKAHDEGDHHQTAVPAXXPVVVDTHAHHQEGEHKPHFPAPAPPPHVETHHHPVVVHKIEDDDTKTQTPPQAPEEEKKGLLDKIKEKLPGGHKKPEDAAAAAAAPAXHAPPPPAPHAEVEVSSPDGKKGLLGKIMDKIPGYHKSSGEEDRKDAAGEHKTSS

SEQ ID NO: 40458 - protein, 275 aa, Arabidopsis thaliana
MNGEARSRVVDQEAGSTPSTLRDEDHPSRQRLFGCLPYDIDLNPLRIVMAELVGTFILMFSVCGVISSTQLSGGHVGLLEYAVTAGLSVVVVVYSIGHISGAHLNPSITIAFAVFGGFPWSQVPLYITAQTLGATAATLVGVSVYGVNADIMATKPALSCVSAFFVELIATSIVVFLASALHCGPHQNLGNLTGFVIGTVISLGVLITGPISGGSMNPARSLGPAVVAWDFEDLWIYMTAPVIGAIIGVLTYRSISLKTRPCPSPVSPSVSSLLR

SEQ ID NO: 40459 - protein, 591 aa, Chromobacterium violaceum ATCC 12472
MKTCQADVVIVGAGGAGLRAAIAAAQFDPKLKIALVSKVYPMRSHTVAAEGGSAAVKQDHDSFDAHFHDTVAGGDWLCEQDVVEYFVRQCPEEMVQLEHWGCPWSRKDDGSVNVRAFGGMKIERTWFAADKTGFHMLHTLFQTSIQFPQIQRFDEYFCADLIVEDGQARGVLAIEIASGESVLIEAGAVVMATGGAGRVFRENTNGGIVTGDGMALAYRHGVPLRDMEFVQYHPTCMPRTGLLFTEACRGEGGLLINKDGYRYLQDYGLGPAEDKPRNKFMELGPRDRLSQAFWYEQQKGRTVQGPWGSAVYLDLRHLGHAKLRERLPQICELAEEFLGIDPAKEPIPVRPAVHYTMGGILVDGHCAAPMPGLYAAGECSSVGIHGANRLGSNSLAELSVFGKVAGVEAARFARDCKPAKRESLLKQAEAVQARLHALRAKDGTERIADLRREMAETMEAGCGIYRMEDSMRATCDKLAELKQRFRNVNVEDKSSVWNSDWLLAIELGYQLDVAEAMAHSALHRKESRGAHQRLDGFEQRDDANFLKHSHAIYQPDAGPRIEYGAVKITTSQPGVRAYGAAGVAAEQGEQA

SEQ ID NO: 40460 - protein, 250 aa, Lycopersicon esculentum
MGKCYPTVSEEYLKAVDKCKRKLRGLIAEKNCAPIMLRLAWHSAGTYDVCSKTGGPFGTMRFKAELAHGANNGLDIALRLLEPIREQFPTLSHADFHQLAGVVAVEVTGGPDVPFHPGREDKPEPPVEGRLPDATKGCDHLRDVFKKQMGLSDQDIVALSGAHTLGRAHKERSGFEGPWTANPLIFDNSYFTELLSGEKEGLLQLPSDKALLCDPAFRPLVEKYAADEDAFFADYAEAHLKLSELGFAEA

SEQ ID NO: 40461 - protein, 250 aa, Lycopersicon esculentum
MGKSYPTVSAEYLKAVDKCKRKLRALIAEKNCAPIMLRLAWHSAGTYDVCSKTGGPFGTMRFKAEQAHGANNGLDIALRLLEPIREQFPTLSHADFHQLAGVVAVEVTGGPDVPFHPGREDKPEPPVEGRLPDATKGCDHLRDVFVKQMGLSDKDIVALSGAHTLGRCHKERSGFEGPWTANPLIFDNSYFTELLSGEKEGLLQLPSGKALLSDPAFRPLVEKYAADEDAFFADYAKAHLTLSELGFAEA

SEQ ID NO: 40462 - protein, 95 aa, Zymomonas mobilis
MNFRPLHDRVLVRRVAAEEKTAGGIIIPDTAKEKPQEGEVIAAGNGTHSEDGKVVPLDVKAGDRVLFGKWSGTEVRVDGEDLLIMKESDILGIIS

SEQ ID NO: 40463 - protein, 344 aa, Bacillus cereus E33L
MGEKMLGIINATGSFPSLKKVTGHRSLAALPFGGRYRLIDFMLSNMVNSNIHSVAVFTSHKNRSLMDHVGSGKQWDLDRKRDGLFLFPPNCQCDQDEFGSFAHFRRHIDYFLRSREEYVVITNSHLVTALNFQAVLERHIHTAADITEVCHEEVSLQTYVLKKQLLLDLFESYKDVEQYSLFDVVREKRGKSLHIATYEHTGYVAIIDSIESYYKHSLEILKPAIWKQLFKKEAPIFTKVKDEPPTRYLKGAAVKNTMIANGSIIEGEVENSVISRSVKIGKGSIVRNSIIMQKSQIGDNCIIDGVIIDKDVKIGDGVVLKGNADEPYVVEKGSVQNSTINSYS

SEQ ID NO: 40464 - protein, 466 aa, Zymomonas mobilis
MADHFDLIVLGGGPGGYVAAIRAAQLNLKVALVERVHLGGICLNWGCIPTKSLLRSAEVYHEMQNAEAYGLTSFKPDFDLDKIIARSREVATRLASGVKTLLRKNKVEVISGVGQLTGNQQMLVETTEGEEKILEAKDIIIATGARARQLPNVHSDGKHIWTYHHALKPPAMPKKLLVIGSGAIGIEFASFYADFGAEVSIVEHAPQILPMEDAEVSAYVAKAFKKRGIRILTQSALQNLTPDDEGVTAEIAGADGKVTKERFSHAIVAIGVVANVENIGLDKLGIKLDRGFIAVDGFGRTNVDHVWAIGDVAGAPCLAHKASHQGVIAAEAIAGCDHVHPLNTQNIPGCTYARPQVASVGLTEEKARQQGYNVKIGNFPFIANGKAIAQGATDGFVKTVFDADSGALLGAHMVGAEVTEMIQGYTVARTLETTEAEIMETIFPHPTLSEAMHESVLAAYGRALHF

SEQ ID NO: 40465 - protein, 491 aa, Nostoc punctiforme PCC 73102
MRTHIKKTWKTLTRSHEHLLQSAKDTKLDHKPGTPWIVYISPLEDCPDIQTVLERSLSSKDMQGIEIRTLPSEVEAIKQHGLLYLPGPYVVPGGRFNEMYGWDSYFILLGLLHDREWELAQSQVDQLLYQVKHYGTILNANRTYMLSRSQPPVLSMMVLALFQHTQDEEWLRTTVPLLEQFYYYWVVPPHLNPGTGLSRFYAFGEGPAPEVVFSERDEEGKSHYDRVKEYYQTFEIEDYDVNLYYDRENDKLTHLFYKADRTMRESGFDITNRFCPFSADILHYAPVCLNSLLYQVEQDLAQINAILGNEQLEKQWRDRGEYRRDRIDQFLWNEERGLYCDYHFQSGKRRCYEFATTFYPLWLGISSQAQAQRVVENLSLFEAPGGILTSTHITGNQWDAPFGWAPLTLIAVQGLHRYGFHTEGDRIANKFLAMVIKEFERHNTLVEKYDVERCSANVSDEISFGYSSNEVGFGWTNGVILELLAARGKKV

SEQ ID NO: 40466 - protein, 388 aa, Neolecta irregularis
GAAFWQTISGEHGLSVSGVYEGTSDLQLERMNVYFNEASGGKYVPRAILIDLEPGTMDAVRSGPFGTLFRPDNFVFGQSGAGNNWAKGHYTEGAELVDSVLDVVRREAEACDSLQGFQITHSLGGGTGAGMGTLLISKIREEYPDRMMCTFSVLPSPKVSDTVVEPYNATLSVHQLVENSDETFCIDNEALYDICMRTLKLTNPTYGDLNHLVSAVMSGVTTSLRFPGQLNSDLRKLAVNMVPFPRLHFFVVGFAPLTAKGSYSFRQLSVPELTQQMFDPKNMMAAADPRHGRYLTVAAFFRGKVSMKEVEEQMISVQNKNTSYFVEWIPNNVNYAVCSIPPRGLKMASTFIGNSTSIQELFKRVGDQFSAMFRRKAFLHWYTGEGMD

SEQ ID NO: 40467 - protein, 492 aa, Arabidopsis thaliana
MDPYKYRPASSYNSPFFTTNSGAPVWNNNSSMTVGPRGLILLEDYHLVEKLANFDRERIPERVVHARGASAKGFFEVTHDISNLTCADFLRAPGVQTPVIVRFSTVIHERGSPETLRDPRGFAVKFYTREGNFDLVGNNFPVFFIRDGMKFPDIVHALKPNPKSHIQENWRILDFFSHHPESLNMFTFLFDDIGIPQDYRHMDGSGVNTYMLINKAGKAHYVKFHWKPTCGVKSLLEEDAIRLGGTNHSHATQDLYDSIAAGNYPEWKLFIQIIDPADEDKFDFDPLDVTKTWPEDILPLQPVGRMVLNKNIDNFFAENEQLAFCPAIIVPGIHYSDDKLLQTRVFSYADTQRHRLGPNYLQLPVNAPKCAHHNNHHEGFMNFMHRDEEVNYFPSRYDQVRHAEKYPTPPAVCSGKRERCIIEKENNFKEPGERYRTFTPERQERFIQRWIDALSDPRITHEIRSIWISYWSQADKSLGQKLASRLNVRPSI

SEQ ID NO: 40468 - protein, 388 aa, Neolecta vitellina
GAAFWQTISGEHGLSVSGVYEGTSDLQLERMNVYFNEASGGKYVPRAILVDLEPGTMDAVRSGPFGTLFRPDNFVFGQSGAGNNWAKGHYTEGAELVDSVLDVVRREAEACDSLQGFQITHSLGGGTGAGMGTLLISKVREEYPDRMMCTFSVLPSPKVSDTVVEPYNATLSIHQLVENSDETFCIDNEALYDICMRTLKLTNPTYGDLNHLVSAVMSGVTTSLRFPGQLNSDLRKLAVNMVPFPRLHFFVVGFAPLTAKGSYSFRQLSVPELTQQMFDPKNMMAAADPRHGRYLTVAAFFRGKVSMKEVEEQMISVQNKNTSYFVEWIPNNVNYAVCSIPPRGLKMASTFIGNSTSIQELFKRVGDQFSAMFRRKAFLHWYTGEGMD

SEQ ID NO: 40469 - protein, 503 aa, Plantago major
MGELSGIENGNKAIGEEAIPVWKFVLVASLAAGIQFGWALQLSLLTPYIQMLGLPHGAASFIWLCGPVSGLLVQPLAGYFSDRCKSRFGRRRPFIMSGACLVAAAVILIGFAADIGHSAGDDMTKKTKPRAVVVFVVGFWILDVANNMLQGPCRAFLADLSAGDEKKMTHAMSFFAFFMGIGNVLGYAAGSYNNLHRLLPFTRTDACEIFCANLKTCFLIHICLLMCLTITALSVVKEPLVNVVDDERKGGSLMVFVELFGALKNLSKPMWILMLVTCLNWIAWFPFLLYDTDWMGREVYGGKVNQSVYDMGVRAGAIGLMLNSVVLGITSILLYFFSKGAKAAKTWWLGVNIVLAVGLAGTVWVSYHAKSVRQLGASGEALPPSFEVKASALAIFAILGIPLAVTFSVPFALAAIYCSRNTNTGGAGQGLSLGVMNLSIVIPQIIVSLSSGPLDKAFGGGNLPAFIMGAVGAVFSGVLAFILLPAPKVDNGVNPFAVGGGGH

SEQ ID NO: 40470 - protein, 339 aa, Pyrobaculum aerophilum str. IM2
MKYLTPGPVQLPKFVIEAMARQPPFHRSDDFKKLFKSVLDKLQSLYPAKSIVMPGTGTLAVDTMVYNYVNPGDRVLALVYGEFGKRAVETARIRGAEVVEIERDTPPEPDEIEDALRKIGGVKAILLIHNETSTGIAYKKLKRLVDIAKAYGALLLVDSVSGFPAEPLPPEIDVVATASHKALLAPPGASILYITSQPKATTGVPPSMDLRKFLKMLDHLETPYTPPISVLFALEVSLDHILGFGSKYTEIHQERVNYLYSLVKLRAIPPEGLRSVTVTAFLCEKPKEVMAKLREAGYVIAGGMYKYREKSIRIGVMGDVSLEDLKTVAEVINNVAGRV

SEQ ID NO: 40471 - protein, 180 aa, Lycopersicon esculentum
MASSIVSSAAVATRGNGAQASMVAPFTGLKSTASFPVSRKQNLDITSIASNGGRVSCMQVWPPINMKKYETLSYLPDLSDEQLLSEIEYLLKNGWVPCLEFETEHGFVYRENHKSPGYYDGRYWTMWKLPMFGCTDATQVLAEVQEAKKAYPQAWVRIIGFDNVRQVQCISFIAYKPEGY

SEQ ID NO: 40472 - protein, 180 aa, Lycopersicon esculentum
MASSVMSSAAVATRGNGAQASMVAPFTGLKSTASFPVSRKQNLDITSIASNGGRVSCMQVWPPINMKKYETLSYLPDLSDEQLLSEIEYLLKNGWVPCLEFETEHGFVYRENHKSPGYYDGRYWTMWKLPMFGCTDATQVLAEVQEAKKAYPQAWVRIIGFDNVRQVQCISFIAYKPEGY

SEQ ID NO: 40473 - protein, 316 aa, Zea mays
MASLTLPPAPPNPRQDAIDLHKAFKGFGCDSTTVINILTHRDSVQRGLIQQEYRAMYHEELSHRISSELSGNHKKAMSLWILDPAGRDATVLREALNGDTMDLRAATEIICSRTPSQLQIMKQTYYARFGTYLEHDIAHHTSGDHQKLLLAYMGIPRYEGPEVDPTIVTHDAKDLYKAGEKRLGTDEKIFIRVFTERSWAHLASVSSAYHHMYDRKLEKVIKSETSGNFEFALLTILRCAENPAKYFAKLLRKAMKGLGTDDMTLIRVVVTRTEIDMQYIKAEYLKKYKKPLAEAINSETSGNYRTFLLSLVGHGH

SEQ ID NO: 40474 - protein, 464 aa, Sinorhizobium meliloti
MKEISCKLLVLGAGPGGYVAAIRAGQLGVNTVIVEKAKAGGTCLNVGCIPSKALIHAADEYHRLRAAASGKGPLGLSLSAPAIDLRRTIAWKDGIVGRLNGGVTGLLKKAGVKAVIGEGRFVDGKTVDVETETGLQRIRAEAIVIATGSAPVELPDLPFGGSVISSTQALALTDVPQTLAVIGGGYIGLELGTAFAKLGSKVTVLEALDRILPQYDADLSKPVMKRLGELGVEVFTRTAAKRLSADRRGLLAEENGRAFEVPAEKVLVTVGRRPVTDGWGLEEIDLDHSGRFIRIDDQCRTSMRGVYAIGDVTGEPMLAHRAMAQGEMVAEIVAGHKRSWDKRCIPAVCFTDPEIVGAGLSPEEARAAGIDVKIGQFPFQANGRAMTTLSEDGFVRVIARADNHLVLGIQAVGHGVSELSATFALAIEMGARLEDIAGTIHAHPTQSEAFQEAALKTLGHALHI

SEQ ID NO: 40475 - protein, 464 aa, Mesorhizobium loti MAFF303099
MKEISCKLLVIGAGPGGYICAIRAGQLGVDTVIVEAGKPGGTCLNVGCIPSKALIHAAEEFEKVAHMAGGKSPLGISVSAPVLDLGKTIAWKDGIVSRLNSGVAGLLKKAGVKTVHGWAMFRDGKTVEVETETGSQVIRAETIVIATGSAPVELPFLPFGGPVISSTEALALSVVPKKLAVVGGGYIGLELGMAFAKMGAEVTLVEALPRVLAQYDAELTRPVVKRLAALGVEVMTEAKAKGLSTKGDALLVETADGKNTKVSADKILVTVGRKPVTEGWGLDQIDLDMSGKFIRIDDQCRTSMRGIFAIGDVTGEPMLAHRAMAQGEMVAEIVAGHKRNWDKRAIPAVCFTDPELVTVGLSPEEAKAQGEIKIGLFPFAANGRAMTKLGEDGFVRVVARADNHLVLGIQAVGQGVSELSTAFGLALEMGARLEDIAGTIHAHPTQGEGFQEAALKALGHALHI

SEQ ID NO: 40476 - protein, 104 aa, Rhizobium sp. NGR234
MTFRPLHDRILVRRIEAEEKTAGGIIIPDTAKEKPQEGEVVATGPGARDDSGQLRPPDVKVADRILFGKWSGTEIKLDGEDLLIMKESDVMGVIEVDAAARNAA

SEQ ID NO: 40477 - protein, 410 aa, Mesorhizobium loti MAFF303099
MADAGMLRFHVPEPEVRPGGTPDFSNVTIAAAGSVPRPDIDVDPRTIRDMAFSIIRVLNRNGEAVGPWAGLLSNEELLEGLRHMMTLRTFDARMQMAQRQGKTSFYMQHLGEEAVSCAFRKALEPGDMNFPTYRQAGLLIADGYPMVTMMNQIYSNEADPLKGRQLPIMYSSKEHGFFSISGNLATQYIQAVGWAMASAISNDSKIAAAWIGDGSTAESDFHSALVFASTYKAPVVLNVVNNQWAISTFQGIARGGSGTFAARGLGFGIPSLRVDGNDYLAVHAVAKWAAERARKNLGPTLVEYVTYRAGAHSSSDDPSAYRPKTESDAWPLGDPVVRLKNHLIGLGVWSDERHAQAEAEILDTVIAAQKEAESHGTLHAGGKPSTRDMFEGLYAEMPPHLRRQRQQAGV

SEQ ID NO: 40478 - protein, 254 aa, Zea mays
MTTRQVLTEENQKKIVEFCKNERLVLLADEVYQENIYVEDKQFHSFIIIARSLGYTDDDLPLVSFQSISKGYYGECGKRGGYMEITGFSPQVRDQIYKMASINLCSNITGQILASLVMNPPKAGDESFESFRLERDGILSSLGRRAQALEEAFNSLEGITCNKAEGAMYLFPRLHLPRKAIGAAQAAGTAPDAYYAKRLLEATGIVFVPGSGFGQVPGTWHIRSTILPQEDKIPGIVSRFKEFHDKFMDEFRDY

SEQ ID NO: 40479 - protein, 87 aa, Arabidopsis thaliana
  misc_feature (49)..(49): Xaa can be any naturally occurring amino acid
  unsure (1)..(87): unsure at all Xaa locations
PTGPNGFQFMGGQAPEKRVPNSVQAFPFVSPFWGKFLFGEHQKSFKRNXAPLVSILAKFVAAVRILKAFSGPQKKKSYQSCFIQVRL

SEQ ID NO: 40480 - protein, 772 aa, Streptomyces avermitilis MA-4680
MTAKSAAAAARATVYGYPRQGRGRELKKAIEGYWKGRLDADALRTTATGLRRDTWQQLAEAGIHEVPTGDFSYYDHVLDTSVMVGAIPARHRAAVEADALDGYFAMARGTQDVAPLEMTKWFDTNYHYLVPELGPDTVFSTDSAKQVAELGEALALGLTARPVLVGPVTYLLLAKPAPGVAADFDPLTLLDRLLPVYAEVLADLRAAGAEWVQLDEPALVQDRTPAELNAAERAYRVLGGLTDRPKLLVASYFDRLGDALPVLAEAPVEGLALDFAEGAAANLDALAAVGGLPGKRLVAGVVDGRNIWVNDLEKSLALLGTLLGLADRVDVAASCSLLHVPLDAAAERDIAPQVLRWLAFARQKTAEIVTLAKGLGHGTDAIAAQLAANRADLVSRADSALTRDPAVRSRTAATTDADARRSGPYPERAAAQRARLGLPLLPTTTIGSFPQTAELRTARADLRAGRIDSAGYEERIRAEIGEVISFQEKAGLDVLVHGEAERNDMVQYFAERLTGYLTTQHGWVQSYGTRYVRPPVLAGDISRPEPMTVPWTTYAQSLTDRPVKGMLTGPVTMLAWSFVRDDQPLGETARQVALALRDEVGDLEAAGTSVIQVDEPALRETLPLRAADRPAYLAWATEAFRLTTGGVRPDTQIHTHMCYAEFGDIVQAIDDLDADVISLEAARSHMQVARELAEHAYPREAGPGVYDIHSPRVPGVDETAALLRKGLEAIPAERLWVNPDCGLKTRGWPETRASLENLVAAARTVRAEHAGS

SEQ ID NO: 40481 - protein, 546 aa, Cytophaga sp. FIRDI-133-V546
MVKEMKFSEDARRSMLRGVDKLADAVKVTLGPKGRNVVLEKKFGSPLITNDGVTIAKEIELEDAFENMGAKLVAEVASKTNDVAGDGTTTATVLAQALIREGLKNVTAGANPVGLRKGIEKAVAVAVEELKAISKPIEGKESIAQVAAISAADDEVGQLIAEAMERVGNDGVITLEESKGFTTELEVVEGMQFDRGYASPYMVTDSDKMEAVLENPYILITDKKISNIQEILPVLEQVVQQGKPLLLIAEDVEGEALATLVVNKLRGTFNAVAVKAPGFGDRRKAMLEDISTLTGGEVITEEIGLDLKSSTIDQLGRAAKVVVTKEHTTIVSGAGNPAEIDARVKQIRAQLEETTSEFDREKLQERLAKLAGGVAVIKVGAATETELKERKLRIEDALNSTRAAVEEGIVAGGGTALVNIYNKVAGVEAEGDEATGINIVLRAIEEPVRQIAHNAGLEGSVIIERLKNEAVGVGFNAASGKWVNMIETGIVDPTKVTRSALQNAASVAAMFLTTEAVVADKPEPAGASGMPDMSGMGGMGGMGGMM

SEQ ID NO: 40482 - protein, 476 aa, Lycopersicon esculentum
MDLETSEISNYKSSAVLSKLASNEQHGENSPYFDGWKAYDNDPFHLVNNLNGVIQMGLAENQLSVDLIEEWIKRNPKASICANDGIESFRRIANFQDYHGLPEFTNAIAKFMEKTRGGKVKFDAKRVVMAGGATGANETLILCLADPGDAFLVPTPYYPGFNRDLRWRSGVQLLPISCKSCNNFKITIEAIEEAYEKGQQANVKIKGLILTNPCNPLGTILDRDTLKKISTLTNEHNIHLVCDEIYAATVFNPPKFVSIAEIINEDNCINKDLVHIVSSLSKDLGFPGFRVGIVYSFNDDVVNCARKMSSFGLVSTQTQHLLAFMLSDDEFVEEFLIESAKRLRERYEKFTRGLEEIGIKCLESNAGVYCWMDLRSLLKEATLDAEMSLWKLIINEVKLNVSPGSSFNCSEVGWFRVCFANIDDQTMEIALARIRMFMDAYNNVNKNGVMKNKHNGRGTTYDLTPQMGSTMKMLLA

SEQ ID NO: 40483 - protein, 471 aa, Nocardioides sp. JS614
MAKPPPSTVDHVVSLAKRRGFVYPCGEIYGGTRSAWDYGPLGVELKENIKRQWWKSMVTMRDDMVGLDSSIILPRQVWEASGHVDTFMDPLTECQSCHKRFRADHLQEEVAEKKSKSEGHSVNPDDVDLATVACPNCGTRGAWTEPRQFSGLLKTHLGVIENEEGLHYLRPETAQGIFINFANVVTSSRHKPPFGIAQIGKSFRNEITPGNFIFRTREFEQMEMEFFVKPGEDKEWHQYWIDERTRWYVDLGIDPDNLRHFEHPQEKLSHYSTRTVDIEYRFRFAGSEWGELEGIANRTDFDLSTHSKHSGQDLSYFDQANNERYVPYVIEPAAGLSRSLMTFLVDAYQEDEAPNTKGGVDKRTVLRLDPRLAPVKVAVLPLSRNADLSPKAKDLAMELRRAGWHVDFDDSGAIGRRYRRQDEIGTPYCVTVDFETLDDQAVTVRERDSMQQERIGLDRISAYFAERLIGC

SEQ ID NO: 40484 - protein, 476 aa, Lycopersicon esculentum
MDLETSEISNYKSSAVLSKLASNEQHGENSPYFDGWKAYDNDPFHLVNNLNGVIQMGLAENQLSVDLIEEWIKRNPKASICANDGIESFRRIANFQDYHGLPEFTNAIAKFMEKTRGGKVKFDAKRVVMAGGATGANETLILCLADPGDAFLVPTPYYPGFNRDLRWRSGVQLLPISCKSCNNFKITIEAIEEAYEKGQQANVKIKGLILTNPCNPLGTILDRDTLKKISTFTNEHNIHLVCDEIYAATVFNPPKFVSIAEIINEDNCINKDLVHIVSSLSKDLGFPGFRVGIVYSFNDDVVNCARKMSSFGLVSTQTQHLLAFMLSDDEFVEEFLIESAKRLRERYEKFTRGLEEIGIKCLESNAGVYCWMDLRSLLKEATLDAEMSLWKLIINEVKLNVSPGSSFNCSEVGWFRVCFANIDDQTMEIALARIRMFMDAYNNVNKNGVMKNKHNGRGTTYDLTPQMGSTMKMLLA

SEQ ID NO: 40485 - protein, 359 aa, Pneumocystis carinii
MHGKDAAKERGLLSSFRRIKKPKTERLDSYFGFWGDKCTSEKKNDVHPPERFKFYATLTRHYYSLVTDFYEYGWSISFHFCRLCKNESFSQAIARHEHYIALHAGIREGETVLDVGCGVGGPDCQISVFTGANIVGLNNNDYQIQRAKYYSEKKGLSDKLKFIKGDFMQMPFPENSFDKIYSIEATIHAPSLEGVYSEIYRVLKPGGLYASYEWVMLTEYDENDPEHQQIVYGIEIGDSIPKISKIGEAEAALIKVGFEIIHSEELSTKNSPLPWYYYLDGYLKRVRSFRDFISIARMTTIGKWLISSFIGLMEFIGLLPKGSKKVNDILLVAADSLVKAGKKEIFTPMQLWVCRKPLV

SEQ ID NO: 40486 - protein, 665 aa, Haemophilus influenzae Rd KW20
MATRRQLANAIRVLAMDSVQKAKSGHPGAPMGMADIAEVLWRDFLKHNPTNPKWADRDRFVLSNGHGSMLIYSLLHLTGYDLSIEDLKQFRQLHSKTPGHPEYGYAPGVETTTGPLGQGITNAVGMAIAEKTLAGQFNREGHEIVDHHTYVFLGDGCLMEGISHEACSLAGTLGLGKLIAFYDDNNISIDGHVDGWFSDDTAERFEAYGWQVIRNVDGHDAEQIRAATILAQAEKGKPTLIICKTIIGFGSPNKSGSHDSHGAPLGDEEIDLTRKALGWEYAPFEIPAEYYAEWSAKEKGAAAEKSWEEKFAAYAKAYPELAAEFKRRVSGELPTNWAAESKAFIEKLQANPASIASRKASQNAIEAYAHVLPEFLGGSADLASSNLTLWSGSKPIRAHENVGGNYINYGVREFGMSAIMNGIALHGGFIPYGATFLMFYEYAHNAVRMAALMKQRTLFVYTHDSIGLGEDGPTHQPVEQTASLRLIPNLETWRPCDQVESAIAWQQAVERQDGPSALIFTRQNLAQMDRTSAQLDAVKRGAYVLKDCDGTPELIFIATGSEVELAVQAAEALSAEGKKVRVVSMPSTNRFDKQDAAYRESVLPAAVTKRVAIEAGIADFWYKYVGFNGRVIGMNSFGESAPADQLFKLFGFTVENVVAKAKEIL

SEQ ID NO: 40487 - protein, 211 aa, Polytomella sp. Pringsheim 198.80
MSKISKEILTDSIAAVLKGSNDKRRGFQETIELQIGLKNYDPQKDKRFSGTVKLPYIPRPRMKICVLGDVKHCEQANSLAVDAKGVDDLKKLNKNKKLVKKLAHSYHAFLASDAVIKQIPRLLGPGLNKAGKFPTSINKDLASQIDEIKASIKFQLKKVLCMGVAVANVGMSEAEIRTNIMYAVNFLVSLLKKNWQNVRCLYIKSSMGKPG

SEQ ID NO: 40488 - protein, 255 aa, Zea mays
MAKLMNKLVDSFEHDEIPDVGCVRAVLAELVLTFLFVFTGVSAAMAAGSDGKPGDAMPMATLAAVAIAHALAAGVLVTAGFHVSGGHLNPAVTVGLMVRGHITKLRAVLYVAAQLLASSAACVLLRFLSGGMVTPVHALGRGISPMQGLVMEVILTFSLLFVTYAMILDPRSQVRAIGPLLTGLIVGANSLAGGNFTGASMNPARSFGPALATGDWTNHWVYWIGPLLGGPLAGFVYESLFLVQKMHEPLLNGEV

SEQ ID NO: 40489 - protein, 461 aa, Photorhabdus luminescens subsp. laumondii TTO1
MLTSSPKQAETIPPKKSASELIYRLEDRPPLPQTLFAACQHLLAMFVAVITPAILICQALGLPTHDTQRIISMSLFASGLASLIQIRTWGPIGSGLLSIQGTSFNFVSPLIMGGLALKNGGADISTMMAALFGTLMVASVTEILLSRVLHLARRIITPLVSGVVVMIIGLSLIQVGLTSIGGGFSAIENHTFGSPEHLFLAGVVLVVIVLLNRQRNPYLRVASLVIAMTVGYVAAWLMGMLPPATVQENGSLMTIPAPLYYGLSFDWNLLIPLMLIFMVTSLETIGDITATSDVSEQPVSGPLYMKRIKGGVLANGLNSMLSAVFNTFPNSCFGQNNGVIQLTGVASRHVGYAVALMLMLLGLFPAVAGFVQQIPEPVLGGATIVMFGTIAASGIRIVSREALNRRAIMIIALSLAVGMGVAQQPLILQFAPDWLKTLLSSGIAAGGLTAITLNLVFPQEK

SEQ ID NO: 40490 - protein, 244 aa, Magnaporthe grisea
MSTQVDLSTIPISPDGENAPTSSGDKEVTVFHDSNNFNVKHPLMHKWTLWFTKPPTGKGDNWAELLKEVITFNSVEEFWGIYNNIAPVSELALKSDYHLFKEGVRPEWEDPQNKHGGKWSYSFKEKRNSPIDDIWLHTMLPAIGETLESEDDGEVMGVVVNVRKAFYRVGVWTRTTGKSIPNRGDGDVAGGKGRSPEKGRAILMDIGKRFKDVLRLPANEVLEFSGHTESAHSGSTRAKAKFTV

SEQ ID NO: 40491 - protein, 239 aa, Cryptococcus neoformans var. neoformans JEC21
MSHSSLDYPEMKELFNRNLKWSENVWARDPSFFPHHFPGQRPEILWIGCSDARVPETTILGCQPGDIFVHRNIANLYSPQDDSLNAVLMIALFNFNVKHIVVTGHTNCVGCLTALNVSRLPATPPTTPLQRYVKPLATLARTLYTPDGPPTLDLLVEENVVQQVKNLVESDIIKGVSGVYIQLKRKNADISLQNWKKRGADGVVIHGWVYHLEDGTIRDLNVSVGPSGHIPGKKVKSLF

SEQ ID NO: 40492 - protein, 523 aa, Cryptococcus neoformans var. neoformans JEC21
MGLSRQARIITLLVIDSVFFLIELITGYAVGSLALVADSFHMLNDVLSLIVALYTIRLATSPSSSANSYGWQRAEILGALINGVFLVALCVSIGLEAVGRIFSPPEISNAQLIVVVGSLGLLSNIVGLFLFHDHGHSHGGHTHGAVALPNDEDETSSLISRDDSVSELYQHPAQTRAQVIETAQEFGYGGTQLSSSLDSRAGHLAKSPNAGGHGRTGSASRRTKRGSFSRAGGHSRLGSANIVPPVPGQNDVLPPVGGDGNSTSSSTVIDNGKKKASKKDDHDQDHGREREQGSDSGKKLAGNASDAESGHTHGSPAEHGRHGGHGHSHGAMNMRGVFLHVVGDALGNVGVISAGLVIWFCQGRWTLYFDPGVSLVITCIIFSSALPLVKSASYILMQGVPSHVSLDAVRQCIYEVPGVDSVHELHIWQLSESTVVASVHVMIEAGRDYMVVASGIRERMHSHGIHSVTIQPEFYCEETDPQDTEACLIRCPPGQCSGDTCCPPGVKITGPEGDEGNGHDHEH

SEQ ID NO: 40493 - protein, 223 aa, Cryptococcus neoformans var. neoformans JEC21
MASTIDLKQLEQHLATRSYIDGFKPTTADVEIYKSLGSAPEATFPHCHRWYIHIASFADEFDSLPAGANPLSSTSAGAAAAAGEEEDDEVDLFGSDDEEADEEAERIKAERIAKYNEAKEAKKQEKLAAGKTLEVAKSVVTLQVKPWDDETDMQALEDGVRAIEKDGLVWGASKLVPVGYGIKMLQINLVIEDAKISLDELQEEIAELEDYVQSSDVAAMQKL

SEQ ID NO: 40494 - protein, 547 aa, Magnaporthe grisea
MASKNMVNPAVEPSMEDDLFAREVAEVKQWWSDPRWRYTKRPFTAEQIVSKRGNLKIEYPSNAQSKKLWKILEGRFQKRDASYTYGCLEPTMVTQMAKYLDTVYVSGWQSSSTASSSDEPGPDLADYPYTTVPNKVSHLFMAQLFHDRKQRHERLSAPKSERSKLQNIDYLRPIIADADTGHGGLTAVMKLTKLFIEKGAAGIHIEDQAPGTKKCGHMAGKVLVPISEHINRLVAIRAQADIMGVDLLAIARTDAEAATLITTSIDPRDHAFILGCTNPSLQPLADLMNTAEQSGKTGDQLQAIEDEWMAKANLKRFDDAVVDVINSSSSIRNPKDVAAKYLQAAKGKSNREARAIASSLGVPEIFFDWDSPRTREGYFRIKGGCDCAINRAIAYAPYADAIWMESKLPDYEQAKEFAEGVHAVYPELKLAYNLSPSFNWKTAMPRDEQETYIRRLAGLGYCWQFITLAGLHTTALISDRFARAYSEVGMRAYGELVQEPEMELGVDVVKHQKWSGATYVDELQKMVTGGVSSTAAMGKGVTEDQFH

SEQ ID NO: 40495 - protein, 542 aa, Rhizobium sp. NGR234
MAAKEVRFHTDAREKMLRGVDILANAVKVTLGPKGRNVVLDKSFGAPRITKDGVTVAKEVELEDKFENMGAQMVREVASKTSDIAGDGTTTATVLAQAIVKEGAKAVASGMNPMDLKRGIDKAVDAIVEELKTNARRVTKNDEIAQVGTISANGDIEIGRFLAEAVEKVGNEGVITVEEAKTAVTELEVVEGMQFDRGYLSPYFVTNPDKMRVELEEPYLLIHEKKLSNLQALLPVLESVVQSGKPLLIIAEDVEGEALATPVVNKLRGGLKIAAVKAPGFGDRRKAMLEDIAILTGGTAISEDLGIKLENVTLNMLGRAKKVVVEKENTTIVDGAGSKSEIQGRVAQIRAQIEETTSDYDREKLQERLAKLAGGVAVIRVGGSTEVEVKERKDRVDDAMHATRAAVEEGVLPGGGVALLRAVKALDSIRTENADQKHGIEIVRRALEAPVRQIAENAGAEGSIIVGKLREKTEFGFGWNAQTNEFGDLYDQGVIDPVKVVRTALQDAASVAGLLITTEAMVAEKPKKDAPLPPMPGGGMDF

SEQ ID NO: 40496 - protein, 464 aa, Rhizobium sp. NGR234
MARPPARKEDLKNSGPKMTARSSKYVGVFAALVLILVPGPPPAAQPPSAISASTQPSLADVLEGVTPAVVNIAVRSRAPAETNPLYNDPFFRRYFNLPEQQQQRLSAGSGVIVDADKGYILTNHHVVAAAGEIAVTLKDRRRFTAELVGSDEATDMALLKIDADKLTALSFGDSGALRVGDSVVAIGNPFGLGQTVTSGIVSALGRGGINVEGYEDFIQTDASINPGNSGGALVTADGRLVGINTAIIAPAGGNVGIGFAVPIAMASAVMEQLIEHGEVRRGRIGISAQDLTPDLAEALGIEQSYGAVVGGVERNSPAAHAGLRAGDVIIAVNDRKITGSADLRNRIGLAPVGSEVEIEYRRDRVPKTVTMRVEPDETIANPGSMPSRLDGAEFQDAAGNVIVSSVEDGSAAARAGLRMGDVIVAANRRPVATVAELAAALKNAGGTIALDLFRGGSKHLLVIR

SEQ ID NO: 40497 - protein, 497 aa, Erwinia carotovora subsp. atroseptica SCRI1043
MTTHVVTHHAVTHVVWLRNDLRITDNLALYAACQDPSATVLAVFIATPAQWEKHDMAPRQAAFLLENLTLVQHVLAEKGIPLHYHECADFAASVDWLMQFCAEQQATDLFYNHQYEINERLRDKQVKDRLADSVVCHGYHDSLLLPPGSVLTGNGEMYKVFTPFRQAFIKRLLEADTTCVPAPDARGEPINNTAELVPFSYPQCEVDSEDFPCGERAALQQLRRFCREQVQDYDQQRDFPALPGTSKLSPYLALGIVSPRQCFNRLRAECPDMLERREGGAFTWFNELVWREFYRHLIVSWPQLCKHRPFTAWTQWVKWRESPEDLTAWQQGKTGYPIVDAAMHQLNETGWMHNRLRMICASFLVKDLLIDWREGERYFMSQLLDGDLAANNGGWQWAASTGTDAAPYFRIFNPTTQGERFDPDGRFIRHWLPELAAVPDKDIHQPHRWADKQHVKLNYPLPIVDHKTARLDTLAAFEAAKNIGMANNDREEKSKYA

SEQ ID NO: 40498 - protein, 402 aa, uncultured marine gamma proteobacterium EBAC20E09
MKNVVITGMGIKSCIGNEYNSVLKNLQEGKSGIIFNETYDEMNFRSCVSGSIKIDLSEYIDRKLLRFMGESAGYAYLATLDALKMAGVDNNYLDNPRIGIVAGSGGASTRIMVESSDIARNRGPKRIGPYGVTKSMSSSISAIVATALKLKGINYSISSACATSAHCIGHAADLIKNGQQDIVIAGGSDDEHWSSSCLFDAMGALSSNFNADPTIASRPYDANRDGFVISGGAGMLILEEEEHAKKRGANILAKLSGYFANSDGYDMVAPSGEGAIRCMDGAIKEMKSEIDYINTHGTSTPVGDVAELNAIKELFGSNAPMISSTKSMTGHSLGATGAHEAIYSVMMINENFIAPSINIDNLCDEAQGLDIVRETREANIKNILSNSFGFGGTNASLVISKY

SEQ ID NO: 40499 - protein, 422 aa, Pyrococcus horikoshii OT3
MDMVEQDPFEIAVKQLERAAQHMKISEEALEFLKRPQRIVEVTIPVEMDDGSVKVFTGFRVQYNWARGPTKGGIRWHPEETLSTVKALAAWMTWKTAVMDLPYGGGKGGIIVDPKKLSDREKERLARGYIRAVYDIISPYEDIPAPDVYTNPQIMAWMMDEYETIARRKTPAFGIITGKPLSIGGSLGRNEATARGASYTIREAAKVLGWDGLKGKTIAIQGYGNAGYYLAKIMSEDYGMKVVAVSDSKGGIYNPDGLNADEVLKWKREHGSVKDFPGATNISNEELLELDVDVLAPAAIEEVITKKNADNIKAKIVAEVANGPVTPEADEILFEKGILQIPDFLCNAGGVTVSYFEWVQNITGYYWTLEEVRERLDKKMTKAFYDVYNTAKEKNIHMRDAAYVVAVQRVYQAMLDRGWVKH

SEQ ID NO: 40500 - protein, 641 aa, Bordetella parapertussis 12822
MCGIVGIWGPLRDKANVLAESCRRIRHRGPDSNGYWEDAEADLALAHVRLAILDLTEAGHQPMVSACGRYVIVLNGEIYNHMELRERLQQDGLAPAWRGHSDTETVLACFAGWGLEQTLQAAVGMFAIALWDRAERKLALMRDRMGEKPLYYGYSQANLLFGSELKAFMPVPGFGRELDRNALASFMRHNYIPAPQSIYAGIRKLPPGAWVEIDAAQMRRGELPEPQVYWSARRAADQGLGDRRRFESDAQAIDALEQVVSQAVRGQMLSDVSLGAFLSGGIDSSTVVALMQAQSAQPVRTFAIGFHEKGYNEAEHAKAVAAHLGTEHTELYVTAEDGLAVVPSLADMYDEPFADSSQIPTSLVTRMARQHVTVALSGDGGDELFGGYSRYFRVDNWWRKCAAMPGPLRHLAGAALRGSAALPGAGAWRGKVGKLGELLGADTRGEFYRLFVSYWADPGRVVIGGTEPLSPFEQPMEGSTFDAMMKLDTVTYLPDDILVKVDRAAMAVSLETRVPLIDHRVYEFAWQLPFEYKVRGGTGKWLLRQLLYRHVPQAMVDRPKRGFAVPLAAWLRGPLRDWAEALLDPARLRQEGWFEPEPILRKWREHLSGHRNWDSHLWGVLMMQAWLDRYRAGAGDEAGRR

SEQ ID NO: 40501 - protein, 323 aa, Candida albicans SC5314
MSDQCDGLQGFLFTHSLGGGTGSGLGSLLLEQLSLDYGKKSKLEFAVYPAPQVSTSVVEPYNTVLTTHTTLEHADCTFMVDNEAIYDMCRRNLDIARPNFSSLNNLIAQVVSSVTASLRFDGSLNVDLNEFQTNLVPYPRIHFPLVSYAPVFSKSRATHEANSVSEITQSCFEPGNQMVKCDPRTGKYMATCLLYRGDVVTRDVQNAVAQVKSKKTVQLVDWCPTGFKIGICYQPPTAIKGSELASASRAVCMLSNTTAIAEAWRRIDRKFDLMYSKRAFVHWYVGEGMEEGEFTEAREDLAALERDYIEVGTDSFPEEEEEY

SEQ ID NO: 40502 - protein, 284 aa, Arabidopsis thaliana
FLQLLQISYFPENHFPKKNKTFPFVLLPPTAITAYQSELGGDSSPLRKSGRGKIEIKRIENTTNRQVTFCKRRNGLLKKAYELSVLCDAEVALIVFSSRGRLYEYSNNSVKGTIERYKKAISDNSNTGSVAEINAQYYQQESAKLRQQIISIQNSNRQLMGETIGSMSPKELRNLEGRLERSITRIRSKKNELLFSEIDYMQKREVDLHNDNQILRAKIAENERNNPSISLMPGGSNYEQLMPPPQTQSQPFDSRNYFQVAALQPNNHHYSSAGRQDQTALQLV

SEQ ID NO: 40503 - protein, 302 aa, Xanthomonas campestris pv. vesicatoria str. 85-10
MLVFTHPACLGHDAGPEHPESPARLEAVVQALRGAFPDLDWREAPLAKLGDLCRVHEREQVDAVLETAFDGYRQLDVDTRMVPASRAAALRAAGAGIAAVDAVMQDQARTAFCAVRPPGHHATAQVSMGFCLFNNIAVAAAHARDRHGLERITIVDFDVHHGNGTQAIFERDPTVQYLSTHQSGLYPHSGSVYERGVGNIHNLLLPPGSDGLRFRNVWEDEMLPLVDAFRPQLILISAGFDAHLRDPLADLMLDDDDFAWLTGALRTLADRHARGRVVSMLEGGYDLQALRESSVAHVAALR

SEQ ID NO: 40504 - protein, 343 aa, Trichodesmium erythraeum IMS101
MIQERTVPKFDTNSVKITKEKALILYEDMVLGRLFEDKCAEMYYRGKMFGFVHLYNGQEAVSSGVIKAMRQDEDFVSSTYRDHVHALSAGVPAREVMAELFGKATGCSKGRGGSMHMFSATHNLLGGYAFVAEGIPVATGAAFQSKYRRETMGNQAADQVTACFFGDGACNNGQFFECLNMAALWKLPIIYVVENNKWAIGMAHERATSEPEIYKKAHAFGMVGVEVDGMDILAVHSAAQEAVARARAGEGPTLIEALTYRFRGHSLADPDELRDQEEKQYWFSRDPIKKFTTYLTENNLVDVAELVAIDKKIENLITEAVDFATNSPEPGSDELYRYIFAED

SEQ ID NO: 40505 - protein, 386 aa, Trichodesmium erythraeum IMS101
MIQTDKVIETTIQPQLESSELFQPTPTRQVNDELEILIGDREEYIDAQSDEDDLKSGKVAKSRTRTAGKKKHYTEDSIRLYLQEIGRIRLLRADEEIELARKIADLLELERIREELIYHLDREPQVSEWANAVDMELPKFKRRLILGRRAKEKMVQSNLRLVVSIAKKYMNRGLSFQDLIQEGSLGLIRAAEKFDHEKGYKFSTYATWWIRQAITRAIADQSRTIRLPVHLYETISRIKKTTKLLSQEMGRKPTEEEIATSMEMTIEKLRFIAKSAQLPISLETPIGKEEDSRLGDFIESDGETPEDEVSKNLLREDLESVLNSLSPRERDVLRLRYGLDDGRMKTLEEIGQIFNVTRERIRQIEAKALRKLRHPNRNSILKEYIR

SEQ ID NO: 40506 - protein, 322 aa, Oceanobacillus iheyensis HTE831
MNIATIGSGKIVEEMLQAIEPLQDVQCVAAFSRTREKAQHLADRYDITKTFTDLEEMLNDDEVDTVYIASPNSLHAEQARLAMEFGKNVICEKPFTSSQDEAKALFNLAKEKELFLFEAIPTLHLPNFQLIKEHMDHLGPIKLVQCNYSQYSSRYDQLKNGEVTNIFDPKFAGGALADINIYNLHFVLNLFGRPEEVNYAANLYSNGIDTSGVAVLSYPTFQASCVGAKDTTGVNFAMIQGEEGYLYVSQGTNGVQQVTMKKKDEEEVIISIQQDDPRLTYEFRRFQEIIKNEDYHTRDALLEHSVHVASVMEAARKQIGLA

SEQ ID NO: 40507 - protein, 462 aa, Synechococcus elongatus PCC 7942
MVIACSIAIALIFSSPVKAKLPLGDRLTWGNAVTETSPAYRQALNQAKTFRMPAEFEPITSIWMAYPTYENQAGYPSQTVQKAMVKAIAPTVKIDFLLNEPEEKVIINGWLKTAGIPASQVRYHLVPHEDLWIRDMGPIFAVNADQTQVVDFGFNAWSYLAATDPAAMTDEQVDRKVAGDLDLPILRSSLISEGGNREFNGKGTLMLTEAVELQRNPGLTKEKIETELKRVFNLKKVIWLQEGVIDDELSYRGKLPDGSLTVLATGGHIDEYARFVDSNTILLAEVTAEERASDPLAAINYQRLEENLKILQAATDQDGKPFRIVRIPAAKPIYVNMTKEDAVFQALQELTFEDGTVIQDDDQIKTILAASYLNFVIANDVVIVPRYWQPDRNLEYQQKDQAALAAFQSVFPNKKIVAINPENINAGGGGMHCIVQQQAVVDAVARSLSTGAGDRSKSRSNL

SEQ ID NO: 40508 - protein, 381 aa, Phanerochaete chrysosporium
MQIFVKTLTGKTITLEVESSDTIDNVKAKIQDKEGIPPDQQRLIFAGKQLEDGRTLSDYNIQKESTLHLVLRLRGGMQIFVKTLTGKTITLEVESSDTIDNVKAKIQDKEGIPPDQQRLIFAGKQLEDGRTLSDYNIQKESTLHLVLRLRGGMQIFVKTLTGKTITLEVESSDTIDNVKAKIQDKEGIPPDQQRLIFAGKQLEDGRTLSDYNIQKESTLHLVLRLRGGMQIFVKTLTGKTITLEVESSDTIDNVKAKIQDKEGIPPDQQRLIFAGKQLEDGRTLSDYNIQKESTLHLVLRLRGGMQIFVKTLTGKTITLEVESSDTIDNVKAKIQDKEGIPPDQQRLIFAGKQLEDGRTLSDYNIQKESTLHLVLRLRGGL

SEQ ID NO: 40509 - protein, 342 aa, Mesembryanthemum crystallinum
MELYEIVKDIGSGNFGQAKLVRDKWTNEFVAVKFIERGSKDDEHVQRKLMNHSSLKHPNIIRFKEVLLTPTHLAIVMEYAAGGELFERICNAGRFREDEARFFFQQLISGVSYCHSMQICHRDLKLENTLLDGSPAPRVKICDFGYSKSSVLHSQPKSAVGTPAYIAPEVLSKREYDGKIADVWSCGVTLYVMLFGAYPFEDPDDPKNFRKSLVRILSVQYCIPDNIPISMECRHLLSRIFVANPEKRITIPEIKNHPWFQKNLPMELMEGGSWQSHDINHPSQNIGEILSIIQEARQPAELPSTGGLQIGGTLDFDDLDVDLDVDVDLDDIESSGEFVCPM

SEQ ID NO: 40510 - protein, 316 aa, Oceanobacillus iheyensis HTE831
MKDIITLGEAMVVFNPASTGPMKFVNGFHKTIGGAELNLAIGCARLGLDTGYITRLGNDEFGKSIRNFVRGEGIDASEIDFIDHYPTSINFKEIMEDGSVRTFYYRDKSPTLSMTPDVLNESYFKNAKILHLTGIFPAIGEGALKVWKQAIHLAKKHGVKISFDPNIRLKMWSKEQARKVLLEILPDVDILLAGDEEMDIIIGKRDPVDIIETCKELGIPYVAIKQGENGSVGYSQGETMKAAPVKASKVVDTVGAGDGFNAGILYGYLHDWSLERTLTFGNTIGSMVVGITGDNEGLPYYEDVQERLGEIERIER

SEQ ID NO: 40511 - protein, 427 aa, Neisseria meningitidis MC58
MNRNEILFDRAKAIIPGGVNSPVRAFGSVGGVPRFIKKAEGAYVWDENGTRYTDYVGSWGPAIVGHAHPEVVETVCEAALGGLSFGAPTEGEIVIAEEIAKIMPSVERLRLVSSGTEATMTAIRLARGFTGRDKIIKFEGCYHGHSDSLLVKAGSGLLTFGNPSSAGVPADFTKHTLVLEYNNIAQLEEAFAQSGNEIACVIVEPFVGNMNLVRPTEAFVKALRGLTEKYGAVLIYDEVMTGFRVALGGAQSLHGITPDLTTMGKVIGGGMPLAAFGGRKDIMECISPLGGVYQAGTLSGNPIAVAAGLKTLEIIQREGFYENLTARTEQLVQGFRTAADAAGIEFTADSVGGMFGLYFAAHAPRNYADMARSNIEGFKQFFHGMLDRNVAFGPSAYEAGFVSAAHTPELIDETVAVAVEVFKAMAE

SEQ ID NO: 40512 - protein, 191 aa, Glycine max
  misc_feature (94)..(94): Xaa can be any naturally occurring amino acid
  misc_feature (169)..(169): Xaa can be any naturally occurring amino acid
  misc_feature (176)..(176): Xaa can be any naturally occurring amino acid
  unsure (1)..(191): unsure at all Xaa locations
MEMQDQIESTRSTIFGSASNIHSNGEKQSENVAHIPSVGNNQTPKVRKPYTITKQREKWTEEEHQKFLEALKLYGRGWRQIEEHIGTKNAVQIXSHAQKFFSKVVRESEGSAESSIQPINIPPPRPKRKPLHPYPRKSVNSFKGHCIPNETEISPSTNLLVAENDTPSXNLVLSTXGSEAFGSQFQSRLTD

SEQ ID NO: 40513 - protein, 173 aa, Glycine max
  misc_feature (4)..(4): Xaa can be any naturally occurring amino acid
  misc_feature (24)..(24): Xaa can be any naturally occurring amino acid
  misc_feature (73)..(73): Xaa can be any naturally occurring amino acid
  misc_feature (95)..(96): Xaa can be any naturally occurring amino acid
  misc_feature (136)..(136): Xaa can be any naturally occurring amino acid
  unsure (1)..(173): unsure at all Xaa locations
GPPXIRSENEADLAAAHEAGYESXLVSRLTLKPGKIASLAKSVRTLANMEDPINEILKRTEVADGLVLEKTSXPLGVLLIIFESRPDALVQIASXXIRSGNGLLLKGGKEAMRSNAILHKVITNAIPDNVGEKLIXLIITRDEIADLLKHDDVIDLVIPRGSNKLVAQIKSST

SEQ ID NO: 40514 - protein, 175 aa, Batophora oerstedii
MSFATTNKTIVPCATTKQIVRPRFLSNGTISKSRAMMVWEPFNNKFFETFSYLPPLTDDQITKQVDYILRNNWTPCLEFAGSDQAYVTHDNTVRMGDCASTYQDNRYWTMWKLPMFGCIDGSQVLTEISACTKAFPDAYIRLVCFDANRQVQISGFLVHRPESATDYRLPADRQV

SEQ ID NO: 40515 - protein, 435 aa, Bacillus cereus E33L
MEKQRFSGALSIFQWFFFLLATSVALPIVIGGVFHLSIKEISDLMQRTFFVVGISSFIQGCFGHRYPIADGPAGSWVSVFVILAGMAMQQGESTTETLRLLEGGLLVTGFLLIILGITGLFNRLMFLFTPLVTGSFLLILSLQLSGVFLEGMFGIQGQSSLDYQVAAISFGVFVLVIVLSIKGKGWVRSYSVLLGILFGWLLYFLLGKNSTMISTPASFIKLPDIFAWGTPQLNAGMVITSIIFTFILVSNTVAAVTAVKQVVPESDASEKQTMNRASWAGGITHVISALFSTIGIVPLPVSAGLIKLTGQKRIMPFLIASLALAGIALVPSIVNFLAMLPGPVACAASLASFVQMIGISFQSLLKDELDQRRLTILGITLLIGMGVMFLPKEIFSSLPTILQYILSNGLIVGTIIVIMLEQLWKTKKASEKNHV

SEQ ID NO: 40516 - protein, 359 aa, Fusobacterium nucleatum subsp. vincentii ATCC 49256
MQEYKACTAHTNILKKYGFEIEKGFANLETAYKASYKKVNGARIAILAEYDALPEIGHGCGHNAYGVTSIASGILVKELMQKLDLQGEILIIGTPAEETNGAKVDMAKLGIFNDIDVAMSVHPCGETHFRSGKSHAMEALQFTFKGKTAHAAASPHEGINALDGVLNLFNSINALRQQILPSARIHGIISKGGEAANIIPDLAIANFYVRAETLDYLRELVERVKNCAKGAALASGTKLEITNYETSFANLVTNKKLMELYEKNLKTLGVTDIRDREGFGSTDMGDISQCCPTIHPNFPLTTKHLVGHTVEFATATIQEEAYKGMKEACLAMALSCLDIFEKPEILKEIKEEFYQTFKK

SEQ ID NO: 40517 - protein, 428 aa, Erwinia carotovora subsp. atroseptica SCRI1043
MADKKATLTLEGKDPIELNVLSGTLGYDEIDIRPLGSKGYFTFDPGFTSTASCESKITYIDGDEGILLHRGFPIAQLAEKSNYLEVCYILLFGEPPTAEQYETFKTTVTRHTMIHEQITRLFHGFRRDSHPMAVLCGVTGALAAFYHDSLDISIERHREIAAYRLLSKMPTVAAMCYKYSLGQPFVYPKNNLSYAGNFLHMMFSTPCEEYVVNPVLERAMDRILILHADHEQNASTSTVRTAGSSGANPFACIAAGIASLWGPAHGGANEACLRMLEEISSVEHIPAFIERAKDKNDSFRLMGFGHRVYKNHDPRATVMRETCHEVLKELGRKDDLLEVAMELEHIALNDPYFIEKKLYPNVDFYSGIILKAMGIPSSMFTVIFAMARTVGWIAHWSEMHADGIKIARPRQLYTGYDKRDFASNLKHD

SEQ ID NO: 40518 - protein, 462 aa, Streptomyces seoulensis
MANDASTVFDLVILGGGSGGYAAALRGAQLGLDVALIEKDKVGGTCLHKGCIPTKALLHAGEIADQARESEQFGVKATFEGIDVPAVQKYKDDVISGLYKGLQGLIASRKVTYIEGEGRLSSPTSVDVNGQRIEGRHVLLATGSVPKSLPGLQIDGDRIISSDHALVLDRVPKSAIILGGGVIGVEFASAWKSFGADVTVIEGLKHLVPVEDENSSKLLERAFRKRGIKFSLGTFFEKAEYTQDGVKVTLADGKEFEAEVLLVAVGRGPVSQNLGYEEQGVNIDRGYVLVDEYMRTNVPTISAVGDLVPTLQLAHVGFAEGILVAERLAGLKTVPIDYDGVPRVTYCHPEVASVGITEAKAKEIYGADKVVALKYSLAGNGKSKILKTAGEIKLVQVKDGAVVGVHMVGDRMGEQVGEAQLIYNWEALPAEVAQLIHAHPTQNEALGEAHLALAGKPLHAHD

SEQ ID NO: 40519 - protein, 160 aa, Mycoplasma penetrans HF-2
MIKKIYLAGGCFWGIEQYYNLNQKIISTNVGYLNSKIDNPTYKDVCNNITDAVEAVELTYDDQVISLNEIIDLLFKVIDPTSINKQGNDIGRQYRTGIYSRDSNELMAIQEKINELQNNYSKLIQTEVMLVDNYYLAEEYHQKYLEKNPNGYCHINLKAK

SEQ ID NO: 40520 - protein, 588 aa, Erwinia carotovora subsp. atroseptica SCRI1043
MNLPVREFDAVVVGAGGAGMRAALQISQMGLSCALLSKVFPTRSHTVSAQGGITVALGNTHEDNWEWHMYDTVKGSDYIGDQDAIEYMCKTGPEAILELEHMGLPFSRLDDGSIYQRPFGGQSKNFGGEQAARTAAAADRTGHALLHTLYQQNLKNNTTIFSEWYALDLVKNQDGAVVGCTAICIETGEVVYFKAKATVLATGGAGRIYQSTTNAHINTGDGVGMALRAGVPLQDMEMWQFHPTGIAGAGVLVTEGCRGEGGYLLNKHGERFMERYAPNAKDLAGRDVVARSIMIEIREGRGCEGPWGPHAKLKLDHLGKDVLESRLPGILELSRTFAHVDPVKEPIPVIPTCHYMMGGIPTKVSGQALTVNEKGEDVVIPGLFAVGEIACVSVHGANRLGGNSLLDLVVFGRSAGIHLRESLEEQGESRDASESDIEASLDRMNRWNNTRSGEDPVEIRKALQSCMQNNFSVFREGDAMAKGLEELKVIRERLKDARLDDTSSEFNTQRIECLELDNLMETAYATAVSANFRTESRGAHSRFDYPERDDENWLCHSLYLPQTDSMTRREVNMQPKLRAAFPPKIRTY

SEQ ID NO: 40521 - protein, 707 aa, Oryza sativa
MNPYFVGLLVPIAVSLLLRKRRMVGKMRALPVDVGGEPGYAIRNYRFKQPVETHWEGVTTLAELFEQSCKDYVNMPLLGTRKLISREQESSLDGRSFEKLHLGEYDWKCYAEVFKSVCNFASGLIRLGHQKTDRVAIFAETRAEWQIALQACFRQNITVVTIYASLGEEALCHSLNETEVTTVVCGQKELKKMIDISGQLDTVKRVIYINEEGISAEVSSAQKSTSWIIEPFEDVGRLGDTAPVDANMPLPSDVAVIMYTSGSTGLPKGVMMTHRNVLATLSAVMTIVPEIGKKDVYLAYLPLAHILELAAEALIAAVGASIGYGSPLTLTDTSNKIKKGTLGDASALKPTLMTAVPAILDRVRDGVRKKVDTKGGVAKQLFDVAYNRRLAAVNGSWLGAWGLEKLLWDMLVFKKVRAVLGGKIRFVLSGGAPLSGDTQRFINICLGVPIGQGYGLTETCAGGTFSEYDDPSVGRVGAPLPCSYIKMNSFLVETTLIDWSEGGYLTSDSPMPRGEIVIGGPNVTKGYFKNEAKTNEVYKDDEKGMRWFYSGDIGRFHPDGCLEIIDRKKDIVKLQHGEYVSLGKVEAALIVSPYVENIMIHADPFHSYCVALVVAAHNELENWASQQGVTYTDFVDLCQKPEAVKEVLGSLSKAAKQARLEKFEIPAKIKLISEPWTPESGLVTAALKLKREVLRKTYEDDLAKLYA

SEQ ID NO: 40522 - protein, 402 aa, uncultured marine gamma proteobacterium EBAC20E09
MQNNFNRLPVTVLSGFLGAGKTTVLSHILNNRENKKVAVIVNDMSEINIDASMVNNEVSLNHSEEKLVEMSNGCICCTLREDLLLEVNKLAKDKKFDYLVIESTGISEPLPVAETFTFADEKGVSLSDVARLDTMVTVVDAFNFLKDYDDAKYLQDTGESLGEDDERSVADLLVDQVEFSDVILISKIDLVDQCDLHKLKGILRSLNTTAKIIPITKGQVEIDDVLNTGLFNFDKAQEAPGWLKEMRGDHTPETEEYGISSFTFVARRPFYPDKFYEFVHNTNKFGKLIRSKGYFWLGSRLEYAGQWSQAGGIARYGFAGMFWKSVPKQNWPTDEESLKIIKQNWEEPFGDMRQELVFIGQGLDKDAMIGALENCLVTEDDLLKGEEFWTTLNDPFPPWQEI

SEQ ID NO: 40523 - protein, 706 aa, Zea mays
  misc_feature (255)..(255): Xaa can be any naturally occurring amino acid
  unsure (1)..(706): unsure at all Xaa locations
MLLLQPSAVPAPALRGRPRPRRRLVPPPLASAPASIVVSSDEDAFTRCSGYLFEEGAATESELPTAYDLPGIAAVYRRRPLLVLRRSLQIGTSFGRWFALRYLDRVNERADDMFELRAAQLRRILLELGPAFVKIAQAVSSRPDVVPPAYLDELSLLQDRIAPFSNDVAFNIIEKELGLPLDMVFSEITPEPVAAASLGQVYQARLRSSGKIVAVKVQRPGVQAAISLDIYILRFLANLVRDPNEHLNLCISLDXTLNTGKSHLMQEMDYREEARNGLKFRELFGKFRDVSVPEMYLEQTRRRVLIMEWIEGEKLSEVRDQYLVEVGVYCSLSQLLEYGFYHADPHPGNLLRTVDGKLAYLDFGMMGEFRQELRDGFIEACLHLVNRDFDALAKDFVTLGLLPPTAQKGEVTKALTGVFENAVNRGVQNISFGDLSGNLGRTMYKFKFQIPSYFSLVIRSLAVLEGIAISFNPKYKVLGSSYPWIARKVLTDSSPKLRSTLQTLLYKDGTFQIDRLESLLTESLRARTEQSLVRNEQDVDSTRYAIKQVLSFTLADQGAFVKDLLLQEIAKGIDALGVATLSSATSAAASRLPFGGGPSPLTSLDDEDATNLRNLYRLLLLLSKVSQKENPSPIPEYNSAIEKEGGSTDELALALYGMTSLPEFLPVLSVIPELPPESQQQLLLLPADLTNRILSRALARTIRRLM

SEQ ID NO: 40524 - protein, 387 aa, Ceriporiopsis subvermispora
MAFTSLLALVALAAITRAAPTTICPDGTRVSNHVCCDFIPLAQALQSTLYMGDCGEDAHETIRLTFHDAIAISQSQGPSAGGGADGSMFIFPTVEPFFHANAGIDDSVNNLIPFLSKFPTITAGDLIQFAGTVALSNCPGAPQLEFLAGRPNATAPAVDGLIPEPQDNVTHILERFADAGGFTPFEVVSLLASHTVARADKVDLTIDAAPFDSTPFTFDTQIFLEVLLKGVGFPGTDNNTGEVESPLPLGNNKQGGNDTGEMRLQSDFALARDDRTACFWQGFVNEQEYMMSSFKAAMSKLAILGHNRNDLIDCSEVVPTPKPPVGKPATFPATTGPQDLQLTCKSERFPSLTIDHGARETLIPHCSNGGQDCPTVQFTGPAGEDDS

SEQ ID NO: 40525 - protein, 570 aa, Pyrococcus horikoshii OT3
MNGKFDKYEYLQDLMRRRGFAWGSFEIYGGSRGFYDYGPLGATIKRKIERKIREAFIREGFFEIETPDITPEQVFIASGHVEKFVDPVVECKKCGMRFRADHLIEEFLGIDVEGKSAEEMSRIIREHGLKCPECGGELSDVFYFNLMFETYIGPYKDKKAYLRPETAQGIFVNFKRLNAFARNKLPFGVFQIGKAYRNEISPRQGMIRLREFTQAEAEIFFNPNETEHPHFNEVKHEKLKLYPIENQLKELGEVEVTAEEAVKRGYVMNSFFAYYMVMIKKILLDIGIPEDKIRFRQQLPEERAHYSADTWDAEVYSERFGWVECVGLAYRTDYDLSRHMKMSGADLTVMIHYDKPKVVKRIQVSLNMKKVGPKLKADAKKINEIIKSMDQKELEKLVKDLNEKGKVTIEGYELSKEDFIVKEVEEKITGEKIVPHVLEPSFGIDRPFYLLLENSLTVDEDGRIYLKIKKDMAPIEVAVLPLVAKEPLTTIAYEIYRTLQKEGFIVVYDEKDSIGKRYMRYDEIGTPYCVTVDNQTPEDGTVTIRDRDTREQIRVKIEELPRKLKELIFG

SEQ ID NO: 40526 - protein, 647 aa, GIBBERELLA ZEAE PH-1
MGVPSEREAGDGPPASSASNPRRTPGNQSYARVAAQGTDEQSPLLRHDADTDNAHGEHDDSQTTKSIWYLLLLTISIGGLQIAWSVELSNGSPYLLSLGLSKSLMALVWIAGPLTGTLVQPYVGMLSDNCRMPMGKRKPFMIGGSVATILSLLFLAWAKEIVACASNIIGFDPESQGVKTTTIVVAVVGVYVLDFAINTVQASIRAFIVDCAPAHQQESANAMASRITGFGNIVGYIAGYVDLTRHLGFLGKTQFQILCAIACVALALTVFVSTALIKERDPRLDGPAKKQEHGVISFFLTIFKSIKRLPPQIKRVCEVQFCAWVGFFPLLFYTSSYIGEIYVEPYLEANPHMPPEQLNKLYEQATRIGTFALLINSVVSLLTNVFLPFFIAPTYDSQPVNNVPGETPAAGHYDEDEDDKPSWLDKLAIPGLTLKRAWFLSLLLFAGCMFATLFVRTVKAATVLIGLVGITWAMTLWAPWAIISAEISRRDALIRAQRTRQATARANNGGIRGDEEEEEIDQAGVILGIHNMAIAAPQIIATVGSSVIFKLWQKPRGTPGDHSISIVFALGGICVLVSSFFVAKIKDDAAMPADVMIEAEEGQSGAAEVVERRPLNRRKSTRDQLPRATQARANLTRNKSFGGAEMY

SEQ ID NO: 40527 - protein, 554 aa, Escherichia coli O157:H7 EDL933
MCSIFGVFDIKTDAVELRKKALELSRLMRHRGPDWSGIYASDKAILAHERLSIVDVNAGAQPLYNQQKTHVLAVNGEIYNHQALRAEYGDRYQFQTGSDCEVILALYQEKGPEFLDDLQGMFAFALYDSEKDAYLIGRDHLGIIPLYMGYDEHGQLYVASEMKALVPVCRTIKEFPAGSYLWSQDGEIRSYYHRDWFDFDAVKDNVTDKNELRQALEDSVKSHLMSDVPYGVLLSGGLDSSIISAITKKYAARRVEDQERSEAWWPQLHSFAVGLPGSPDLKAAQEVANHLGTVHHEIHFTVQEGLDAIRDVIYHIETYDVTTIRASTPMYLMSRKIKAMGIKMVLSGEGSDEVFGGYLYFHKAPNAKELHEETVRKLLALHMYDCARANKAMSAWGVEARVPFLDKKFLDVAMRINPQDKMCGNGKMEKHILRECFESYLPASVAWRQKEQFSDGVGYSWIDTLKEVAAQQVSDQQLETARFRFPYNTPTSKEAYLYREIFEELFPLPSAAECVPGGPSVACSSAKAIEWDEAFKKMDDPSGRAVGVHQSAYK

SEQ ID NO: 40528 - protein, 211 aa, Triticum aestivum
  misc_feature (54)..(54): Xaa can be any naturally occurring amino acid
  misc_feature (76)..(76): Xaa can be any naturally occurring amino acid
  misc_feature (91)..(91): Xaa can be any naturally occurring amino acid
  misc_feature (100)..(100): Xaa can be any naturally occurring amino acid
  misc_feature (111)..(111): Xaa can be any naturally occurring amino acid
  misc_feature (142)..(142): Xaa can be any naturally occurring amino acid
  misc_feature (162)..(162): Xaa can be any naturally occurring amino acid
  misc_feature (192)..(192): Xaa can be any naturally occurring amino acid
  unsure (1)..(211): unsure at all Xaa locations
KLYGVKLTMFHGRGGTVGRGGGPTHLAILSQPPETIHGSLRVTVQGEVIEQSFXGEEHLCFRTLQRFTAATLEHGXMHPPNFARNQEWRAXDGWRWAIVXATKEYRSIVFXEPRFVEYFPPCNAKRWEYGRMNIRSKPPKRXPSAGINPCAQPLVLAWTQSXPTAGVPGPRASNILDKGIRISDLKNSTWPXRDKTVKWVRCLNRLQKLWI

SEQ ID NO: 40529 - protein, 718 aa, Oryza sativa (japonica cultivar-group)
MAALAAALVGFLLAVSSAPAGATTDASDAAALGNLYSSWNSPSQLAGWSAGGGGDPCGAGWQGISCSGAGVTEIRLAGVGLDGSLGYELSSLFSLKTLDLSNNNLHGSIPYQLPPNLTYLNLATNNLSGNLPYSISNMVSLEYLNVSHNSLSQQIGDLFGSLNSLSELDVSFNKLTGDLPNSLGSLSNLSSLYMQNNQLTGSVNVLSGLSLTTLNIANNNFNGWIPQEFSSIPDLTLGGNSFTNGPAPPPPPFMPPPPRRPRNRPSHPRGSGDAPEGSVSPAGQGDKKQGLQTGPLVGIVAGSTVGALCALLLLVFCIRNAQKRKDDTSSNSKDFVGPLSVNIERASNREIPEQSPENTSVATMKISPAEKMTPERIYGKTGSMRKTKVPITATPYTVASLQVATNSFCQDSLLGEGSLGRVYKADFPNGKVLAVKKIDSSALSLQEEDNFLEAVSSMSRLRHPNIVPLTGYCVEHGQRLLVYEYIGNGTLHDVLHYSDELSRKLTWNIRVRVALGTARALEYLHEVCLPSVVHRNFKSSNILLDEEHNPHLSDCGLAALTPNTERQVSTEVFGSFGYSAPEFAMSGIYTVKSDVYSFGVVMLELLTGRKPLDSSRERSEQSLVRWATPQLHDIDALAKMVDPALNGMYPAKSLSRFADIIALCVQPEPEFRPPMSEVVQQLVRLMQRASIVRRQSGEELGYSYRAPEREGDMRDLSF

SEQ ID NO: 40530 - protein, 917 aa, Pseudomonas tolaasii
MLRRMGIKGRVLLLTLLPTSLMALLLGGYFTWMQLSELQTQLLQRGEMIAEQLAPLVAPALSTRNTDLLERIATQSLEQPDVRAVSFLAPDRSPLAHAGPTMLNQPPVGNSSHLLQRSGNDATRYLLPVFGRHRNLAGELIPDEADRLLGWVEVELSHNGMLLRGYRSLFASLLLIAIGLICTAALALRISRTINSPIGQIKQAVAQLKDGNLETRLPPLGSQELDQLASGINRMAETLQNAQEELQHSIDQATEDVRQNLETIEIQNIELDLTRKEALEASRIKSEFLANMSHEIRTPLNGILGFTHLLQKSELSPRQLDYLGTIEKSADNLLGIINEILDFSKIEAGKLVLDSVPFNLRDLLQDTLTILAPAAHAKQLELVSLVYRDTPLALVGDPLRLKQILTNLISNAIKFTREGTIVARAMVEDEEEDSVQLRISVQDTGIGLSNQDVRALFQAFSQADNSLSRQPGGTGLGLVISKRLIEQMGGEIGVDSTPGEGSEFWISLNLPKTRDDVDDLPSAPLLGRRVAVLENHELARQALQHQLEDCGLEVTPFNTLESLTNGITSTHQTEQAIDLAVLGVTANDIPPERLNQHLWDLEHLGCKVLVLCPTTEQMLFNQSVPNPNSQLQAKPACTRKLRRALADLISPRPLRSEPGEPLSSRAPRVLCVDDNPANLLLVQTLLEDMGAKVLAVESGYAAIDAVKQETFDLVLMDVQMPGMDGRQSTEAIRQWESERHGTPLPVVALTAHAMANEKRALLQSGMDDYLTKPISERQLAQVVLKWTGLALRNQGPERGNDNLGHGVQLLVLDHEEGLRLAANKADLAADMLAMLLASLEADRLAITVAREAKDNNALIERVHRLHGATRYCGVPQLRAACQRAETLLKQDDAKAMAALDELDMAIARLASEARVNA

SEQ ID NO: 40531 - protein, 345 aa, Kluyvera cryocrescens
MIRCIAWGSRVGATLMSQNTLKVHDLNEDAEFDENGAETFDEKVLNEEEPSDSELAEEELLSQGATQRVLDATQLYLGEIGYSPLLTAEEEVYFARRALRGDVASRRRMIESNLRLVVKIARRYGNRGLALLDLIEEGNLGLIRAVEKFDPERGFRFSTYATWWIRQTIERAIMNQTRTIRLPIHIVKELNVYLRTARELSHKLDHEPSAEEIAEQLDKPVDDVSRMLRLNERITSVDTPLGGDSEKALLDILADENENGPEDTTQDDDMKQSIVKWLFELNAKQREVLARRFGLLGYEAATLEDVGREIGLTRERVRQIQVEGLRRLREILQGQGLNIEALFRE

SEQ ID NO: 40532 - protein, 483 aa, Brucella melitensis 16M
MDMQEELMYPNLTLIVGGEERNKGSAGTLCLTDPADGRELTIAPRAGRAEALQAAAAEKGFAEWSALSALERSKIMRRAADIMRERADAAARIMSMEQGKPLSEARGEWLGSADLLDWFAEEGRRVYGRIVPSRAPNIQIQVLKHPIGPVAAFTPWNFPAWNTMQKVAPALGAGCSVVIKPASDTPGTAWLIGKCLLEAGLPPKAVSVIWGTTSELSDALIKAPEIRKVSLTGSTRVGRIVAAQAGEYLKKVTMELGGHGPVIVAADADLDHLIPLAVQWKFRNCGQVCVSPTRFIVEASIHDEFIRRFSEKARELKVGKGVEEGAQMGPLTSQNQLETVLSMVEDALTKGAKIETGGNRIGDTGNFYEPTILSGMTAEMLAMNEEPFGPLALVMRVHSLDEAIAESNRLPVGLGAYLFTSSMTTAHRVQNHLQAGMLGVNHFALALPETPFGGVRDSGFGSEGGLEGIEAYLTTMTVTTMMV

SEQ ID NO: 40533 - protein, 303 aa, Xanthomonas axonopodis pv. citri str. 306
MLVFTHPACLGHDAGPEHPESPARLEAVVQALRGAFPDLDWREAPLAKLGDLCRVHEREQVDAVLETAFDGYRQLDVDTRMVPASRAAALRAAGAGIAAVDAVMQDQTRTAFCAVRPPGHHATAQVSMGFCLFNNIAVAAAHARDRHGLERITIVDFDVHHGNGTQAIFERDPAVQYLSTHQSGLYPHSGSVYERGVGNIHNLLLPPGSDGLRFRNVWEDEMLPLVDAFRPQLILISAGFDAHLRDPLADLMLDDDDFAWLTGALRTLADRHARGRVVSMLEGGYDLQALAECSIAHVRVLLQ

SEQ ID NO: 40534 - protein, 373 aa, Oceanobacillus iheyensis HTE831
MTTSIEQRVRDVFHYLHQHPEISWEEVETTKYIKQQLEKAGCNVTTFTDCTGVIGEYGDFNKGLPVVGIRADMDALWQEVNGIFQANHSCGHDAHMAMVLGVLWSLQEIPNMKDKIAIKFIFQPAEENGSGALKMVEKGVVDNVDYLFGVHLRPDQEAKMGTATPVIVHGATRMFHGEIQGDDAHGARPHLNHNAIEVGAQIVNMIRQIHLDPRIPHSVKMTKFQSGGKNANIIPGNAAFSLDLRAQSNMVMENLERKVHNIFDAVRDLYDIKIEITDVHGIAAAEINEEAIDIMQSAITSHLGEEKLLEPLITPGGDDFHFYTIKRPELKATMLGLGCSLTPGLHHPTMTFDQHALENGVGILTKAVLDVYK

SEQ ID NO: 40535 - protein, 270 aa, Triticum aestivum
  misc_feature (80)..(80): Xaa can be any naturally occurring amino acid
  misc_feature (242)..(242): Xaa can be any naturally occurring amino acid
  misc_feature (259)..(259): Xaa can be any naturally occurring amino acid
  unsure (1)..(270): unsure at all Xaa locations
HYRTSLYKKAGWYRSGIPGISSTHASALFRRYTEQGMDEELAYKSTVEGITGIISKTISKKGMLEVYNSLSEEGKKEVQXAYSASFYPCMDILYECYEDVASGSEIRSVVLAGRRFYDKEGLPAFPMGKIDQTRMWKVGEKVRSTRPDGDLGPLHPFTAGVYVALMMAQIEVLRKKGHSYSEIINESVIESVDSLNPFMHARGVAFMVDNCSTTARLGSRKWAPRFDYILTQQAFVTVGQGXPINQDLISNFMSDPVHXALQVGAQLKPP

SEQ ID NO: 40536 - protein, 325 aa, Pseudomonas syringae pv. tomato str. DC3000
MAKRIQFSTVGGPEVLEYVDFEPEAPGPQAVVVRNKAIGLNFIDTYYRSGLYPAPFLPSGLGAEGAGVVEAVGDEVTRFKVGDRVAYGTGPLGAYSEVHVLPEANLVKLADSVSFEQAAALMLKGLTVQYLLRQTYQVKPGEIILFHAAAGGVGSLACQWAKALGAKLIGTVSSPEKAAHAKALGAWETIDYSHEDVAKRVLELTDGKKCPVVYDGVGQDTWLTSLDSVAPRGLVVSFGNASGPVSGVNLGILAQKDSVYVTRPTLGSYANNAQNLQTMADELFDMLASGKLKVDGIEQYALKDAAKAQIELSARRTTGSTILIP

SEQ ID NO: 40537 - protein, 317 aa, Pasteurella multocida subsp. multocida str. Pm70
MTTQLDSLRNMTVVVADTGDIEAIKKYQPEDATTNPSLILSASALPQYASLIDEAIAYAKSKSNCSKQQLIDAEDKLAVNIGLEILKIVPGRISTEVDARLSYDTQATIEKAKKLIALYNEAGISNDRILIKIASTWQGIRAAEELEKQGINCNLTLLFSEAQARACAEAGVYLISPFVGRILDWYKANSDKKDYAPAEDPGVISVTKIYNYYKQHGYNTIVMGASFRNVGEITELAGCDRLTIAPALLKELQENNAPLERKLSYTGEVKAKPQPLTEAEFYWQHNSDAMAVEKLADGIRKFAADQEKLEAMLLTKF

SEQ ID NO: 40538 - protein, 416 aa, Zea mays
  misc_feature (247)..(247): Xaa can be any naturally occurring amino acid
  misc_feature (348)..(348): Xaa can be any naturally occurring amino acid
  unsure (1)..(416): unsure at all Xaa locations
MAAEGEASMYYTTDDALSLVGFGRFQTLVLAYSGLGWIAEAFEIMLLSFVGPAVEADWGISGAEQGLISSAVFAGMLIGFIAGGLIADRYGRRTGFLFTAVVTAVFGLLSAFSPNYASLLTLRFVVGLGLGAGHVLSTWFIEFVPAAKRGTWMVVFHACWTVGTILEALLAWAIMPVLGWRWLLALSSAPCFVLLIFFPLTPESPRYLCSRGRTMDATVILERIARMNKGTLPPGVLIFRPEKHVDXTLGTSETALLIAEDNTGIEEDTSSKSSGIVAFQALWSYDLIRSTFLLWFIYLANYFTYYGVILLTSELSNGKRRCASVRTHLMQPNSGNLYRDVLVTSLAXYPAPSRNTGVGITSSLGRIGSIVSPLVIVGLLESCRRKEAVFVVDLVLFLAGVTCALFPRETKGCQIQ

SEQ ID NO: 40539 - protein, 162 aa, Azoarcus sp. EbN1
MSVPANVFDFETRRLNGAPMPLAEFRGKVLLLVNTASECGFTPQYEALQELHDRFAPRGFSVIGFPCNQFGGQEPGGAEEIAAFCAKNYGVSFPLSEKIDVNGDNAHPLYRHLTSVAPGILGTEAIKWNFTKFLVDRDGQVVARFAPATKPESIARDIEALL

SEQ ID NO: 40540 - protein, 588 aa, Candida glabrata CBS138
MPTGIYLTEGPVRRSQVSGNPLLRKIQRACRMSLPEPDLALNLDVADYINEKQGAAPRDAVFAIVKLINCHDTHTAVFALALLDVLVKNCGYPVHLQISRKEFLNELVKRFPERPPMRYSKVQRLILTAIEEWYQTICKTASYKDDLGYIRDMHRLLKYKGYAFPKIQDEHLAVMRPNDQLKTASEIQKEQEIAQAAKLEELIRRGRPEDLREANKLMKVMAGFKEDNIIQAKQTINHELNKLRRKADLLNEMLSQEQPDLSSETMEELYSALKVAQPKFQKIIEEEHEDDTLVQSLLKFNDTVNQLLEKYNLLKIGNKQAAAAINPENISEVPAGSNAGALANEINLIDFDDEPARDSSNDQQGASNGNNTSLDDLFGDLTLGQADTNNNNNQSLVGGGISLGAGKPSVATTGASAGLSNDSSDLLDSVLASPPPSLVQASNTPASTNISAADDLLGDFVSSPSPVANASASQKLSLFKSGDIEIELDLARESDSTLKLKVFFNNLTFQTINNLVFSIATPKSVQLRLEPQSGNLLLANSKGGITQNAWIDNAPTTLTKPLKLKWKVSYTYNSSNKEETAVYTLPKI

SEQ ID NO: 40541 - protein, 126 aa, Azoarcus sp. EbN1
MAYSEKVLDHYENPRNVGAFGKEDEGVGTGMVGAPACGDVMKLQIKVGKDGVIEDAKFKTYGCGSAIASSSLVTEWVKGKTVDQALEIKNTQIAEELALPPVKIHCSILAEDAIKAAVADYKKKQG

SEQ ID NO: 40542 - protein, 588 aa, Bdellovibrio bacteriovorus HD100
MAHSKSSFQSFARLFSYTKKHRRDFYLGSLFSFLNKAFDIAPEILIGIAIDVVANQEKSFLARWGVEEPGHQLILLSVLTLLIWMCESLFEYLLLLKWRGLAQSLQHEFRTEAYDHLQRLDMSFFEDRSTGGLVSILNDDINQLERFLNGGMNSLIQVFTSVILIGAVFFALAPSIAIFAFLPIPVILWGAFYFQKRAAPLYLDVREKAGQIGSRLANNISGMATIRSFTSEQIESKKVANDSMTYLQSNKEAIKVSSAFNPLIRMAVLMGFIATFIMGGQMALRGELNVGFYGVLVFLTQRLLWPLTGLADTVDLFERAMASADRVLDLIKTPVNLESTKAVRDFDHTKGIEFSHLDFAYSNGVQVLKDINIRVPAGKTVAIVGPTGSGKSTVTKLLLGFYKPSSGKILFGGQDTADCDPQDLRSQIGLVSQDVFLFHGSIYENIAYGSPGASRDAVLEAARKAHAMEFIEKLPEGLDTLIGERGQKLSGGQRQRISIARVILKNPPVLILDEATSAVDNETEAVIQASLAEATKGRTTIVIAHRLSTVTQADNIYVVAQGGVVESGTHQELLQNRKMYFQLWTAPL

SEQ ID NO: 40543 - protein, 446 aa, Listeria monocytogenes str. 1/2a F6854
MAKFTYDVVIIGSGASGTTVAFEAQAAGLKVAIVEERNWGGTCVLRGCDPKKVLIGAREARNLSTRLRGKGIKQAATISWTDLMAFKETFVENVPESRLASFQEAGIETFLGAASFQDSHSLQVGDDLIYAEKIVIATGATPSTLKVEGKEYIQTSDDFLSLEKLPDSVVFIGGGYISFEFASIALAAGRDVHIIHHNSEPLKKFDPDFVAALVANIKDEGIHFHFDTDITKIENDGGKLHIKGKDSFSLQTDLIIGATGRMPNIAHLSLENASIDYTKKGIVVNEKLQTSNNSHIYACGDVAATKGAPLTPVVSLEAALVAKNVIGGNEKITYPAIPSVVFTSPKLASIGISTEEAKANPEKYQIKNHDTTSWYTYKRTNEQIALAKIIEDRESGQIKGAHFLSEEADYMINYIAILMKANLTLADLQSVIFAYPSPASDLTALN

SEQ ID NO: 40544 - protein, 145 aa, Bacillus cereus G9241
MKALLWHNQRDVRVEEVPEPTVKPGAVKIKVKWCGICGTDLHEYLAGPIFIPTEEHPLTHVKAPVILGHEFSGEVVEIGEGVTSHKVGDRVVVEPIYSCGKCEACKHGHYNVCEQLVFHGLGGEGGGFSEYTVVPEDMVHHIPEK

SEQ ID NO: 40545 - protein, 497 aa, Nostoc punctiforme PCC 73102
MTEPQNLTTADGIPVSDNQNSLTAGARGPVLIQDFHLIEKLAHFNRERIPERVVHAKGAAAHGTLTITNDITRYSKAKLFSEIGKKTELILRFSTVGGEKGSADAERDPRGFSLKFYTEEGNWDLVGNNTPIFFIRDPLKFPDFIHTQKRNPQTNCKDQNAKWDFWSLSPESLHQVTILFSDRGIPKTHRHMDGFGSHTFSLINAEGDRVWCKFHFKTLQGHQTLTEEESAKIKGEDPDHATHDLFEAIAKKDYPKWRMCIQVMTEEQAEKHPDNPFDLTKVWKQGEYPLIEVGILELNRNPENYFAEVEQAAFSPSAVVPGVSFSPDKMLQARIFSYPDAQRYRLGGNYQQLPVNQPKCPVMHYQRDGFMASGNNGGSVPNYEPNSAEGTPKENPAYAEPPSHLGDVTVDRYSHREGNDDYTQAGNLYRLLTPEQQERLAKNIVGSLSQAREDIQMRQLCHFFRADVSYGRRVAEGLGIAIDPSMFSHDAQPVGNW

SEQ ID NO: 40546 - protein, 291 aa, Vitis labrusca x Vitis vinifera
MAPLLCLLILMITTCSDAQGPPSPGFSPSSKFSPISFNQGFRNLWGSQHQTIDQGLLTIWLDSTSGSGFKSLKPYRSGYFSAAIKLQPGYTAGVITSFYLSNNEDYPGNHDEIDIEFLGTTLDKPYTLQTNVYMKGSGDGRLIGREVKIHLWFDPTEDFHNYAILWTPDEIIFLVDDVPVRRYPRKNDATFPARPMWVYGSIWDASSWATEDGKYKADYRYQPFVGRYKNFKLGGCTTDAAASCRPPSISPSSAEGLSQQQYSAMESVQKNYVVYDYCQDPKRDHSQIPEC

SEQ ID NO: 40547 - protein, 249 aa, Zea mays
MKIQCDACEGAAATVVCCADEAALCARCDVEIHAANKLASKHQRLPLEALSAKLPRCDVCQMRYTHDVRRKQANLASRSQEKAAFIFCVEDRALFCQDCDEPIHVPGTLSGNHQRYLATGIRVGLASASACSDACDAHDSDHHAPPKATIEPPHAAVSAAVQQLHKEPTLGFKELEWFADIDLFHEQAPKASRTLAEVPELFGYQAANDAAYYRPAKAAAGGGAGVRQSKKARIEVTDDEDYLIVPDLG

SEQ ID NO: 40548 - protein, 413 aa, Chromobacterium violaceum ATCC 12472
MSKRRVVVTGLGHVSPVGNDVATGWANLLAGKSGIAKITRFDASDMACQIAGEVKDFNIGDYISPKEARRNDLFIHYGIAAALQAVADAGLDDIPGLDKTRVGVNIGSGIGGLPLIEETGVALMEGGPRKIGPFFIPGSLINLIAGQVSILKGYQGPSYGIVSACTTGAHCIGDAARLIQYGDADIMVAGGAEGAVSRLGIGGFAAMKALSTRNDDPEAASRPWDKGRDGFVMGEGAGVLVLEEYEHAVKRGAKIYAELIGFGMSSDAHHITAPNAEGPARGVVNALRDAGINADAVQYVNAHGTSTPLGDANETNALKIAFGDHAKKLVVNSTKSMTGHLLGGAGGVEAIYTILAIHNQVSPPTINLVEQDLEAGCDLDYAANTAREMKIEVGISNSFGFGGTNGTLVFKRV

SEQ ID NO: 40549 - protein, 645 aa, Arabidopsis thaliana
MLKTLLVQWLVFFFFFLIGSVVTAAEDDGSLSLCNCDDEDSLFSYETILNSQKVGDFLIAIAYFSIPIELVYFVSRTNVPSPYNWVVCEFIAFIVLCGMTHLLAGFTYGPHWPWVMTAVTVFKMLTGIVSFLTALSLVTLLPLLLKAKVREFMLSKKTRELDREVGIIMKQTETSLHVRMLTTKIRTSLDRHTILYTTLVELSKTLGLKNCAVWIPNEIKTEMNLTHELRPRIDDENENEHFGGYAGFSIPISESDVVRIKRSEEVNMLSPGSVLASVTSRGKSGPTVGIRVPMLRVCNFKGGTPEAIHMCYAILVCVLPLRQPQAWTYQELEIVKVVADQVAVAISHAVILEESQLMREKLAEQNRALQVARENALRANQAKAAFEQMMSDAMRCPVRSILGLLPLILQDGKLPENQTVIVDAMRRTSELLVQLVNNAGDINNGTIRAAETHYFSLHSVVKESACVARCLCMANGFGFSAEVYRALPDYVVGDDRKVFQAILHMLGVLMNRKIKGNVTFWVFPESGNSDVSERKDIQEAVWRHCYSKEYMEVRFGFEVTAEGEESSSSSSGSNLEEEEENPSLNACQNIVKYMQGNIRVVEDGLGLVKSVSVVFRFQLRRSMMSRGGGYSGETFRTSTPPSTSH

SEQ ID NO: 40550 - protein, 614 aa, Cryptococcus neoformans var. neoformans JEC21
MTTLSQSNLPLDPEAHQDAKKARDLEEAGAAPQDELYYEDTSSEEVLTGVSKVEAAAAVWGPKSQWFLFIGIALSAYIYSLDGVTTYQYLSYATSYVLDHSVSGTISTANAIIIAVGKPLMAKLADVVGRGETFIIVTILYVVGYIVIATANDVGQIAGGQVIYSFGYTGLQMLQQIIIADMTNLRWRGLVTGLVSAPFIINNFVSAEIAEGVLPNWRWGYGMFAILVPVSLSPIIIALMWAQHKAAKQLKIRYSRPPIKVGFWITIREACLEMDFMGLILIAASLALILLPLGLAPSASNGWKTPSMIVMLIIGGLLFPVFLYYESRFPRKPVLPMRWLKRGPILGACLIGFFDFVSFYLQYTYLYSYVYVTEDWSYRNLTYFSSTQSLALTIFGIMAGFIMYATRRFKWMLFIGLLIRLLGVGLMLKARSATGNTAELVMCQILQGMGGGAAATAIQVSAQAAVAHVDVATVTAVVLLITEVGNSVGSAVASGIWASYMPKELAKNVPTTNATLLAELYGSITDIALYPSDDPIRLGAIAAYQNVMFRLVLGAVIVAIFPPIWCLLFTKDVKLTRAQNAVDAKDLSGRPTDEPTLDERTPSEAGMSDPRRKD

SEQ ID NO: 40551 - protein, 398 aa, Triticum aestivum
  misc_feature (188)..(188): Xaa can be any naturally occurring amino acid
  unsure (1)..(398): unsure at all Xaa locations
MAEICCQEAKSPPATAATVATVSASAAAAAVASSVMDRRRRRLELKRFRLASDLEQSAAEYAGARKRPRIPRTVSGPCPDAASASENMDRCPRYGFSSVCGRRREMEDAVSIRPGFLPGSGKSHFFGVFDGHGCSHVATTCQELMHEAVAEEHEKAGSGEGPVWKEVMERSFARLDERAANWATTRSXRGAPPCRCEQKMPSRCDHVGSTAVVAVVSPIQIVVANACDSRAVLSRAGVPVALSVDHKPDRPDELERIQAAGGRVIYWDGARVLGVLAMSRAIGDGYLKPFVTAEPEVTVTERSDADECLILASDGLWDVVTNEMACDVARACFRSNGRPEPATAQAQASGEAKASEGVSKAESDRACSDAAMLLAKLALARGSSDNVSVVVVDLRRGS

SEQ ID NO: 40552 - protein, 135 aa, Zea mays
  misc_feature (17)..(17): Xaa can be any naturally occurring amino acid
  unsure (1)..(135): unsure at all Xaa locations
PDLAFYDRSAPIYTQPXGEGCVIKHCTINHSVVGLRSCIFEGAVIEDSLLMGVDFYETENDKNVLSETGGIPLGIGKNSHIRKPIIDKNAPIGENVKIINFDNVQEPVRETEGFFIKSGIVPVIKNALIPSGTII

SEQ ID NO: 40553 - protein, 453 aa, Prochlorococcus marinus str. NATL2A
MKSSFDLIVIGAGSGGLAAAKKAASYGASVAIVEGDLVGGTCVIRGCVPKKLLVCGSSLLESFLSATSYGFDFDNIKIKSEVLLANIRKEVQRLNELHENFLNKANVELFKGWGEFRNSNCVEVKDRKNGETLNELYGERILIAVGGRPKRPSIEGASLGWTSDDMFLLKSFPKKITIVGAGYIACEFACILHGLGVEVTQLVRGDRILRGFDFELSSALTEAMKNKGVNISFGEQISSLKGTPGSLIIKTNAGKEFDSNGLLFATGREPFLDGLKLEQVGIEILENKIKVDSEGKTNISNIFAIGDVTDRINLTPVAIDEGRKFADRNYGESDHKVNYNFVPYAVFSQPEIASVGMTEEKAIQSMGKDNIKVYRSIFRPLSKSLPKTGSKCILKLIVDKNNNKVLGCHMIGDNASEIIQMASISLMLGAKKSDFDNTMALHPTIAEEFVTMR

SEQ ID NO: 40554 - protein, 347 aa, Pseudomonas syringae pv. tomato str. DC3000
MATYPPFELMTMKAPLKVACVQAAPMFLNLDATVDKTIALIEQAAAAGAGLIAFPETWIPGYPWFLWLDAPAWNMPLVHRYHQQSLVLDSAQARRISDAARQHGIYVVLGYSERSKASLYIGQWIIDDQGETVGTRRKLKATHVERTLFGEGDGASLRPFETPVGVLGALCCWEHLQPLSKYAMYAQNEQIHVAAWPSFSLYQNATRALGPEVNTAASRVYAAEGQCFVIAPCAVVSPEMIEMLCDSDAKHSLLQAGGGHARIFGPDGSDLATPLGEHEEGLLYATLDPAALIFAKVAADPAGHYSRPDVTRLMFNPNPNPCVVELPGLPIGSNAGEPIQPVIAMEV

SEQ ID NO: 40555 - protein, 445 aa, Zea mays
MATRNHRAAAAPQPANRGAARVAGKQKAAAAGTRRALGDIGNVVSDALDRAIKLPEGIHRPITRSFGAQLMKAALANKNADAAVAPAQPVAARAVTKPARKVTTKNVPRPGAGQAPKENKKPSAEGAAAASGRSVQKNRRKKPACTLSTVLSARSKAACPVTEKPKEPIEDIDKFDGDNQLALVDYVEDIYTFYRPPMHESRPIDYMGQTSPELSPRMRSILADWLIESHRRFQLMPETLYLTIYIVDRYLSLQPTPRRELQLVGVAALLIACKYEEIWAPEVNDLIHIADGAFNRSQILAAEKAILNSMEWNLTVPTPYHFLLRFAKAAGSADEQLQHTINFFGELALMDYGMVMTNPSTAAACAVYAARLTLGRSPLWTETLKHHTGPQRAADTGRAKTLVGSHAASASPDARLKAVYQKYATEQFGRVALHPPAPAALPDLV

SEQ ID NO: 40556 - protein, 271 aa, Prochlorococcus marinus str. NATL2A
MKSTNISRSFSKIKKEKRIALMPFLMAGDPDLETTAKILLELQANGADMIELGIPYSDPLADGPIIQLAASRALSAGTSPDRVFKMLFELRDQLTIPIILFTYSNPLINKGLEEFCLQASKVGVSGLVVPDLPLEEAEKLSDIAESKEIDLVLLVAPTTPKDRMKRIAATSNGFTYLVSVTGVTGERSSLEDNVGSLVQQLKDSSSSPIAVGFGISDVKHIEQVREWGADGAIVGSALVKRIANASIEMKVEEAGSFCKELRAATNEYFFK

SEQ ID NO: 40557 - protein, 426 aa, Arabidopsis thaliana
MESRVLLRATANVVGIPKLRRPIGAIHRQFSTASSSSFSVKPIGGIGEGANLISGRQLRPILLLDSSAINGGEKREILKPVKAAAAEGGDTAGDAKVGFLAKYPWLVTGFFFFMWYFLNVIFNILNKKIYNYFPYPYFVSVIHLFVGVVYCLISWSVGLPKRAPIDSNLLKVLIPVAVCHALGHVTSNVSFAAVAVSFTHTIKALEPFFNAAASQFIMGQSIPITLWLSLAPVVLGVAMASLTELSFNWLGFISAMISNISFTYRSIFSKKAMTDMDSTNVYAYISIIALFVCIPPAIIVEGPKLLNHGFADAIAKVGMTKFISDLFWVGMFYHLYNQLATNTLERVAPLTHAVGNVLKRVFVIGFSIVIFGNKISTQTGIGTGIAIAGVAMYSIIKAKIEEEKRVSSLFALAQFSLHSLRNFAYY

SEQ ID NO: 40558 - protein, 420 aa, Zea mays
PMNRRAPLGDIGNLVSVRPAEGSLSCRSRSIAPITRSFGAQLVKNVQANAAIKNAAILPARHAPRQERKAPAKQPPPEDVIVLSSDSEQSRTQLESSASSVRSRKKVINTLSSVLSARSKAACGITDKRRQVVVIEDIDKLDVNNELAVVEYIEDIYTFYKIAQHDRRPCDYIDTQVEINPKMRAILADWIIEVHHKFALMPETLYLTMYIIDQYLSLQPVLRRELQLVGVSAMLIACKIEEIWAPEVNDFILISDSAYSREQILSMEKGILNNLEWNLTVPTVYMFLVRFLKAATLGNIVEKEMENMVFFFAELALMQYGLVTRLPSLVAASVVYAARLTLKRAPLWTDTLKHHTGFRESEAELIECTRCWSAHTRRPHADSKLRAVYKKYSSEQFRTRARVRPPAAAVEINETKITCC

SEQ ID NO: 40559 - protein, 250 aa, Erwinia carotovora subsp. atroseptica SCRI1043
MAVTKLVLVRHGESQWNNENRFTGWYDVDLSEKGRSEAKAAGQLLKDEGFAFDFAYTSVLKRAIHTLWSVLDELDQAWLPVEKSWKLNERHYGALQGLNKAETAEKYGDEQVKQWRRGFAITPPELTRDDERFPGHDPRYASLSDKELPQTESLALTIERVVPYWTETILPRIKSGERVIVAAHGNSLRALVKYLDNMGEDEILELNIPTGVPLVYEFDENFKPIKRYYLGNADEIAAKAAAVANQGKAK

SEQ ID NO: 40560 - protein, 1021 aa, Oryza sativa
MSLVYRLPLIHECGLVMFCRTLKIDVLGQVRIGVLQMTRVIHDSGEGMQKEALAMVSSDVNFPKGHFPDYKIGPNNQIIDPEEIHEAVPLKEIVAKETAQLLEQRRRLSVRDLKEKFEKGLSGASKLSEEAKRREAASLDRQVLLKKLRDVLDTLKGRVAGRNRDDADEAISLVEALAVQLTQREGELIYEKAEVKKLASFLKQATEDARKVAEEERALALAEIEKARTAIAIVEKGLQEHDAASSSREKEEIEGLRKEVREARRIKMLHQPSKVMDMEFELKALRTLIAEKNQLCNQLMKELAMIKRLEEDSSDLYDLEGSDILGSQFCIIPRFDDAPDISSCPTQWYRVISGGNRNLILGATKPTYAPEPFDVGRLLQAEIVLNAEKVTIQTMGPINPAAGLEHYVESLMKRADVEFNVVVTQMNGNDYSSNSVHAFHIGKMRIKLRKGWSTKARESYSTTMKLCGSRGGGNAAATAVFWQARKGLSYTLAFETDRDRNAAIMLARKFASNCNITLTGPGDEVHAELAGAAVAAALDGGEEGSRAARLHSFFASVISGIFGQGEEEEEGEMATRSQNVAAAPQPPQNRGNVAALGKQKAVVAGRPDAKNRRALGEIGNVMNVRLPEGKPLQQAPAGRTANFGAQLLKNAQASAVANKQNAVAPAAVARPAQRQARKAPVKPAPPPPEHVIEISSDSDQSMRQQSEGSASSVRKCSRKKVINTLTSVLTARSKVACGITDKPREVIEDIDKLDGDNELAVVDYIEDIYKFYKVAENECRPCDYIDTQVEINSKMRAILADWIIEVHHKFELMPETLYLSMYVIDRYLSMQQVQRRELQLVGVSAMLIACKYEEIWAPEVNDFILISDSAYTREQILAMEKGILNKLQWNLTVPTAYVFIMRYLKAGASADNKSDKEMEHMAFFFAELALMQYGLVASLPSKVAASAVYAARLTLKKSPLWTDTLKHHTGFTESQLLDSAKLLVTSHSTAPESKLRVVYKKYSSEQLGGVALRSPAVELCK

SEQ ID NO: 40561 - protein, 491 aa, Bifidobacterium longum DJO10A
MSTTDAPKKPRETDDVPVPATLRKSLKNRHIQLIALGGAIGTGLFYGSSESIALAGPSILLAYLVGGFAIFMIVRALSEMSVEDPKAGAFSYYATRYWSKRAGFISGWNYWFNYILVSMVELSVVGSFVNYWFPAIPTWVSAAVFLVIICAANLLGVSKFGEFEFWFAIIKIVAVIAMIIGGLAVIIFVLPTASGVRASFANWFTVGNGFFPNGLMGQNSDGSWTGLLMALVVVMFSFGGTELIGITAGETEDPKTTIPRATNDIIWRILVFYIGALGVIMAVVPWNTIDGKSSPFVQIFDSVGIHAAAGILNFVCLTAVMSVYNSGLYANSRMLYSLAKQGNAPAYLGKLNSRGVPVAGVLTSAAITAIAVVVVFVWPEFAFNYLMSIATIAGIINWTMIMLTEMKFRKVVAAGGAPEDSELAGLSGQEALDAIHFKLPFAKVTPWVVLAFLALVVVLMCFSTSYRIAVIAGVIWLAILFAAYQLTQAKK

SEQ ID NO: 40562 - protein, 581 aa, Candida albicans SC5314
MTIQDQNTIRPNVIQDVSTEAPGIVAGELAAEDEGLLSNDALKTHTYGSVSTPETTHYEIDDPNGGYALPKTQLYTVVSSLFMASFLAALDGTVVTTLLTLIASELHAVSNISWIATAYLLSSAAFQPIFGKLSDIFGRKALLLGCSTLFAVGCAICGAADSVLVLVIGRFVTGCGGSGLTSLGTITMSDIIPLRDRGYYQGLANIFFGLGAASGGAIGGLLADWLGWKYVFILQVPLALSVFFAIYFFLNLPEGSPGLGMEGNVSEKLKRVDFLGSFFLVSSLMVFLSAASLGGREIAYSSFTFIGLIISAFVLLTAFVAVELYVSEEPILPIELFANRTVLASSLTNWFYTMSIFTTLFYVPIYYSSVIGLTPTENGLRLVPNFFGVSFGSVGAGIYMKKTGRYYKLAVLAGIFAIFGIGKIALLTPNIPTWQQFLLLIPSGLGYSCILTVTLLALIAAAPLKYQACTTSIQYTFRSTGSTLGVSAATAVFQNVLLLQLTKKINELVSDPREAAKIIAKALDSTEYVNEAPKYVREAIRASYDAGCKGAFGFAFATIVLGVISSLFMREHVLHTSINRD

SEQ ID NO: 40563 - protein, 599 aa, Vibrio sp. Ex25
MQIITTDIAVIGAGGAGLRTAIAAAEANPDLEVALISKVYPMRSHTVAAEGGSAAVIKDEDSLDNHFNDTVGGGDWLCEQDVVEYFVENATREMIQMEQWGCPWSRKENGEVNVRRFGGMKVERTWFAADKTGFHMLHTLFQTSMKYSNIKRFDEYFVVDLLVDEGEVQGLIAIHMSEGELVTIKAKSVVLATGGAGRVYHCNTNGGIVTGDGMAMAYRHGVPLRDMEFVQYHPTGLPGTGILMTEGCRGEGGIIINKNGYRYLQDYGMGPETPVGQPKNKYMELGPRDKVSQAFWHEQQKGNTIKHPLGDVVHLDLRHLGEEYLQERLPFICELAKAYVNVDPAKEPIPIRPTVHYTMGGIETNGGCETRIKGLFAVGECASVGLHGANRLGSNSLAEFVVFGRVAGENAVKRAEEFKGWNESAIDAQVKAVEERIAKLMNQEGDENWANIRTEMGHTMEAGCGIYRQEDLMQETINKITELKERYKRISIKDKGKVFNTDLLYAIEVGYGLEVAEAMVHSAILRKESRGAHQRLDDGCTERDDVNFLKHSLAFYKPDSAPSIDYSNVTITKSQPKARLYGEAAEKAAAEEKNAEEQA

SEQ ID NO: 40564 - protein, 659 aa, Neurospora crassa
MAGFDQDIELSAYSHSHGLGISGNGRSGRQRSIAEASSFTLGGASPSPRTKSFADVSPGGSHGRSKSIAAASDGAGGGFHGTMSRFVDSFRRGDGTINKNLDLDDDNNTSSHGYSSHSISRGHGGTRYYDLRPGTGKINTPSSLLARELKGRHLQMIAIGGSIGTGLFVASGKTLSDGGPASVLIAYLIIGVMLFCTIQALGELAVIFPVAGSFSAFSTRFLDPSWGFAMGWNYALQWIGVLPLEVLAGAMTIGYWNKEINKAIFVTIFLVIIFVINLFGAKGYGEAEFIFAIIKVTAVVGFILLGIVINIGGTPTEGYIGGKYWEDPGAFHNGFKGLCSVFVTAAFAFAGTELVGLAAAETANPRKSLPTAIKQVFWRISLFYIVSMTLVGLLVPYNEPRLLNAQNIADASASPFVIAIESAGATVLPSVMNGVILISVISVGNSAVYGSSRTLAALAELGQAPAILAYVDRRGRPIVAILVTMAVGLLAYLGDVPSQKNIFDWLLAISGLSSILTWASTCLAHIRLRKAWAYNHRSVQDIAFKAQGGVIGSWIGFVLNVLVLVTQIWVSIDPLHQGDTPLTTKERVRSFFVSCLAIPVVLICTIVHKWYYKTKWVRIEDMDVDTGRRDFGRLGIIKAQEKEERMGWPRWKRVYRFMC

SEQ ID NO: 40565 - protein, 326 aa, Oryza sativa
  misc_feature (244)..(244): Xaa can be any naturally occurring amino acid
  unsure (1)..(326): unsure at all Xaa locations
MHFPACVQCLQQNTMARCFVLNTGAKIPSVGLGTWQAEPGVVGNAVYAAVKAGYRHIDCAQAYFNEKEIGVALKKVFDEGIVKREDIFITSKLWCTNHAPEDVPVALDSTLQDLQTDYVDLYLIHWPVRMKKGAGFGGQNVLPTDIPATWAAMEKLHDSGKARAIGVSNFSSKKLEDLLAVARVPPAVDQVECHPVWQQTKLRKFCTSKGIHLSAYSPLGSPGTASVKAVGNVLAHPVVVSTAXKLGKTPAQVALRWGIQMGHSVLPKSTHEERIKENIDVYDWSIPEDLFIKLSEIEQMKLIRGEFWTHPEGVYKSIEELWDGEI

SEQ ID NO: 40566 - protein, 170 aa, Oryza sativa (japonica cultivar-group)
MQHDAISNIAYHPSMDFTSFFLPQTDAYSHDLSALLDMAVVDPYISCNGSSITMIPVTEDEANAQPMNHGNDERKKRRLVSNRESARRSRVRKQRRLDELSSQVSELRDTNQRLLVELNHMISKHARIVRENSQLREEASDLQRKLSEMKMEDAEVAAAAAAAPRTLEVA

SEQ ID NO: 40567 - protein, 314 aa, Oryza sativa
  misc_feature (55)..(55): Xaa can be any naturally occurring amino acid
  unsure (1)..(314): unsure at all Xaa locations
MAMEKSRVLIVGGTGYIGRRIVAASLAAGHPTFVLLRPEIGLDIDKLQILLAFKXSGARLLEASLDDHDGLVAAIRQVDVVVSAMSGAHIRSHNLMLQIKLVEAIKQAGNIKRFLPSEFGMDPSRLGNALEPGRVTFDEKMEIRRAIENANIPHTYVSANCFAAYFSPKLCQLKTLLPPKERVGVYGDGNVKVFFVDEDDVGTYTIKSIDDPRTLNKTIYIRPQDNCLTQNELIAMWEKLSGKSLTKFHIHGDEFLASMKDTDFAHQVGVTHFYHIFYEGCLTNFDIGDNGAEATLLYPDVQYTRINEVIKRYL

SEQ ID NO: 40568 - protein, 216 aa, Xanthomonas campestris pv. vesicatoria str. 85-10
MLGIGAFKQRMPRPGEALPGREQALPLHNTHLVNGHPLRGEFIGLAQVQFGLGCFWGAERKFWNVPGVYTTAVGYAGGQTPNATYSEVCSGQTGHTEAVLVVFDEQAVSFAQLLRTFWESHDPTQGMQQGNDVGTQYRSAIYCTTQAQYDAALASRDAYQQQLTAAGYGAITTEIRFPAPTFYYAEDDHQQYLAKHPNGYCGLGGTGVSCPIGLDA

SEQ ID NO: 40569 - protein, 322 aa, Xanthomonas campestris pv. vesicatoria str. 85-10
MTASPSKLAQLRELSVVVADTGDYDAIKRLKPVDCTTNPTLVKKALDLPVYADLIERELAWGREHGGDDRTATVNEVADRLTIGVGVKLAELVPGRVSTEVDADLAHDTQATIAKARKFVAMYAERGVSKDKILIKIAATWEGIEAARQLQKEGIDCNLTLIFNRSQALACAEAGVFLISPFVGRILDYYVAQGQTPASIDEDPGVVFVRTVYNEFKQRGSSTVVMGASFRSTAQIEALAGCDRLTISPDLLEKLDAEHGELPRKLSPAKADNAQFTPIDSDSFASGLAADPMATEKLAGGIDTFAKDLHALRKTIADKLAG

SEQ ID NO: 40570 - protein, 1167 aa, GIBBERELLA ZEAE PH-1
MNDDDAIHNIHKKIEREKALINAANSMRAQTNNEAVRSRLDSQMRDGRRNLQFFEEKLRDIQLRRVNQGVGDMSLGGPADDAGGPPAPPPKDASSNPAGDRGSYGSGSGQYSQAGGGSDLMPPRHPYAPGPGGSGIPKARPNFTKLDLIKYDTPHLGPRIQLMLSQIQFKLNVEEQYLKGIEKMVQLYSMEGDRKSKADAAARKVESKQKILLLKQALKRYEELHIDADVADAQDGKLALNDVECEADKELDDSINAPNLRKPLSGQLSIRMIAIKDVDHAATGRFTRGPETFIAVKVEDTVMARTKASRNDRWEAEFHTIEVDKANEIELTVYDKPGEHPMPIGMLWVRISDIVEEIRRKRIEAEMNSSGWVSADRMGSTSAAPTQFPMSPSSGSFGPGAQSTGGDQGDDTGPFGAAGPQPQVQTGPIEEWFNLEPTGQIQLQLTFNKSNNNSRPADLGLGRKGAVRQRKEEVHEMYGHKFVQHQFYNIMRCALCGDFLKYSAGMQCEDCKYTCHTKCYSSVVTKCISKSNAETDPDEEKINHRIPHRFNPYSNMTANWCCHCGYILPFGKKNCRKCSECGLTAHAQCVHLVPDFCGMSMAVANQILDGIRTQKQRQAKVSSLSEKTLRHGKTSPTSTSSPAPSYSSTTAPSYQSGPVSPEATEAAKMMYSNPSTPRPAGPDRTSSSSQAAAAASAAMSGGPGAAQRQNSDFGRYSGGYDQPQEDPYAQGGQYGAGQQRKYNPADYANVNPGYGGPQPAAQAQRPVQQQPAQQPPPQSPLPPVPQHQQQQPQAAYQQPAVPAHSPQQPEPMSPKQQSAAGGKSAPLATDPGTGQRIGLDHFNFLAVLGKGNFGKVMLAETKRSRKLYAIKVLKKEFIIENDEVESIRSEKRVFLVANRGRHPFLTNLHACFQTETRVYFVMEYVSGGDLMLHIQRGQFGTKRAQFYAAEVCLALKYFHENGVIYRDLKLDNILLSLDGHVKIGDYGLCKEDMWYGSTTGTFCGTPEFMAPEILLDKKYGRAVDWWAFGVLIYQMLLQQSPFRGEDEDEIYDAILADEPLYPIHMPRDSVSILQKLLTREPDQRLGSGPTDAQEVMSQPFFRNINWDEMYHKRVPPPFMPQIKSATDTSNFDSEFTSVTPVLTPVQSVLSQAMQEEFRGFSYTADFD

SEQ ID NO: 40571 - protein, 465 aa, Synechococcus elongatus PCC 7942
MRILFVAAECAPFAKVGGMGDVVGSLPKVLKALGHDVRIFMPYYGFLNSKLDIPAEPIWWGYAMFNHFAVYETQLPGSDVPLYLMGHPAFDPHRIYSGEDEDWRFTFFANGAAEFSWNYWKPQVIHCHDWHTGMIPVWMHQSPDISTVFTIHNLAYQGPWRWKLEKITWCPWYMQGDSTMAAALLYADRVNTVSPTYAQQIQTPTYGEKLEGLLSFISGKLSGILNGIDVDSYNPATDTRIVANYDRDTLDKRLNNKLALQKEMGLEVNPDRFLIGFVARLVEQKGIDLLLQILDRFLSYSDAQFVVLGTGERYYETQLWELATRYPGRMSTYLMYDEGLSRRIYAGSDAFLVPSRFEPCGITQMLALRYGSVPIVRRTGGLVDTVFHHDPRHAEGNGYCFDRYEPLDLYTCLVRAWESYQYQPQWQKLQQRGMAVDLSWKQSAIAYEQLYAEAIGLPIDVLQEA

SEQ ID NO: 40572 - protein, 165 aa, Zea mays
MNVDKLKKMAGAVRTGGKGSVRRKKKAVHKTTTTDDKRLQSTLKRIGVNSIPGIEEVNIFKDDVVIQFVNPKVQASIGANTWVVSGTPQTKKLQDLLPSIINQLGPDNLDNLRRLAEQFQKQASGASGAEAGASAGAVQDDDDDVPELVPGETFEEAAEEKKESS

SEQ ID NO: 40573 - protein, 73 aa, Glycine max
  misc_feature (34)..(34): Xaa can be any naturally occurring amino acid
  unsure (1)..(73): unsure at all Xaa locations
ICPVQAITIEAEEREDGRRRTTSDDIDMTKCMYXGSWQDACPVEAIAEGPNIELATETHDELLYDKEKLLEQA

SEQ ID NO: 40574 - protein, 334 aa, Anabaena variabilis
MLAKLKVGINGFGRIGRLVLRAGINNPNIEFVGINDLVPPDNLAYLLKYDSTHGKLRSQVEAKDDGIVIDGHFIPCVSVRNPAELPWGKLGADYVVESTGLFTDSEGASKHLQAGAKRVIISAPTKDPDRVRTLLVGVNHDLFDPSKDVIVSNASCTTNCLAPIAKVINDNFGLTEGLMTTVHAMTATQPTVDGPSKKDWRGGRGAAQNIIPSSTGAAKAVALVLPELKGKLTGMAFRVPIPDVSVVDLTFKTAKATSYKEICAAMKQASEGSLAGILGYTDEEVVSTDFQGDTHSSIFDAGAGIELNSNFFKVVAWYDNEWGYSNRVVDLMLS

SEQ ID NO: 40575 - protein, 204 aa, Zea mays
MAKIGLKPDPVNNNAKEIRYRGVRKRPWGRYAAEIRDPGKKTRVWLGTFDTAEEAARAYDAAARDFRGAKAKTNFPNFLELSEKMPAAGGGFERSPSQSSTLDCDSPPAAVTPASAGIVPPQLELRLGGYQIPMARPIYFLDVMGVGNGGRAQPPVASAFRSPVACVAQSDSDSSSVVDFEGVMEKRSQLFDLDLNLSPPSEQA

SEQ ID NO: 40576 - protein, 507 aa, Brucella melitensis 16M
MKLQEDYSMTDRPIMTTSAGAPIPDNQNSLTAGERGPILMQDYQLIEKLSHQNRERIPERAVHAKGWGAYGTLTITGDISRYTKAKVLQPGAQTPMLARFSTVAGELGAADAERDVRGFALKFYTQEGNWDLVGNNTPVFFVRDPLKFPDFIHTQKRHPRTHLRSATAMWDFWSLSPESLHQVTILMSDRGLPTDVRHINGYGSHTYSFWNDAGERYWVKFHFKTMQGHKHWTNAEAEQVIGRTRESTQEDLFSAIENGEFPKWKVQVQIMPELDADKTPYNPFDLTKVWPHADYPPIDIGVMELNRNPENYFTEVENAAFSPSNIVPGIGFSPDKMLQARIFSYADAHRHRLGTHYESIPVNQPKCPVHHYHRDGQMNVYGGIKTGNPDAYYEPNSFNGPVEQPSAKEPPLCISGNADRYNHRIGNDDYSQPRALFNLFDAAQKQRLFSNIAAAMKGVPGFIVERQLGHFKLIHPEYEAGVRKALKDAHGYDANTIALNEKITAAE

SEQ ID NO: 40577 - protein, 429 aa, Vibrio vulnificus YJ016
MDFIMDLAFDRQHIWHPYTSTLTPLTCYPVNSASGVYIKLEDGTTLIDGMSSWWSTIHGYNHPHLNQAAHRQIDQVSHVMFGGITHQPAINLCKKLLSLAPNNLEHVFLADSGSVAVEVSLKMALQYWHAKGDRRPKFLTLQHGYHGDTFAAMSVTDPDNSMHSLYKGFLPEHIFAKSPTGGFWDEWKPEDLTDFAQKIEQHHQELAAVILEPIVQGAGGMRIYHPEFLKGVRALCDQYGLLLIADEIATGFGRTGKLFACEHANIQPDILCVGKALTGGYMTLSATLTSKHVADTVCGGEAGCFMHGPTFMGNPLACAVATASLELIEQGQWQQQTKQIESLFSELLPKLDKYDLVKNTRWLGAIGVVETHRPVNMETIQALFVEQGVWIRPFGKLIYMMPPFIGEPAHIEQLVNAIETALQRAECFV

SEQ ID NO: 40578 - protein, 385 aa, Vibrio vulnificus YJ016
MTQAFNERIVQALKQRREQGLNRQSEVIFSGNQTVLEHQGKRYLNFSANDYLGLANDQSLVRAWQQGLSLYGCGSGASPLVTGYTPAHSNLAASLCDWLGYESATLFGSGFSANQALLFALLEKGDLLVQDKLNHASLIEAGLLSPASMKRFKHNDLQALDAILNRSDCPSLVVTEGVFSMDGDCSPLAEMHALTQRYSASLMVDDAHGVGVLGEEGRGSCALASVKPDFLVVTFGKAFGLSGAALLTDKSSGDFLAQFARHHVYSTALPPAQAFALTHAVEMIRTQQWRRDKLNELQTLFAEYLGEHDSFVATQTPIKPWLIGETQQAVMVAQRCREQGIWLTAIRPPTVPQNTARLRITLSANHTKEQMHTLAQVLLTVTGEH

SEQ ID NO: 40579 - protein, 241 aa, Brassica napus
MKIQCDVCEKAPATLICCSDEAALCASCDVEVHAANKLASKHQRLFLDSLSTKFPPCDICLEKAAFIFCVEDRALLCRDCDEATHAPNTRSANHQRFLATGIRVALSSTSCSQEVEMNHFDPPNQQILSKPTIQQSAAPSPPWAGDEFFRYSDLECSNKKEPLDLGELDWLAEMGFFGDQPDQEALPAAEVPELSVSHLPHVHSYNRPMKSNVSNKKPRLEIRYDDDDDDDEQHFLVPDIG

SEQ ID NO: 40580 - protein, 289 aa, Oryza sativa
MSGADVDKVQNLIHCCLQLYMDKKEVVDALSREAKIEPSVTQHVWQKLEENNREFFKAYYLRLMLKNQITAFNKLLEDQLRIINKEYHPGPSSMPLPNGSNSNLLKQNPCFLSESTPMPAMPDDVMCNGNSSGIVDRTQSSDQLIYAGKDIQGLHSSMDASNLLPVQNANSVLFGVENGTTIKTESGYSSNGNFGFCGNAFLESCQSIGDASGGSFSSSELNGQPLDDSILDIESSSFGFLSQLPRNFFSDLPEDFSQSTEILDNYGKSPFLPSEQNNFSDSTGGEHTG

SEQ ID NO: 40581 - protein, 159 aa, Lycopersicon esculentum
MVRGKTQMRRIENATSRQVTFSKRRNGLLKKAFELSVLCDAEVGLIIFSPRGKLYEFASSSTQEIIRGNKRHTKDRVQPENQAGPQYLQYMQHEAANLMKKIELLETAKRKFLGEGLQSCTLQEVQQIEKQLERSVGTIRARKLQVFKEQVERLKKKKK

SEQ ID NO: 40582 - protein, 308 aa, Nicotiana tabacum
GTRLDEEGCIEESGHISEKKRRLSVEQVKALEKNFEVENKLEPERKVKLAQELGLQPRQVAVWFQNRRARWKTKQLERDYGVLKSNFDALKHNYESLKHDNEALLKEILELKSKVYTENGESKGVAVKEEAMESESDDNKVIEQSKPNDNDNNNNNFLENFEEDDEEEEINFENFNVAAAATSTNIFGDNFKDGSSDSDSSAILNEDNSPNAAAISSSGAFLISTNGNGNGNGSSTSLNFCFQFTESSSKSNLGDGQKGNNNYYQPQQYVKMEEHNFFNGEESCSTLFTDEQAPTLQWYCPEDWNWKE

SEQ ID NO: 40583 - protein, 339 aa, Erwinia carotovora subsp. atroseptica SCRI1043
MNVLVTGGSGYIGSHTCVQLLAAGHTPVILDNLCNSKASVVKTITRLTDKTPIFYQGDIRDSALLDDIFAKHAIDSVIHFAGLKAVGESVREPLSYYDNNVYGTLVLVEAMKKAGVRSLIFSSSATVYGDQPHTPYQESFPTGQPASPYGRSKLMVEQILQDLQHAEPEWSITLLRYFNPVGAHPSGEMGEDPQGVPNNLMPYIAQVAVGRRDSLAIFGNDYPTVDGTGVRDYIHVVDLADGHIAAMNTLQNRAGVHIYNLGAGVGYSVLQVVEAFSQACGKPLAHHFAPRRQGDLPAYWADAERAAKDLNWRVTRSLQEMAQDTWRWQSNHPNGYEEA

SEQ ID NO: 40584 - protein, 208 aa, Triticum aestivum
  misc_feature (21)..(21): Xaa can be any naturally occurring amino acid
  unsure (1)..(208): unsure at all Xaa locations
RGALPGPTHLYIYGVGNREQXLELWFDPPAKFHTYAVFWNPSQVVFLVEDTPIRVYDNKNASATKPKGHHRHPNNATTAATQTASAFPSPQPMAVYSSIWNADDWATRGGLVKTDWSHAPFVATFRHVRVEACAWAANASDSDAGEVARCSGSSWGKEGRYWWKEKDMQELSVHQSHQLVWARAHHLVYDYCVDTDRFPVQPPECAGR

SEQ ID NO: 40585 - protein, 125 aa, Colwellia psychrerythraea 34H
MKNNDEYKDKLTDAAFKVCRLAATEQPFSGIYNDHWQQGLYHCACCEQPLFSSYSKFDAGCGWPSFFAAIETKVAYKSDESHSMQRVEIQCDNCQSHLGHVFDDGPKPTGKRYCVNSLSLKFYSE

SEQ ID NO: 40586 - protein, 133 aa, Methylobacillus flagellatus KT
MAYSDKVLDHYENPRNVGSLDKNDPSVGTGMVGAPACGDVMKLQIKVNDQGIIEDAKFKTYGCGSAIASSSLVTELIKGKSLDQAMEIKNSDIAQELALPPVKIHCSVLAEDAIRAAVADLKAKQGAKDQQVA

SEQ ID NO: 40587 - protein, 173 aa, Lycopersicon esculentum
MGRGKVELKRIENQTNRQVTFSKRRNGLLKKAYELSILCDAEVALLLFSPSGKAYHFASHDIERTILRYKNEVGLSKNSDQGPRAMEVWRTKIDDMTRTIHELEARDKHFCWRRVIKSWYERLKQLERQLRVGVERIRSKKHKILHEENIHLQKQVKLYEVEGAQGFSIQIQG

SEQ ID NO: 40588 - protein, 599 aa, Thanatephorus cucumeris
MARSTTSLFALSLVASAFARVVDYGFDVANGAVAPDGVTRNAVLVNGRFPGPLITANKGDTLKITVRNKLSDPTMRRSTTIHWHGLLQHRTAEEDGPAFVTQCPIPPQESYTYTMPLGEQTGTYWYHSHLSSQYVDGLRGPIVIYDPHDPYRNYYDVDDERTVFTLADWYHTPSEAIIATHDVLKTIPDSGTINGKGKYDPASANTNNTTLENLYTLKVKRGKRYRLRIINASAIASFRFGVQGHKCTIIEADGVLTKPIEVDAFDILAGQRYSCILKADQDPDSYWINAPITNVLNTNVQALLVYEDDKRPTHYPWKPFLTWKISNEIIQYWQHKHGSHGHKGKGHHHKVRAIGGVSGLSSRVKSRASDLSKKAVELAAALVAGEAELDKRQNEDNSTIVLDETKLIPLVQPGAPGGSRPADVVVPLDFGLNFANGLWTINNVSYSPPDVPTLLKILTDKDKVDASDFTADEHTYILPKNQVVELHIKGQALGIVHPLHLHGHAFDVVQFGDNAPNYVNPPRRDVVGVTDAGVRIQFRTDNPGPWFLHCHIDWHLEEGFAMVFAEAPEDIKKGSQSVKPDGQWKKLCEKYEKLPEALQ

SEQ ID NO: 40589 - protein, 466 aa, Zymomonas mobilis
MADHFDLIVLGGGPGGYVAAIRAAQLNLKVALVERVHLGGICLNWGCIPTKSLLRSAEVYHEMQNAEAYGLTSFKPDFDLDKIIARSREVAARLASGVKTLLRKNKVEVISGVGQLTGNQQMRVETTEVEEKILEAKDIIIATGARARQLPNVHSDGKHIWTYHHALKPPAMPKKLLVIGSGAIGIEFASLYADFGAEVSIVEHAPQILPMEDAEVSAYVAKAFKKRGIRILTQSALQNLTPDDEGVTAEIAGADGKVTKERFSHAIVAIGVVANVENIGLDKLGIKLDRGFIAVDGFGRTNVDHVWAIGDVAGAPCLAHKASHQGVIAAEDIAGCDHVHPLNTQNIPACTYARPQVASVGLTEEKARQQGYNVKIGNFPFIANGKAIAQGATDGFVKTVFDADSGALLGAHMVGAEVTEMIHGYTVARTLETTEAEIMETIFPHPTLSEAMHESVLAAYGRALHF

SEQ ID NO: 40590 - protein, 738 aa, Zea mays
  misc_feature (70)..(70): Xaa can be any naturally occurring amino acid
  misc_feature (302)..(302): Xaa can be any naturally occurring amino acid
  misc_feature (536)..(536): Xaa can be any naturally occurring amino acid
  unsure (1)..(738): unsure at all Xaa locations
RGRGKWEWEIIRHEAFVDSAAMERERESDRCLDPQLWHACAGGMVQMPAVHSKVYYFPQGHAEHAQGPVXLPAGRVPALVLCRVAAVRFMADPDTDEVFAKIRLAPVRPNEPGYADDAIGAAAASGAQEDKPASFAKTLTQSDANNGGGFSVPRYCAETIFPRLDYSADPPVQTVLAKDVHGVVWKFRHIYRGTPRRHLLTTGWSTFVNQKKLVAGDSIVFMRTENGDLCVGIRRAKKGGIGGPEFMHHHHQQPPPPQGGGYAGFSMFLRGEEDGGKMMAAAATRGKAARVWVRPEEVVEAXANLAVSGQPFEVVYYPRASTPEFCVKAGGVRAAMRTQWCPGMRFKMAFETEDSSRISWFMGTVSAVHVADPIRWPNSPWRLLQVAWDEPDLLQNVKRVSPWLVELVSNMPVIHHLTATPFSPPRKKLCVPLYPELPLEGQFPAPMFHGSPLLGRGGAGGPMCYFPDGTSAGIQGARHAQFGISLSDLHLNKLQPGLSPYGLHRQLDHGVQVQVQQPRIAAGLIVGGHPAARDDXSCLLTIGTPKSKKPPSDVKKASTAAAPQLMLFGKAILTEQQISLGGGNVVPALAKKSPSDDDDDVAERTVSNSDVSSPGRSNQDGTSSGGGPAARACWQEEECNNRAAGSEDDLLGHCKVFMQSEDVGRTLDLSAVASYEELYQRLADMFGVDKAELTSHVFYRDDASGALKHPGDEPFSEFTKTARRLTILTDESSDSLAR

SEQ ID NO: 40591 - protein, 338 aa, Glycine max
MAAGVYNQPIVAFQSHSHINNFNHQQKFNNLVRLVTKDFIGSNFLSRRDCRVIQSLASQTSVVDTVSSPSKSKTSDRDTHKKSNEASLILIRHGESLWNEKNLFTGCVDVPLSKRGIDEAIEAGKRISSIPVDLIFTSALIRAQMTAMLAMTQHRRRKVPIIMHNESEQARGWSQVFSEDTEKQSIPVIAAWQLNERMYGELQGLNKQETADRYGKEQVHEWRRSYDIPPPNGESLEMCAERAVSYFRDQIEPQLLSGKNVMISAHGNSLRSIIMYLDKLTSQEVISLELSTGIPMLYIFKEGRFVRRGSPIGPTEAGVYAYTRRLALYRQRLDDMFQ

SEQ ID NO: 40592 - protein, 635 aa, Geobacter metallireducens GS-15
MERWSINDSAKIYNLPNWGADLFSINKKGNVCVHPSPTSKHSIDLRALVDDLIKRKIKPPILLRFMDVLQGRIAAINRAFKYAIDENDYPSTYQTFYPIKVNQQRQVVEAIAKFGKRYNIGIEVGSKPELVIGISFATGNGIPIICNGYKDKEYIETVLYATKIGYDITIVVEKMFELEKIIALSKKTGIKPKLGIRVKLSSKGTGKWATSGGEDAKFGLRMSEIIAAIGLLEQNELLDSVKLIHFHIGSQITKIDKIKSALIEGTRVYAEMRKLGVGIEYVDIGGGLGVDYDGSKSSYFSSVNYSIEEYANDVIYQIKNICEDAGVECPNIISESGRATAAHYSVLVTNLLNTNTQNLMPDFEETLNGAEKLAPTVKKLVDIYKSIDRYSLREDYHDTVQLIQEAVSLFSLGYLTLAERAMAEWLHGKILRKINGIVEKIKPIPEELQNFQLSLRQTYFANFSLFQSIPDSWAIDQLFPIVPIQRLNQKPDVMASIADITCDSDGEITSFVGENGRTKYLPLHKIRKDEDYFVGFFLIGAYQEILGDMHNLFGDTNAVHVTFNKKTGYKIDTVINGDATWESLKYVQYKGPEILKHVRDTMEKDVALRKVSIEESSHFLELLDRTLLGYTYLGE

SEQ ID NO: 40593 - protein, 475 aa, Polaromonas sp. JS666
MSKQFDVIVIGGGPGGYIAAIRAAQLGFNVACIDEWKNAKGGPALGGTCTNVGCIPSKALLQSSEHYEQAGHHFADHGIEVKGLSLDLAKMVGRKDTVVKQNNDGIVYLFKKNKVTFFHGRASFAAAKDGLYDIKVAGAAEETLSGKHIIVATGSNARALPGAPFDEESILSNDGALRIGAVPKKLGLIGSGVIGLEMGSVWRRLGAEVTVLEGLPTFLGAVDQQIAKEAYKAFVKQGLKIELGVQVGEVKSGKNGVSVAYVDAKGQAQKIDVDKLIVSIGRVANTIGLAPETVGLKLDERGAIVVDDECKTNLPNVWAIGDVVRGPMLAHKAEEEGVAVAERIAGQHGHVNFNTIPWVIYTNPEIAWVGQTEEQLKAAGRAYRAGTFPFMANGRARALGDTTGMVKMLADTATDEILGVHIVGPFASELIAECVVAMEFRASSEDIARICHAHPSLSEATKEAALAVDKRTLNF

SEQ ID NO: 40594 - protein, 548 aa, Vibrio sp. Ex25
MAAKDVKFGNDARVKMLEGVNVLADAVKVTLGPKGRNVVLDKSFGAPTITKDGVSVAREIELEDKFQNMGAQMVKEVASKANDAAGDGTTTATVLAQSIVNEGLKAVAAGMNPMDLKRGIDKAVAAAVEQLKELSVECNDTKAIAQVGTISANSDASVGNIIAEAMERVGRDGVITVEEGQALQDELDVVEGMQFDRGYLSPYFINNQESGSVDLENPFILLVDKKISNIRELLPTLEAVAKASRPLLIIAEDVEGEALATLVVNNMRGIVKVAAVKAPGFGDRRKAMLQDIAILTGGTVISEEIGLELEKVALEDLGQAKRVSITKENTTIIDGIGEEEMISGRVAQIRQQIEDATSDYDKEKLQERVAKLAGGVAVIKVGAATEVEMKEKKDRVEDALAATRAAVEEGVVAGGGVALIRAASKIAHLTGDNEEQNVGIRVALRAMEAPIRQITKNAGEEDSVVANNVKAGEGSYGYNAATGEYGDMLEMGILDPTKVTRSALQFAASVAGLMITTEAMVTDLPQKDAPAMPDMGGMGGMGGMGGMM

SEQ ID NO: 40595 - protein, 512 aa, Arabidopsis thaliana
MVSHPMEKAANGASALETQTGELDQPERLRKIISVSSIAAGVQFGWALQLSLLTPYVQLLGIPHKWASLIWLCGPISGMLVQPIVGYHSDRCTSRFGRRRPFIVAGAGLVTVAVFLIGYAADIGHSMGDQLDKPPKTRAIAIFALGFWILDVANNTLQGPCRAFLADLSAGNAKKTRTANAFFSFFMAVGNVLGYAAGSYRNLYKVVPFTMTESCDLYCANLKTCFFLSITLLLIVTFVSLCYVKEKPWTPEPTADGKASNVPFFGEIFGAFKELKRPMWMLLIVTALNWIAWFPFLLFDTDWMGREVYGGNSDATATAASKKLYNDGVRAGALGLMLNAIVLGFMSLGVEWIGRKLGGAKRLWGIVNFILAICLAMTVVVTKQAENHRRDHGGAKTGPPGNVTAGALTLFAILGIPQAITFSIPFALASIFSTNSGAGQGLSLGVLNLAIVVPQMVISVGGGPFDELFGGGNIPAFVLGAIAAAVSGVLGLTVLPSPPPDAPAFKATMGFH

SEQ ID NO: 40596 - protein, 416 aa, Cryptococcus neoformans var. neoformans B-3501A
MSFTNFWAGVPEGPPDPILGVTDAFKKDTSPKKVNLGVGAYRDEDGKPYVLDSVLKAEDILHKKKLDKEYLPITGAADFIKLASELAYGKDSKPLREGRVAVSQSISGTGALRIATGFLSSFYSGPKVIYLPNPTWGNHVPLAESVGIKVERYRYFDKKTVGLDFEGMKEDIKNAESGSIILLHACAQNPTGIDPTQEQWKELSDLLKAKKHLPLFDMAYQGFASGDIIRDAFAVRYFVEQGHQIILCQSFAKNLGLYAERAGTFSMVCASPEEKERVMSQIKRVVRPLYSSPPIHGAQLVATILGTPELYDEWLTEVKKMADRIIAMREKLYNLLIELKTPGEWGHIKSQIECLGMFSFTGISKEQVDDLAEYAHVYMTKDGRISMAGLNEHNIQYFAESLSKAVKGELRTKSAL

SEQ ID NO: 40597 - protein, 1418 aa, GIBBERELLA ZEAE PH-1
MSPQRLAEGFARLRDRLSTRDRSRQKRNLAEQPTSSERSDSQVQQQPQSQQVSSASIHSTATTATASQNVPIQTEAIEEDSQPGEKPSSKSDLWDKALTHLSKSEYDRDIVAIVKTFTGNPIGDNATADGRPSSTKDLAKDISERMAQAIQDGQHSREQREWKVTVGHKEYSARGMVDKTVDILNKFVAVGDVAVSFDPVHAALPWAAVRFVLVTLAAGSELRSQIIFGLAKVTSLILQCDTYRRIYLTLDPTLRPAADILDLLETSIVHSYVNSLLFLGFAIHRQGSRSRMVSAPFKLNEVESYIESLQESGDQLSRAADDCEKQCNLQNRTGVKELLRYAKESHQSMQTHSVLLMDIHQKMVFDKLRTAEGAAYDSHANEHEARCHPQTRVDLLAQIYKWAGDPDSECIYWLQGMAGTGKSTISRTVAYELSRKEALGASFFFKRGEGDRGKAARVFPTIATQLVRRLPSLMPHIQDAIETDSHIGEMAISKQFENLIRLPLTKMLSNPQNPPTVVTSVHLKFFVTSRPEIPVYVEFRRIREPYKDFILHLVDEHTIEHDITAFLNSTLAEIRNEYNMYPLGGQHLPESWPSSTEIHDLVKMAIPLFIFAATACQLIQKGKYGDPEENLNKILERTTGTQISKLNELYLFVLEQLLDDPINSKEEILKRFQEIVGAIVILADPLSVTCLAKLLDISEKKIGHVVGLLPSVLYMPSEKSAPIKPLHLSFRDFLVNRNNHETDPFWVDEKETHKNLAKHCLHVMRSGLRKNICGLSFSGMRRSAVDLEQLEKSMPSQLQYACMHWAYHQTKGDPELSISKEVYGFLTTHFLHWLEAMSLLGRVKECLDALRLLARWVEALEDSSLSTFIADAERFIQAYFSVAAEMPLQIYCCLAFAPRKSIMRRTFEKVIPKWICSLPKVEENWDACLLTLEGHSKRVNSVVFLHDSKKVASGSWDDTIRIWNAETGECERVLEGHSADVNSVVFSHDSKKVASGSIDQTIRIWNAETGECERVLEGHSNSVNSVVFSHDSKKVASGSIDQTIRIWNAETGECERELEGHSADVNSVVFSHDSKKVASGSIDETIRIWDAETGECERELKGHSDMVNSVVFLYDSKKVASGSWDKTIRIWDAETGECERELKGHSDMVNSVVFSHDSKKVASGSWDKTIRIWDAETGECERELKGHSDMVNSVVFSHDSKKVASGSWDKTIRIWNAETGECERVLEGHSDGVNSVVFSHDSKKVASGSIDKTIRIWNAETGECERELKGHSDDIRSVVFSHDSKKVASGSWDKTIRIWNAETGECEEIVPLDGSAHILSFATDGRGIVTDRGVFALSGGLQPHAGSAMPWQSSYTPMLACTDSTWVTAAGKDLFWLPPECRNGEVAVSGSTVAIGCRSGRVLVLGISMSEVEQWTDT

SEQ ID NO: 40598 - protein, 215 aa, Sordaria macrospora
SFGKVMQVRKKDTNRIYALKTIRKAHIISRSEVAHTLAERSVLAQINNPFIVPLKFTFQSPEKLYFVLAFVNGGELFHHLQKEQRFDVNRSRFYTAELLCALECLHGFNVIYRDLKPENILLDYQGHIALCDFGLCKLDMKDEDRTNTFCGTPEYLAPELLMGNGYNKTVDWWTLGVLLYEMLTGLPPFYDENTNEMYRKILSEPLHFPGPEVVP

SEQ ID NO: 40599 - protein, 488 aa, Zea mays
MLMQGAVAATDCTPTSAAASPSSSVRCRLGPAGGHAGKRRRLRPSKRAPTTYISTDVATFCAMVQRVTGADEADLQSPQQDGLNLGLLLPHLGVELFLQAAGHAAPRVAAAPYTPAPPAAAAEQQPLYPMLAGLVERDAAAAAGGGFLRGETLKGMALEAVVLSQSQFQQGSRFGCGAMAAGGAWSDLLFSGTEGLFEMGGAAGRGWNAAASSPPQLLQELGDNGAAGSLPVASAGSASGGAGQDAPAMAAAAASGRRKRRRMRPVKNEEEVESQRMIHIAVERNRRKQMNEHLAALRSLMPPAHTQRGDQASIVGGAINFVKELEQLLQSLEARRRSPQCAAYAVDPDDAGPFADFLTFPQYSMCAVIAAPENTGHHREGGAVAEQEASGSKPSAVADVEATMVESHANLRVLSRRRPRQLLRLVLGLQGHRLTVLHLNMSSGAHMVLYSFSLKVEDDCQLTSVGEIAAAAHHIVEKINEEQNKAAA

SEQ ID NO: 40600 - protein, 164 aa, Nostoc sp. PCC 7120
MKKRYFLQTSAALVGTALLPPYIFHRSSIMATSNTKFEIAKSEQEWQTILTPEQFRVLRKHGTERAFTSPLDKEYSQGTYVCAACDQPLFTSDTKFNSGTGWPSFFNPIEGGIGTTVDRSFFMTRVEVHCSRCGGHLGHVFDDGPAPTGKRYCMNGVSLKFEPA

SEQ ID NO: 40601 - protein, 270 aa, Zea mays
MRSPTRPLGRIKHDDQEKMKKQQQAEEELATGMEKVTVAEPDHKEEGHEAAEKKDSLLAKLHRTSSSSSSSSDDEEEEVIDENGGEIVKRKKKKSLKEKVKEKLAAHKAHDEGDHHQPAVPAPAPAPPVVVDTHAHHLQEGEHKPHFPAPAPPPHVETHHHPVVVHKIEDDDTKTQTPPQAPEEEKKGLLDKIKEKLPGGHKKPEDAAAAAAAPAVHAPPPPAPHAEVDVSSPDGKKGLLGKIMDKIPGYHKSSGEEDRKDAAGEHKTSS

SEQ ID NO: 40602 - protein, 192 aa, Xylella fastidiosa Ann-1
MNMLNVLRFPVLALALAFVSSGVLADVGSLLDLDYRPLAGKETVNLQRLYGGKVLLVVNTASKCGFTPQYEGLEALHQKLSPLGFAVLGFPSNDFKGQEPGDEQQIQEFCTLTYGVKFPMFQKVHVKGDEVTPLYQRLTQTTGVAPGWNFHKYLIARDGHVVAQFDSRTRPDDPILLEAIKRELAKSVQVVH

SEQ ID NO: 40603 - protein, 347 aa, Oryza sativa
MGTNDPGTPSKATKASEPEQSPATTSGTTAPVYPEWPGFQAYSAIPPHGFFPPPVAASPQAHPYMWGAQPMVPPYGTPPPYMMYPPGTVYAHPSTPGVHPFNHYPMLANGNVETAGTAPGASEINGKNELGRTSGPSANGITSHSESGSESESEGSDANSQNDSHSKENDVKEDGSSQNGISHTALNQNMSMAPTQTGVVIGGVAPTTNLNIGMDYWGAAGSSPVPAMHGKASSGSVRGEQWDERELKKQKRKQSNRESARRSRLRKQAECEELSVRADNLRAENSSLRAELERIKKEYEALLSHNASLKEKLEGNSDSIPYMNEQNDTNGTHQKQQDSDAQPNDAP

SEQ ID NO: 40604 - protein, 605 aa, Legionella pneumophila str. Paris
MFGFISDLLTAAVSSLDELLQDTPAHQIILGTAALYFLYNQYHNPSISRWCRSRNNASMKQRIIDSAYALAKNLPGVNQIIEKELNKELSSTREKLRIQRSGMTLREEIPEEGLSPQDILSAFDVDVEKCHFDFLSVTNDSPEREFLVGRGDGKDSGALYAIHPKELTELLKEVYGATALTNPLHDKWPRINAMQAEVIRWCQNLFHGSKEGYGLLTHGGTTSIIEAMAAYVIRARAKGIDYPEIVVPETAHAAFKKAAELTGAILITVPVDKKTGAVNPNVMSSYITRNTAVMVGSAPSFMNGIHDPISELGQLAKKKNVPFHVDACLGGFLTAFLDTSSEPMDFRVPGVTSISADLHKYGCCPKGTSVCLFSEDSPALSVYAALNWSGGLYATPGILDGSTSGARVAEVYATLSYYGKNKYQEIAKSIIRLRNAIQKELTALVEEGNGLTSEDIYVYGNPQWSILGFRSNTCNAHFIADELEKRGWKLNLLQNPDGFHLCLTHVHTLVGSFETQFIKDLREAVIDVKNYPPGKKPSGNVKVYGAVGMMPVELQKEICKQYQKARLDFTAASHGSLGIFAPSSTEEDDGLRNRKVGEQKVQTSL

SEQ ID NO: 40605 - protein, 476 aa, Lycopersicon esculentum
MDLETSEISNYKSSVVLSKLASNEQHGENSPYFDGWKAYDNDPFHLVNNLNGVIQMGLAENQLSVDLIEEWIKRNPKASICTNDGIESFRRIANFQDYHGLPEFTNAIAKFMEKTRGGKVKFDAKRVVMAGGATGANETLILCLADPGDAFLVPTPYYPGFNRDLRWRSGVQLLPISCKSCNNFKITIEAIEEAYEKGQQANVKIKGLILTNPCNPLGTILDRDTLKKISTFTNEHNIHLVCDEIYAATVFNSPKFVSIAEIINEDNCINKDLVHIVSSLSKDLGFPGFRVGIVYSFNDDVVNCARKMSSFGLVSTQTQHLLAFMLSDDEFVEEFLIESAKRLRERYEKFTRGLEEIGIKCLESNAGVYCWMDLRSLLKEATLDAEMSLWKLIINEVKLNVSPGSSFNCSEVGWFRVCFANIDDQTMEIALARIRMFMDAYNNVNKNGVMKNKHNGRGTTYDLTPQMGSTMKMLLA

SEQ ID NO: 40606 - protein, 105 aa, Zea mays
  misc_feature (78)..(78): Xaa can be any naturally occurring amino acid
  unsure (1)..(105): unsure at all Xaa locations
INKNRIFEIAPGAKQMFSFLRDAGDAPLEKHPKLKAHAVTVFVMACESATQLRSTGDVKVREATLKRLGATHARAGVXDAHFEVVKTALLDTIRDAVPDMWTLEM

SEQ ID NO: 40607 - protein, 438 aa, Prochlorococcus marinus str. NATL2A
MSTNFSVPEPTPQLVKVAESAKEASISLGQSTNKQRCEALTEMANALNDNADEILKANVQDLERSEKEGLNKSLLSRLQLTKTKLKGCIDGVLKVSNLADPIGKRQLHRELNENLILERVTVPLGVLGVIFESRPDALIQIASLAVRSGNGALLKGGSEAKDTNQAIMDSLDKGLRKANVGSGALSLLTTRQESLGLLRLDKFVNLIIPRGSNELVQFIQENTRIPVLGHADGICHLYVDNSVDIDKAISIALDSKIQYPAACNAIETLLIHEDIAEMFLKKGLPIFSSEGVTLKGDTKSQALGVKNKADESDWSKEYLDLILSIKIVRNVNEAIEHIRKYSSRHTEAIVTEDKMVAEKFLSSVDSAGVYHNCSTRFADGFRYGFGAEVGISTQTLPPRGPVGLEGLVTYRYYLRGDGDLVKDFASGDRSFSHIDLPL

SEQ ID NO: 40608 - protein, 377 aa, Thermus thermophilus
MEVARGLEGVLFTESRMCYIDGQQGKLYYYGIPIQELAEKSSFEETTFLLLHGRLPRRQELEEFSAALARRRAMPAHLLESFKRYPVSAHPMSFLRTAVSEFGMLDPTEGDISREALYEKGLDLIAKFATIVAANKRLKEGKEPIPPREDLSHAANFLYMANGVEPSPEQARLMDAALILHAEHGFNASTFTAIAAFSTETDLYSAITAAVASLKGPRHGGANEAVMRMIQEIGTPERAREWVREKLAKKERIMGMGHRVYKAFDPRAGVLEKLARLVAEKHGHSKEYQILKIVEEEAGKVLNPRGIYPNVDFYSGVVYSDLGFSLEFFTPIFAVARISGWVGHILEYQELDNRLLRPGAKYVGELDVPYVPLEARE

SEQ ID NO: 40609 - protein, 501 aa, Lotus corniculatus var. japonicus
MALPECSAANLAQLIGPNATDAAAVAGFICDQFTAVGQRFSDTAFAVDSTYLLFSAYLVFSMQLGFAMLCAGSVRAKNTMNIMLTNVLDAAAGGLFYYLFGFAFAFGAPSNGFIGRHFFGLKDVPTVAFDYSYFLYQWAFAIAAAGITSGSIAERTQFVAYLIYSSFLTGFVYPVVSHWFWSGDGWASATNTGNLLFGTGVIDFAGSGVVHMVGGVAGLWGALIEGPRIGRFDHAGRAVSLRGHSASLVVLGTFMLWFGWYGFNPGSFTKILSAYDSGNYYGQWSAIGRTAVTTTLAGCTAALTTLFGKRIISGHWNVTDVCNGLLGGFAAITAGCSVVEPWAAIVCGFVAAVVLIACNMLAEKVRYDDPLEAAQLHGGCGAWGIIFTALFAKEEYVNQVYPGKPGRPYGLFMGGGGKLLGAHVIQILVIIGWVSATMGPLFFILNKMKLLRISTEDELAGMDLTRHGGFAYAYEDDESHKPGIQLRKIEPNSSSTPSAES

SEQ ID NO: 40610 - protein, 326 aa, Zea mays
MRPILMKGHERPLTFLRYNRDGDLLFSCAKDHTPTVWYADNGDRLGTYRGHNGAVWTCDVSRDSARLITGSADQTAKLWEVSTGKELFSFRFDAPARSVEFAIGDALAVVTTDNFMDHVPTVQVKRIAEDIDDQTDESALVITGIKGRINRAVWGPLNRTIITAGEDATIRIWDSETGQLLNESDKESGHQKTISSLSKSLDWSHFITGSLDKSAKLWDTRTLTLIKTYVTERPVNAVDISPTHDTVVLGGGQDAMNVTMTDPRAGKFEAKFYHKILQEEIGGVKGHFGPINALAFNPDGRSFSSGGENGYVRLHHFDSDYFSIKM

SEQ ID NO: 40611 - protein, 309 aa, Candida glabrata CBS138
MKLIAAETPQKKFAMRTIEDSLKELEGLLHGGRVLRLPDLDHRYTIMSYENYEQRSADVPRQQICDTSRQRDNAYKVVPVTHTTHSADINSDFITNYKLSTPTQGLTTNVRTNPTVDVLTESKPNYQYYNKPTKLKASVKRKKSLAIVPAWVNVPEFSRFFVIKSISLDHIKKSFYNSIWSSTHFGNRKLSQAYKELKAGAKIFLFFSVNASGRFCGVAEMSSDLQDCLDTSLWDDSSKYGAAFRVRWVLVKDLKNAHLKRFLIPENEMKPITKSRDTQEIPFYIGQAVLQLFKSDNTNIKCFLDQDYN

SEQ ID NO: 40612 - protein, 233 aa, Triticum aestivum
  misc_feature (159)..(159): Xaa can be any naturally occurring amino acid
  misc_feature (178)..(178): Xaa can be any naturally occurring amino acid
  misc_feature (192)..(192): Xaa can be any naturally occurring amino acid
  unsure (1)..(233): unsure at all Xaa locations
MERRGAAAAPSLELPGFRFHPTEEELLEFYLKHHVTRNNKQQQLRAPFDIIPTVHLYRHDPWDLPGLAAIASEREWYFFVPRDGARKHASGVAGGGRPSRTTERGFWKATGSDRAVRCAADPKRLVGLKKTLVYYQGRAPRGTKTDWVMDEYRLPDLAXPGAREQQDVVLCKVYRQAXSLKELEQRAAMEEXGGKGSFPATTKGFPLERPVRPEFSFPVGRSATKAVNARRGT

SEQ ID NO: 40613 - protein, 146 aa, Nostoc punctiforme PCC 73102
MALVRLNPWQELNTIQRQINRLFDEETLPSAFLERGYSRVPAAELKETEDAIHLKVELPGIETKDLDLQVTENAVYLSGERKSEAKSEEKGVIKSEFHYGKFQRVIPLPTRIQNTNVKADYKDGILNLTLPKAEEEKNKVVKVNLA

SEQ ID NO: 40614 - protein, 689 aa, Magnaporthe grisea 70-15
MPEKGLSAQIKSRPGTVYQLYLVQRRFVSSNLQMAASMEERHDDLLMQRMPSEEDEQDFEEVDELIDPKSPEELDILGLLLLTCPSLGLQVYWFLLQSSGTPYLRSLGLDGASISIIWALGPIFGAFVQPILGSLSDEIHHPLCRRKPFMMGGSLLVMLSTLAMACAQELTPDPLATPWQPRALAVVCLVVILLALSAYSVGVRAIVVDNCPPSQQFAAAAWSMRWNVLGSATLSTVGFVAVGRHPDTDPAVTFRTLACVAAVCSAATVGLVCWFAPREATPRFRSPGSFGLRKVLSLCAPGALVRRWRRLPPLTNKVCNIQLLGWCGWFPMLYYMSSYAYETAMLEISSVQATQRGLATKSVETQAKSYPLYASLFFSFGTLSSTLVLTLVNASSCPKITLPRIWFLSQVLATASLLLTFLLCSTHASLALICFMGATWTVTMWVPFALINAELAELRTGVAGVQGLHNMAVSLPQIASALVCAAVLGALRLAGVDGGAVWLLRLAAVPVAWSAWLIWRLDGLLDAASPEQGYLVLANFYISFLKPPFRPQLHLSPCSELPHPPSPCRPQGAGPKGNYWGSPYPVYTLPGKEAQFQVPGCYHFIVKPSKDCTSYEMKKHEVTKDCPRYKDLPWEITVEPALVPPLHGPGIKIRKKAPASAKVPEPKPKGRSSSSGGKDETTSITTDQA

SEQ ID NO: 40615 - protein, 993 aa, Trichodesmium erythraeum IMS101
MVEQISHTNYETKTQEIAKQLLKATQEKNRSFLAQLQNQMRWDDKLLDWAMASPGLRVQLFRFIDCLPALRSKPEIAAHLQEYLTTQEVELPETLKKLLNFANPDSVPGQLAATTVAPAVETLAHKYIAGENVKQIIKTLEKLRKDKMCFTVDLLGEAVITETEAQLYLDRYLELMTQLSQAANSWSSIPQIDEAEGEKLPRVQVSVKLTAFYSQFDPLDVKGSQERVSDHVRTLLRHAQKLGVAVHFDMEQYTYKDLTIDILKELLMEEEFRNRNDIGVTIQAYLRDSEKDLQGIIEWAKIRGRPVTVRLVKGAYWDQETIKALQHDWPQPVFNDKPETDANFEKLTYMMLENHEYIYSAIGSHNVRSQARAIAIAETLKVPRRCFEMQVLYGMGDKIATILAEKGYRVRVYCPYGDLLPGMAYLIRRLLENTANSSFLKQSLENRPLEELLAAPSINGKTTIHDVVKPVFPNAADSDYANFQQRQQALNTIGQIRLELGKTYLPIINGEYTNTAQIVDSLNPSNSKEVVGKIGLISVEQAEQAIQAAKAAFPSWKKTPVRERTRILRKAADLMEKRRHELAAWMVLEVGKPLNQGNAEVSEAIDFCRYYADEMERLEQGYNYDVAGETDRYYYQPRGISLVISPWNFPLAIPTGMTVSSLVTGNCTLLKPAAVSSVIASKISEILLEAGFPKGVFQFVPGNGSTVGDFMVKHPSVNSITFTGSMEVGCHIYAQAAVLQPRQKHLKRVIAEMGGKNAIIVDESADLDQAVAGVVYSAFGYSGQKCSACSRVVVLATIYDSFVNRLVEATRSLNIGDAEKPSTQVGPVIDEKAQKRIQEYIVKGKQEAEVAIEMSAPKDGYFVGPVIFKDVSPSATIAQEEIFGPVLAVMKADNFTQALEIANGTNFALTGGLYSRTPSHIEQAKAEFEVGNLYINRGITGAIVSRQPFGGFKLSGVGSKAGGPDYLLQFLEPRTITENIQRQGFAPIEGVDN

SEQ ID NO: 40616 - protein, 216 aa, Xanthomonas axonopodis pv. citri str. 306
MLGIGAFKQRLPRPGEALPGREQALPLHNTHLVNGHPLRGEFTGLAQVQFGLGCFWGAERKFWNVPGVYTTAVGYAGGQTPNATYSEVCSGQTGHTEAVLVVFDDHAVSFAQLLRTFWESHDPTQGMQQGNDMGTQYRSAIYCTTQAQYDAALASRDAYQQQLTAAGYGEITTEIRFPAPTFYYAEDDHQQYLAKHPNGYCGLGGTGVSCPIGLDA

SEQ ID NO: 40617 - protein, 449 aa, Bradyrhizobium japonicum USDA 110
MSTRTSRVLHRSLRETPPKAIGGEGIYLFAEDGRRVIDASGGAAVSCLGHQHPRVIAAMAKQASTLAYAHTAFFSSEPAEALAETLVGHEPGGLAYAYFVSGGSEAIEASIKLARQYFIERGEPQRQHFIARRQSYHGNTLGALAAGGNAWRRAPYAPLLSAAFSHVTPAFAYHEKHDGESDAQFVARLAAELEAEFQRLGPNSVAAFLAEPVVGATAGAVTAPDGYFRAVREICDRHGALLILDEVMCGMGRTGTTHAWEQEGVAPDIQAIAKGLGGGYQPIGAMLASGRIIDTIRSGSGAFQHGHTYLAHPLACAAALAVQDVIREDGLLDRVKERGKQLEQRLTERFGNHRHVGDIRGRGLFWAIELVADRASRTSFDPALKLNQKIKAEAFANGLGCYPGGGTVDGVRGDHVLLAPPYIASVAEIDLIVDKLGTAVDNVLRSVNH

SEQ ID NO: 40618 - protein, 266 aa, Zea mays
  misc_feature (151)..(151): Xaa can be any naturally occurring amino acid
  unsure (1)..(266): unsure at all Xaa locations
DVVVTREQGKNARLISALEKHNVHPLELPLIKHVEGPDTDRLSDVLRNDKFDWIIVTSPEAAAMFLQGWKTAGSPKVRVAVVGEGTARVFHEVSESDDQSLELAFSPSKALGKVLASELPRSNENSCKVLYPASAKAGHEIGFMILDYLQXEDVLSERGFDVTRLNTYTTVPVEDVDPLTLNLAISAPVVAVASPSALRAWLNLISKSDNWNNSVACIGETTASAAKKLGLKSIYYPTTPGLEGWVESILEALRVHRTASKEAPKR

SEQ ID NO: 40619 - protein, 322 aa, Xanthomonas axonopodis pv. citri str. 306
MTASPSKLAQLRELSVVVADTGDYDAIKRLKPVDCTTNPTLVKKALDLPVYADLIERELAWGREHGGDDRTATVNEVADRLTIGVGVKLAELVPGRVSTEVDADLAHDTQATIAKARKFIAMYAERGVSKDKILIKIAATWEGIEAARQLQKEGIDCNLTLIFNRSQALACAEAGVFLISPFVGRILDYYVAQGQTPASIDEDPGVVFVRTVYNEFKQRGSSTVVMGASFRSTAQIEALAGCDRLTISPDLLEKLDAEHGELPRKLSPAQADNAQFTPIDSDSFASGLAADPMATEKLAGGIDTFAKDLHALRKTIADKLAG

SEQ ID NO: 40620 - protein, 252 aa, Brassica oleracea var. botrytis
MGRGRVEMKRIENKINRQVTFSKRRNGLLKKAYELSVLCDAEVALIVFSSRGKLYEFGSVGVERTIERYHRCYNCSVTNNRPEESKQNWCQEVAKLKAKYESLVRTNRHLLGEDIGEMGVKQLQALERQLEAALTATRQRKTQVMMEEMEDLRKKERQLGDINKQLKIKFEAGGHAFKSFQDFWPNSAASMAGDPNNSKFPVQPSHPDSVDCNTEPFLQIGFQQHYYVQGEGSSVPKSNVACETNFVQDWFL

SEQ ID NO: 40621 - protein, 170 aa, Zea mays
HELEFFFIFSIFRVHLLRHQDRTIWGGQGGSAQDITAEQPPRRLHSITVRAGVAVDSIEFTYTDDAGQRRTAGRWGGLGGNVRTIDLGDAEDVREVSGTYGAFEGAITLTSLRLVTSSRTWGPWGVENGTRFSITAPNGSSIAGFYARAGTRLVDAIGVYIRPVVPGRPR

SEQ ID NO: 40622 - protein, 266 aa, Triticum aestivum
  misc_feature (244)..(244): Xaa can be any naturally occurring amino acid
  unsure (1)..(266): unsure at all Xaa locations
MGRSPCCEKAHTNKGAWTKEEDDRLTAYIKAHGEGCWRSLPKAAGLLRCGKSCRLRWINYLRPDLKRGNFSDEEDELIIKLHSLLGNKWSLIAGRLPGRTDNEIKNYWNTHIRRKLTSRGIDPVTHRAINSDHAASNITISFETAQRDDKGAVFRRDAEPTKVAAAAAAITHVDHHHHHRSNPLHQMEWGQGKPLKCPDLNLDLCISPPSHEDPMVDTKPVVKREAVVGLCFSCSMGLPRSADXCKCSSFMGLRTAMLDFRSIEMK

SEQ ID NO: 40623 - protein, 381 aa, Zymomonas mobilis
ATLPAGASQVPTTPAGRPMPYAIRPMPEDRRFGYAIVGLGKYALNQILPGFAGCQHSRIEALVSGNAEKAKIVAAEYGVDPRKIYDYSNFDKIAKDPKIDAVYIILPNSLHAEFAIRAFKAGKHVMCEKPMATSVADCQRMIDAAKAANKKLMIGYRCHYDPMNRAAVKLIRENQLGKLGMVTTDNSDVMDQNDPAQQWRLRRELAGGGSLMDIGIYGLNGTRYLLGEEPIEVRAYTYSDPNDERFVEVEDRIIWQMRFRSGALSHGASSYSTTTTSRFSVQGDKAVLLMDPATGYYQNLISVQTPGHANQSMMPQFIMPANNQFSAQLDHLAEAVINNKPVRSPGEEGMQDVRLIQAIYEAARTGRPVNTDWGYVRQGGY

SEQ ID NO: 40624 - protein, 581 aa, Thermobifida fusca YX
MFGRVPLADTARSPDGRKAFRSRTTTGAILASAASSKHLFVTGGVASSLGKGLTASSLGRLLKSRGLRVTMQKLDPYLNVDPGTMNPFQHGEVFVTDDGAETDLDIGHYERFLDTELSASANVTTGQIYSSVIAKERQGAYLGDTVQVIPHITNEIKARILAMDSEDVDVVITEIGGTVGDIESQPFLEAARQIRHEIGRDNCFFLHISLLPYLAPAGELKTKPTQHSVAALRSIGIQPDAIVCRADRPIPTSLKQKISLMCDVEEGGVVACPDAPSIYDIPKVLHREGLDAFVVRRLGLAFRDVDWTEWNDVLDRVHNPEHEVTIALVGKYVDLPDAYLSVTEALRAGGFAHRTRVNIRWVASDNCTTPEGAQRELDGVHGVLIPGGFGVRGIEGKVGAIRHARENGIPLLGICLGLQCMVIEYARDVAGLRGANSLEFDDKAEHPVVSTMADQTDVVAGERDMGGTMRLGLYPARLRENTLVRELYGGAEEVSERHRHRYEVSNAYRPVLEEAGLVISGVSPDGSLVEYVELPQDKHPFFLGTQAHPELRSRPTRPHPLFVGFIEAALKYSAGTGIADG

SEQ ID NO: 40625 - protein, 317 aa, Debaryomyces hansenii CBS767
MSIKLNSGYDMPLVGFGCWKVDNDTCAATIYNAIKVGYRLFDAAQDYGNCKEIGEGINKALDEGLVARDELFITSKLWNSYHDPKNVELALKKVLSDMKLDYLDLFLIHFPIAFKFVPIEERYPPGFYCGDGDKFHYENVPLADTWKAMEKLTKSGKVKSIGISNFSGALIYDLLRSAEIKPAVLQIEHHPYLQQPRLVEYVQSQNIAITGYSSFGPQSFLELKHSKALDTPTLFEHKTIKSIANKNKKTPAQVLLRWASQRNIAVIPKSNNPDRLLQNLEVNDFDLSKEDFEEISKLDQELRFNNPWDWDKIPIFA

SEQ ID NO: 40626 - protein, 445 aa, Pseudomonas syringae pv. tomato str. DC3000
MTLRQFAGLGALLSLAIPGLALAADPVAEPVLNSGDTAWMLTATALVLFMTIPGLALFYGGMVRSKNILSVMMQCFAITGLISILWVVYGYSIAFDTTGMEAGVVNFNSFFGGMGKAFLAGITPASLTGPAALFPEAVFVTFQMTFAIITPALIVGAFAERMKFSAMLIFMGIWFTLVYAPIAHMVWGGVGGLMWDWGVLDFAGGTVVHINAGVAGLVACLVLGKRKGFPTTPMAPHNLGYTLIGAAMLWVGWFGFNAGSAAAANGTAGMAMLVTQIATAAAALGWMFAEWLTHGKPSALGIASGVVAGLVAITPAAGTVGPMGALIIGLAAGVICFFCATSLKRKLGYDDSLDAFGVHGIGGIVGAILTGVFAAPALGGFGTVTDIGAQVWIQFKGVAFTVVYTAIVTFIILKVLDAVMGLRVTDEEESVGLDLAQHNERGYNL

SEQ ID NO: 40627 - protein, 187 aa, Azoarcus sp. EbN1
MTEQEMPAARETAILAGGCFWCLEAVFKDVEGVEAVTSGYTGGRVDSPSYRQVCEGGTGHAEAVRIVFDPEVIGYRDLLEIFFVIHDPTSLNRQGNDVGTQYRSAIFATTDEQLHEALALIEEMGEMRVYPSAIVTKVERAGTFWPAEDVHRDYYARNSDQSYCQYVVAPKIAKFRENFASRRKQGG

SEQ ID NO: 40628 - protein, 196 aa, Arabidopsis thaliana
MSASRFIKCVTVGDGAVGKTCILISYTSNTFPTDYVPTVFDNFSANVVVDGNTVNLGLWDTAGQEDYNRLRPLSYRGADVFILAFSLISKASYEHVAKKWIPELRHYAPGVPIILVGTKLDLRDDKQFFIDHPGAVPITTNQGEELKKLIGSPIYIECSSKTQQNVKAVFDAAIKVVLQPPKQKKKKKNKNRCVFL

SEQ ID NO: 40629 - protein, 219 aa, Actinidia deliciosa
ETGRHVRMLTHEIRSTLDRHTILKTTLVELGRTLALEECALWMPTRTGLELQLSYTLRHQKPVGFTVPIQLPVINQVFSTNRAAKISPNCPVARLRPLAGKYMPGEVVAVRVPLLHLSNFQINDWPELSTKRYALMVLMLPSDSARQWHVHELELVEVVADQVAVALSHAAILEESMRARDLLMEQNVALDLARREAETAIRARNDFLAVMNHEMRTPM

SEQ ID NO: 40630 - protein, 589 aa, Helianthus annuus
MCGILALLGCSDDSQAKRFRVLELSRRLKHRGPDWSGLYQHGDNYLSHQRLAVIDPASGDQPLYNEDETVVVTVNGEIYNHMELREKLMGHKFKTGSDCDVIAHLYEEHGENFVDMLDGMFSFVLLGTRDNSYLVARDAIGITSLYIGWGLDGSVLISSGLKGLNDDCEHFEVFLAGHLYSSKIRGFRRWYNLPWFSESIPSTPYDPLVLRCAFENAVIKRLMTDVPFGVLLSGGLDSSLVASVTARHLAGSKAAKQWGAQLHSFCVGLEGSPDLKAAREVADYLGTLHHEFHFTVQDGIDAIEDVIYHIETYDVTTIRASTPMFLMSRKIKSLGVKMVISGEGSDEIFGGYLYFHKAPNKEEFHQETCRKIKALHQYDCLRANKSTSAWGLEARVPFLDKEFINVAMSIDPEAKMINMDQKRIEKWILRRAFDDEEKPYLPKHILYRQKEQFSDGVGYSWIDGLKSHAEQHVTNKMMLNAERIFPHNTPVTKEAYYYRMIFERFFPQNSAKLTVPGGASVACSTAKAIEWDASWSNNLDPSGRAALGVHNAAYKKNSGSISSANLAPSIADNVPRMMDITGPELVIRS

SEQ ID NO: 40631 - protein, 94 aa, Lactobacillus sakei subsp. sakei 23K
MLKPLEDRVVIAVKDEAEQTVGGIVIASNAKQKPQTGKVVAVGAGAMTSDGQRIPLDVKENDEVIYDKYAGSEVEYEGQQYLVLHAKDIIAIIE

SEQ ID NO: 40632 - protein, 541 aa, Lactobacillus sakei subsp. sakei 23K
MAKELKFSEDARSKMLAGVDQLANTVKTTLGPKGRNVVLEKAYGSPEITNDGVTIAKAIELEDHFENMGAKLVSEVASKTNDIAGDGTTTATVLAQAIIREGMKNVTAGANPVGIRRGIELATREAVKKLHEISHKVESKDAIAQVAAVSSANEETGRLIADAMEKVGNDGVITVEESKGIDTELSVVEGMQFDRGYLSQYMVTDNDKMEADLDNPYILITDKKISNIQDVLPLLQSIVQEGKALLIIADDVDGEALPTLVLNKIRGTFNVVAVKAPGFGDRRKEQLEDIATLTGATVITSDLGLELKETTIDQLGTAGKVTVTKDDTTIVEGAGSKSAIAERVENIKKQIAETTSDFDREKLQERLAKLAGGVAVIKVGAATETELKEQKYRIEDALNATRAAVEEGYVAGGGTALIDVIESVAALEEEGDVQTGINIVLRALEEPVRQIATNAGLEGSVIVEKVKSQPVEVGYNAANGNWENMIEAGILDPTKVTRSALQNAASVAALMLTTEAVVADKPEDNPAPAAGMDPSAMGGMM

SEQ ID NO: 40633 - protein, 494 aa, Corynebacterium glutamicum ATCC 13032
MVENNVAKKTVAKKTARKTARKAAPRVATPLGVASESPISATPARSIDGTSTPVEAADTIETTAPAAKAPAAKAPAKKVAKKTARKAPAKKTVAKKATTAKAAPATAKDENAPVDDDEENLAQDEQDFDGDDFVDGIEDEEDEDGVEALGEESEDDEEDGSSVWDEDESATLRQARKDAELTASADSVRAYLKQIGKVALLNAEQEVSLAKRIEAGLYATHRMEEMEEAFAAGDKDAKLTPAVKRDLRAIARDGRKAKNHLLEANLRLVVSLAKRYTGRGMAFLDLIQEGNLGLIRAVEKFDYSKGYKFSTYATWWIRQAITRAMADQARTIRIPVHMVEVINKLGRIQRELLQELGREPTPQELSKEMDISEEKVLEIQQYAREPISLDQTIGDEGDSQLGDFIEDSEAVVAVDAVSFTLLQDQLQDVLETLSEREAGVVKLRFGLTDGMPRTLDEIGQVYGVTRERIRQIESKTMSKLRHPSRSQVLRDYLD

SEQ ID NO: 40634 - protein, 214 aa, Nostoc punctiforme PCC 73102
MEQPKVIFLDAVGTLFDVKGSVGKVYSQIAEEFGVTVPAETLNKAFIKSFKAAPPPIFPDAELQDIPQREFDWWRIIALNTFESAGVLKEFSDFSAFFSELYIHFGTGEPWFVYPDVLPALINWRRLGVTLGVLSNFDSRIYSVLQSLGLREFFTSVTIATQVRAAKPDPQIFAIALDKHKCSPEAAWHIGDSVVEDYYAAKAAGLRGVWINRG

SEQ ID NO: 40635 - protein, 649 aa, Candida glabrata CBS138
MAPVTLDPKVTADTSRYSGVQSNSGFAYGEITFGEYVFRRLLSCGTKSVFGVPGDFNLALLEHLYDDSVADALRWVGNCNELNAAYAADGYSRYTNKIGCLITTYGVGELSALNGVAGSFAEDVKVLHIVGVASSQTSCKNTDNKNVHHLIPALNDSNFVSPNHKTYYEMVKDRVCCAAEYLEDIDVACDMLDKVIEDMYRYSKPGYLFIPADFADMMVSTRNLVARPTITLEQAIAPLVGCGESQLEAIVAKVAQLIYNSSNPCILGDVLTDRYGVSQQLNSLISHCQMWNFSTVMGKSVIDESNPYYKGLYNGRECSSSVIEDFSKCDLILHFGIERNEINNGHYTIDYNEHIGANVVEFHSDYIRFFNSKTKEEDMIRGVNFVHVLNRLQPAIQADKLSFNYQECSTTSNADSKIDSQSSNEITQEFLQDIMPQYLNPGDVLVCETGSVQFGVRDYRFPSNVKYVSQGFYLSIGMALPASLGVGIGMQDYPMSHIPNPEEIEYEPKLILFEGDGSAQMTIQELSTMLHNNVKMEIFLWNNDGYTIERAIKGPTRSYNDIAPWNWTKMFEAFGDGLGSKHKTRNQVYSTREEFLTRLREKKDTKHNDPACQIELLEVKMGVLDFPEQLKCMVSAAMYNKKKEQSMSN

SEQ ID NO: 40636 - protein, 604 aa, Candida albicans SC5314
MSLDYTKDRKTTITFDEKQLPGTPPESITTLTDLNNNNNNNNDKSKDHEIKPQELADKLSDAHSNLLPKSQIIIILSTLALASIVSFMDQTGITVGLSEIGKDLNAQQSINWAGSASLLANTVCQVLFGRMSDIFGRKNVIMTCLMILVIGDIACSVARNGIEFFVFRALAGIGNGGVSSLSMVILSDIVSLKDRGKYQGILGASVGIGNAIGPFIMGAFIKKSSWRSYYYFLAPLGFVVNVILYFCLKNNKKLNDVISRKEKFMSLDYTGILAATASLTLILIPLNGGGSTYSWDSNIVIIMFTVGGVLLIVFLGIEWKFAKLPMIPLRLFKSPSLCLLYLATFCFGATYFSFTYYMPYHFQMIKGKDEIGTAIFLLPLVLMQALSSIICGRIISFTGHYFYVVQAGYLLWLLSVCLLILWKKTLPDGIHILILFIMGTGVGAAFQPSMVAVQANCKKAERAVAISTRNVLRSLGGTVGIAIGSTIVSNSVLKELKPLNSSNSNLSPETINYIKGHIYEKIPLTNLNNQQINEIKDIYTAALRNYYYFLIPLMAICVITAMFVKDNGLKALDEQTPIDTKDFIERKKDLESSASSMTVKCENV

SEQ ID NO: 40637 - protein, 492 aa, Neurospora crassa
MAEPEIVPVTEWPDWHANPNGGDPFTQNLNSPYDKGDLCWMLVCTALCWQITPAIGFLYAGMHRRKAALTMVLQSLFCACACGIQFWIYGYSLYQARTTNPILGDLSLAVFRNVLAQPSMANSDIPDILYAAFGFTFVSCTAMILAGAMLERGRLLPSMLFLLCWTTFVYYFIAYWEWNPSGWLYKLGVYDFAGSGPVHIASGFGALAWSLMLGPRVADSDVVDRKKLVHHKPHSPLLMCLGTVFIWFGWFAFNGGSTPNLSLRSIYAIVNTNLAGCGGGVGWVLIDYLYKRKFSLVGFCSGIIAGLVGITPAAGYVPVYVASLIGFLTSATCYYAAKYKHLLSVDDGLDIFAIHGVGGYVGDLLTGIFADNFVPALDGYSGSSYAGGWWNRNFRQLGLQFAGATTAAAWSFVVSCILLFIINKIPGLHLRASEDSEIRGLDIKYLEDVDEEGFYMNECILHGRTPPRCSGSLKAPTSVTEPVGVEGGEKRD

SEQ ID NO: 40638 - protein, 175 aa, Aegilops tauschii
MAPTVMASSATSVAPFQGLKSTAGLPVSRRSNGASLGSVSNGGRIRCMQVWPIEGIKKFETLSYLPPLSTEGLLKQVDYLIRSKWVPCLEFRKVGFIFREHNVSPGYYDGRYWTMWKLPMFGCPAPTQVIPEVEEVRKEYPDPYCRIIGFDNMRQVQSVSFIASKPPGCEESGKA

SEQ ID NO: 40639 - protein, 394 aa, Arabidopsis thaliana
MASLDSHVLMKLGSLFLSTLFVSIVSSESQCRNFESIISFGDSIADTGNLLGLSDHNNLPMSAFPPYGETFFHHPTGRFSDGRLIIDFIAEFLGLPYVPPYFGSTNGNFEKGVNFAVASATALESSFLEEKGYHCPHNFSLGVQLKIFKQSLPNLCGLPSDCRDMIGNALILMGEIGANDYNFPFFQLRPLDEVKELVPLVISTISSAITELIGMGGRTFLVPGGFPLGCSVAFLTLHQTSNMEEYDPLTGCLKWLNKFGEYHSEQLQEELNRLRKLNPHVNIIYADYYNASLRLGREPSKYGFINRHLSACCGVGGPYNFNLSRSCGSVGVEACSDPSKYVAWDGLHMTEAAHKSMADGLVKGPYAIPPVDWSCLSSRSKKKEVVGNTIFFDE

SEQ ID NO: 40640 - protein, 450 aa, GIBBERELLA ZEAE PH-1
MVYLSQTKGLAAFVYGLALLGTPVSSSQTSLTPRQKKNGASPYTDTVSKYVDSLDKELWSINKNIHDNPELGYKEFKAHKLLTTYMTKQKGWKVTDTVGGIDTAFMAVFEGSGDGPVVSFNAEYDALEGLGHACGHNLIATASLGGALAAAEIMREEKLGGKVILFGTPAEESFGGKVKMLEAGVFKDAKIDISLISHPSNAPDTPFMLAQSTDRFDVTYTGREAHAAAGPWEGINAQDALLLANSALSYMRQQMRTTDRVHGIIHSAGSRINVIPAEASGSYQLRSANEEQLEQLSDRVYNCFKAGAIGTGAKMNFTMRPYGYANMNSNDGLAASYTRWFEELGGDLPDAEVDKMRSPGGSTDQGNISQDFPTISPMFQITFENGTVPKNGPHTAPFEVAAGSKAAFEKSLMVAKSLAGVAVDVLTVDGLLDEIKDEFKKTKSPARRRR

SEQ ID NO: 40641 - protein, 191 aa, uncultured bacterium 441
MTEEQTFGKILIIDDEKDNTEIIKDILEDVNYSTMLARSAAEAKVVLAANHFDLILMDVWMPGQDGISLLSEWHSEGFDTPVVMMSGHAEPSDIVKAMKLGAVDFLKKPLHDFLPILRNIMTPDKSEQEIQHVSGINYSLKLKEARNIFESQYLVHHLDANDNNIAVVAEIAGLERTTLYRKLKDLGIDKK

SEQ ID NO: 40642 - protein, 260 aa, Thermobifida fusca YX
MARVRGPFVLVDGRGPAVVLRMHLHGQGRGRLRGARRVGGVLSTSRLQLGLVGRPAPPPPVTRNTLNKVEFMGLKFGDDHRRKAARPPHLNPPPPGGHQRVRGGTDMALPVVRSSQPTTGWDPFRELNELHTQLHRWMDSVLERTSGLTADPLSWSPLADLSETEDAYLVEVEVPGVSREDISIDLSGTELVITGERKEREREGWFRHRTRSVGRFHYAVTLPRDIDPDGVDATLSQGVLTVRIPKSKALKPRRIAITER

SEQ ID NO: 40643 - protein, 667 aa, uncultured bacterium 441
MNFDQNLIAPALGVLGLLIVVIIYQWITKQDGGSGAVKKIGEQIHIGAIVFMKREYKMLSIFALVLLVLLYIFLGAASALCFVVGALTSATAGYIGMNTATIANVRTAQAAHDSGSSAALTVAFFGGSVMGLSVAALGLLGLGGLYYFFGAEHSEALHGFAMGGSVVALFSRVGGGIFTKSADVGADLVGKIEAGIPEDDPRNPAVIADNVGDNVGDIAGMGSDIFESYCGSMIATIAIASTLSAMALDMLGGNRSELMFLPLALASLGLVCSIIGIIFVKLSSNKSPESALRMGTIGSAVLFIVTSYFLISSLDVSNNIWAAVLMGSIGGIIIGLVTEYYTAGKPIRDIAEAGQTGSATVMIKGLSVGMQSVVVPVLMICLIIYVSNLFVGLYGVGIAAIGMLATVGMTMAIDAYGPIADNAGGIAEMAGLGEDTRNITDSLDELGNTTAAIGKGFAIGAAALAALAIITAYTETVAANSSDFLLQLNSAEVLIGLFIGGTIPFLIASLTMTAVGDAAFEMIEEVRRQFKEIKGLLDGKAEPDTAKCVDIATTAALKKMILPGVIAVAAPVLVGFLISPEALGGMLGGALLGCVLMALMMANAGGAWDNAKKHVEKGNFGGKGTDVHAATVVGDTVGDPFKDTSGPSMNILINVMAIVSLVIAPLL

SEQ ID NO: 40644 - protein, 878 aa, Arabidopsis thaliana
MLFILTRCTRLLQFHKESWGQEEDAVQLRQSGVLHSADKRDPTGEVRDGKGSSTANALKVPSTKKAYSQEQRGLNWIEGFFVRPAPLSSPYNETSKDSESPANIDKMSSWKRLPSPASKGVQEAAVSKEQNDRKVEPPQVVKKLVAISDDMAVAKLPEVSSAKASQEHMSKNRHNISWGYWGHQSCISEESSIICRICEEEIPTTHVEDHSRICALADKYDQKGVGVDERLMAVAVTLEKITDNVIQKDSLAAVESPEGMKISNASLTEELDVLSPKLSDWSRRGSEDMLDCFPETDNSVFMDDMGCLPSMSCRTRFGPKSDQGMATSSAGSMTPRSPIPTPRPDPIELLLEGKGTFHDQDDFPQMSELADIARCAANAIPVDDQSIQLLLSCLEDLRVVIDRRKFDALIVETFGTRIEKLIQEKYLQLCELMDDEKGTIIDEDAPLEDDVVRSLRTSPVHLRDRISIDDFEVMKSISRGAFGHVILARKNTTGDLFAIKVLRKADMIRKNAVESILAERDILINARNPFVVRFFYSFTCSENLYLVMEYLNGGDFYSMLRKIGCLDEANARVYIAEVVLALEYLHSEGVVHRDLKPDNLLIAHDGHVKLTDFGLSKVGLINNTDDLSGPVSSATSLLVEEKPKLPTLDHKRSAVGTPDYLAPEILLGTGHGATADWWSVGIILYEFLVGIPPFNADHPQQIFDNILNRNIQWPPVPEDMSHEARDLIDRLLTEDPHQRLGARGAAEVKQHSFFKDIDWNTLAQQKAAFVPDSENAFDTSYFQSRYSWNYSGERCFPTNENEDSSEGDSLCGSSGRLSNHHDEGVDIPCGPAEFETSVSENYPFDNFSFKNLSQLAYINYNLMSKGHKDETQPSLQRR

SEQ ID NO: 40645 - protein, 638 aa, Magnaporthe grisea 70-15
MARIRHRGLKPGGGQASMMSSVINLLNTIVGAGTLAMPSALSHMGITLGTAVIIWSGLASAFGLYLQSRCARYIDRGHSSFFALSQLTYPNAAVFFDAAIAIKCFGVGVSYLIIIGDLMPGVARGLVSDTGYGDGADVLPPYMLDRNFWITAFMLVIIPLGFLRRLDSLKYTSIIALVSIGYLIILVVYHFAAESHPNRGQVHYVTWEGPVSVLGAFPVVVFAYTCHQNMFSILNELKDGSPGSVVGVIGTSIGSAASIYILVAITGYLTFGNLVVGNIISMYPASIASTIGKAAIVVLVMFSVPLQIHPCRASLDAVLKWRPNRNNSAGGAHPDSTLIPPASSANDSHGSPTTPMSDLRFAILSTIIIVCSYATALTVSSLDRVLAYVGSTGSTAISFILPGLFYYKISDPNSIHHQRLTKDEDDAEDDNLDASTDEENGNLDPAGAGLLESVASLRSGMSAASRPRGTRWRRRLRWDLEHIEHGLLRKMALGLAIYGMCVMTVCLIMNTFFVHTKDLNADVVFSRTSSRLLDPVGISGLAGVSRYPSQGHGAATDVGSKTLDAGGSRDANLLHFRVGDDHPTSLKPARRPRRLLEAAECAAFVETGIRTPDTPPLRVQWFFFFLYWGRGSVRRQRR

SEQ ID NO: 40646 - protein, 470 aa, Candidatus Blochmannia floridanus
MSIQIETQVLVLGSGPGGYSAAFRCADLGINTILVERYPNLGGVCLNVGCIPSKALLHISKLIQTNSDLNEFNISKNITNIQLDINKIRLWKNDIIKKLSNNLNSIATAKRNIKIIYGFGTFINKHTLQVSCDKEIIKVIFDYAIIATGSHPTSLPFSPNDHRIWNSTDALELKFIPEKLLIIGSGAIGLEMSTVYHSLGSKVDLMEASDQIMPILDKDIINLFSKNLIKKSINCTVNTQVHAFNSKPNGIDVITTNKLDPNTKKTHRYDAVLIAIGRFPNSKELNLDGIGIQTNKNGFISVDKQMRTNISNIFAIGDIVGNPMLAHKSIHEGHIVSEVISGKKYYFDSTVIPGVIYSDPEIAWVGYTEKEAQTKNIKYASVTFPWNSLGKAITSNYTEGITKLIFDKNTHRIIGGSVIGLHASEIIGEIALAIEMGCDVEDITLTIHAHPTLYESIELAASIYNKSINT

SEQ ID NO: 40647 - protein, 276 aa, Mesorhizobium mediterraneum
WGFDGSSTMQAEGHSSDCVLKPVAIYPDPARTNGVLVMCEVMMPDGVTPHASNKRATILDDEGAWFGFEQEYFFYKDGRPLGFPESGYPAPQGPYYAGVGYSNVGSVARQIVEEHLDLCLAAGINHEGINAEVAKGQWEFQIFGKGSKKAADQMWMARYLMQRLTEKYGIDIEYHCKPLGDTDWNGSGMHANFSTAHMREVGGKAYFEALMAAFDKNLMDHIAVYGPDNDKRLTGKHETAPWNRFSYGIADRGASIRVPHSFINNGYKGYLEDRRP

SEQ ID NO: 40648 - protein, 276 aa, Mesorhizobium tianshanense
WGFDGSSTMQAEGHSSDCVLKPVAVYPDPARTNGVLVMCEVMMPDGVTPHASNKRATILDDEGAWFGFEQEYFFYKDGRPLGFPESGYPAPQGLYYTGVGYSNVGSVARQIVEEHLDQCLAAGINHEGINAEVAKGQWEFQIFGKGSKKAADQMWMARYLMQRLTEKYGIDIEYHCKPLGDTDWNGSGMHANFSTAYMREVGGKDYFEALMAAFDKNLMDHIAVYGPDNDKRLTGKHETAPWNRFSYGIADRGASIRVPHSFINNGYKGYLEDRRP

SEQ ID NO: 40649 - protein, 276 aa, Mesorhizobium ciceri
WGFDGSSTQQAEGHSSDCVLKPVAVYPDPARTNGVLVMCEVMMPDGVTPHASNKRATILDDEGAWFGFEQEYFFYKDGRPLGFPESGYPAPQGPYYTGVGYSNVGSVARQIVEEHLDLCLAAGINHEGINAEVAKGQWEFQIFGKGSKKAADQMWMARYLLQRLTEKYGIDIEYHCKPLGDTDWNGSGMHANFSTAYMREVGGKAYFEALMAAFDKNLMDHIAVYGPDNDKRLTGKHETAPWNRFSYGIADRGASIRVPHSFIKSDYKGYLENRRP

SEQ ID NO: 40650 - protein, 276 aa, Mesorhizobium loti
WGFDGSSTMQAEGHSSDCVLKPVAVYPDPTRTNGVLVMCEVMMPDGVTPHASNKRATILDDEGAWFGFEQEYFFYKDGRPLGFPESGYPAPQGPYYTGVGYKNVGDVARQIVEDHLDLCLAAGINHEGINAEVAKGQWEFQIFGKGSKKAADQMWIARYLLLRLTEKYRIDIEFHCKPLGDTDWNGSGMHANFSTAYMREVGGKAYFESLMAQFDKNLMDHIAVYGPDNDKRLTGKHETAPWNKFSYGIADRGASIRVPHSFVQNDYKGYGEDRRP

SEQ ID NO: 40651 - protein, 276 aa, Bradyrhizobium japonicum
WGFDGSSTQQAEGHSSDCVLKPVAVFPDAARTNGVLVMCEVMMPDGKTPHASNKRATILDDAGAWFGFEQEYFFYKDGRPLGFPSSGYPAPQGPYYTGVGFSNVGDVARKIVEEHLDLCLAAGINHEGINAEVAKGQWEFQIFGKGSKKAADEMWMARYLMLRLTEKYGIDIEFHCKPLGDTDWNGSGMHANFSTEYMRTVGGKEYFEALMAAFDKNLMDHIAVYGPDNDKRLTGKHETAPWNKFSYGVADRGASIRVPHSFVNNGYKGYLEDRRP

SEQ ID NO: 40652 - protein, 276 aa, Rhizobium tropici
WGFDGSSTMQAEGRSSDCVLKPVAIYPDPARTNGALVMCEVMMPDGVTPHPSNSRATILDDEDAWFGFEQEYFFYQDGRPLGFPESGYPAPQGPYYTGVGYKNVGDVAREIVEEHLDLCLEAGINHEGINAEVAKGQWEFQIFGKGSKKAADQIWMARYLLLRLCEKYGIDIEFHCKPLGDTDWNGSGMHCNFSTKFMREVGGKAYFEALMAQFDKNLEAHISVYGPDNHLRLTGKHETAPWNKFSYGVADRGASIRVPHSFIKNDYRGYLEDRRP

SEQ ID NO: 40653 - protein, 276 aa, Rhizobium tropici
WGFDGSSTMQAEGRSSDCVLKPVAIYPDPARTNGALVMCEVMMPDGVTPHESNSRATILDDEDAWFGFEQEYFFYQDGRPLGFPESGYPAPQGPYYTGVGYKNVGDVAREIVEEHLDLCLEAGINHEGINAEVAKGQWEFQIFGKGSKKAADQIWMARYLLLRLCEKYGIDIEFHCKPLGDTDWNGSGMHCNFSTKFMREVGGKAYFEALMAQFDKNLDAHIAVYGPDNHLRLTGKHETAPWNKFSYGVADRGASIRVPHSFIKNDYKGYLEDRRP

SEQ ID NO: 40654 - protein, 276 aa, Rhizobium etli
WGFDGSSTMQAEGRSSDCVLKPVAIYPDPARTNGVLVMCEVMMPDGVTPHPSNARATILDDEDAWFGFEQEYFFYQNGRPLGFPEQGYPAPQGPYYTGVGYSNVGDVAREIVEEHLDLCLAAGINHEGINAEVAKGQWEFQIFGKGSKKAADQIWMARYLLQRLTEKYGIDIEYHCKPLGDTDWNGSGMHCNFSTKYMREVGGKAYFEALMAQFEKNLMDHINVYGPDNDKRLTGKHETAPWNKFSYGVADRGASIRVPHSFVKNDYKGYLEDRRP

SEQ ID NO: 40655 - protein, 473 aa, Ralstonia metallidurans CH34
MTTESQAQCPFQTAKSPPPAGSPLPHPYGTWPPGPAAGLTGWHLLRRMSRDLLGTLGEWQQTYGDVVHLRMWPEHAVVVTDPQLVRELLVTHHDSLIRWERGTRVFSRVHGHSVLTAEGDAWSRKRQALQPGFMPKAVHGFVPGIVEIVDKGLATWPTRVADWPVESALTSLTMDVIVRMMFSDEIGEDARVAECAVRAISEAANADFYWPASLPDWVPWKRARRRALHTLRDLIERHLQARLRMRTDTWPDDLLSRLLCLHRDDATAWPLQAVRDECMTTFLAGHETTAATLTWWAWCMASNPSAQDAARAEVTHVLRGQAPTADSRQALRQVVQTITESMRLYPVAPVLISRRAVRPITLGPWRLPARTLFMLPLQLMHHDPRLFPEPERFQPDRFSTGSPQAPRGAYMPFGTGPRVCLGQHLATAEMTVIAAMLLQRYKLSVPEGAAHPRPLLNVTLRPDQPLWLAVTPI

SEQ ID NO: 40656 - protein, 470 aa, Oryza sativa
MASRRQWGAGAGAVDVPAQERKGGKAATDHLLRAFFAVFFVLEGLSWRRRRRRDGEGVFLLRYVACLLCLQAAKIARRPKTTTVVAQQPPRIRRALADVSNLVNGRAALPVVNRQKAAAAAADKCRKPIKQRNENNKAAKPEVIVISSDSEKHKKNPAQRAASRRAPIQTLTSILTKCSRASDGVISPKKELIYDIDASDSHNELAVVDYVEDIYRFYRNTENTYRPLCTYMVSQTEINERMRAILTDWLIEVHYRLMLMPETLYLTVYIIDQYLSLENVPRKELQLVGVSAMLIACKYEETWAPLVKDFLVISDNSFSRQQVLSTEKSILNKLQWNLTVPTMYMFILRYLKAALGDEELEHMTFFYAELALVQYSMLFFAPSVIAAAAVYAARCTLGLSPLWSDLLEYHTGLAEPQLLECARRLVSLHAAAPESRQKVVYKKYASPKLGAVSLHSPAKKLLPPPSPVAA

SEQ ID NO: 40657 - protein, 231 aa, Beta vulgaris subsp. vulgaris
MAVTFSDLSSPAGLDSLDAYLLSRSYITGYQASKDDLTVFSAVPKASLASYVNVSRWYKHIDALLRISGVSGEGSGVTVEGNAPASDVATPPAADSKASAADDDDDDDVDLFGEETEEEKKAAEERAAAAAAKPAKKKESGKSSVLLDVKPWDDETDMKKLEEAVRSVQQEGLTLGASKLVPVGYGIKKLTIMMTIVDDLVSVDNLIEDYLTVEPINEYVQSCDIVAFNKI

SEQ ID NO: 40658 - protein, 273 aa, Zea mays
  misc_feature (223)..(223): Xaa can be any naturally occurring amino acid
  misc_feature (232)..(232): Xaa can be any naturally occurring amino acid
  unsure (1)..(273): unsure at all Xaa locations
MTNLSAMAASQSYVIRFDGHFDEPSPSSAGAEPPGPQPPFAGRMISLEREHQVIVAALLHVVSGYATPPPQVFTPPPAAARCQVCGMERCLGCEFFAAGEGALGGGAEKAAATGGAAALAAGQRRRRKKKNKYRGVRQRPWGKWAAEIRDPRRAVRKWLGTFDTAEEAARAYDQAAIEFRGPRAKLNFPFPEQPPTGHDEPISSNGDASAAARSSDTTPSPSXCSADAEERXQPEWPSAGQEAGDQLLWEGLQDLMRLDEGEPWLHPASSAWN

SEQ ID NO: 40659 - protein, 420 aa, Thermobifida fusca YX
MTRRVVITGIGVIAPGGIGTQAFWNLLTEGRTATRPISLFDASVFRSRIAAEVDFHPEEHGLTAQQARTMDRAAQFAVVATREAMADSGLTIDRPDRVGVVVGSAVGASTSLENQYRLSSDDGQLDPVRYDPAVTDLYRHFVPSSFATDVAWEVGAEGPATVVSTGCTSGLDSVGYAADLVREGIVDAVVVGSTDAPLTPITSACFDAIKATSPRNDTPATASRPFDRTRNGFVLGEGCAMFVIEEREHARARGARIYGELAGYATRSNAYHMTGLRADGHEMAEAIRVALHEARVNPDDIDYINAHGSGTKQNDRHETAAFKKALGSHAYRTPVSSIKSMIGHSLGAIGSIEIAACLLAMRDNIVPPTANLTEPDPECDLDYVPITAREHRVDTVLTVGSGFGGFQSAMVLTTADRRLP

SEQ ID NO: 40660 - protein, 402 aa, Thermobifida fusca YX
MTTTVVTGLGVIAPTGLGVDDYWKATLEGRNGIAPITKFDASGYPSSLAGQVVGFHAADHLPGRLLPQTDHMTRMALAAAQWAWDDAGLDPAQLPEFSAGVVTASSSGGYEFGERELRNLWAKGASYVSAYQSFAWFYAVNTGQISIRHQMRGPTGVLVSDQAGGADAIAHARRQIRKGARVMLAGGVDSSLCSWGWIAHLASGRVSTADDPRRAYLPFSADARGHVPGEGGALLVLEEETAARARGARIYGVVAGHAATLDPPPGSGRPSTLEAALRGALADADVHPDEVDVVFCDGAAIPELDRIEAAAINAVFGEGAVPVTVPKTMTGRLFSGAVALDAAAALLSIRDGVIPPTINATAAPDLGLDLVTETPRSLPVRIALIVARGIGGFNSALVLRAA

SEQ ID NO: 40661 - protein, 294 aa, Triticum aestivum
MHPTRRELSLMVDLQAAALVISSGRPGSGINAEPREVEKLVITPSKKELGLAFKGDQKMVLEALEAMGETEALGMKAALESKGDVEFKVCTLGKDVTIKRNMVSINMEKKKEHQRKFTPSVIEPSFGIGRIIYCLFEHCFYQRTGKTDDEQLNVFRFPPLVAPIKCTVFPLVKVEKFDVVAKKISKALTTAGISHIIDITGTSIGKRYARTDEIGVPLAITVDSTTSVTVRDRDSKDQIRVEVDQVALVVKEVTDGQSTWADIMWRYPAHTALAPDEEEASTNLKGTVEESSMG

SEQ ID NO: 40662 - protein, 283 aa, Azoarcus sp. EbN1
MSQALSFPVPFAVGSIDQYIQSVNRIPLLTEQEEVSLATRLRNEGDLEAARGLVMSHLRLVVAISRGYLGYGLPHADLIQEGNIGLMKAVKRFDPDRGVRLVSFAIHWIKAEIHEYILKNWRLVKIATTKAQRKLFFNLRSLKQDTGTLNRDEVVAVAKQLGVKPEEVVEMETRLTGRDIQLEGGPDDDEHHFAPIAYLPDPNAEPSEVLEQAQLARLQDEGLSDALASLDDRSRTIVKRRWLTEGDSATLHELAAEYGVSAERIRQIEAKAMQKMRGLLAPA

SEQ ID NO: 40663 - protein, 550 aa, Candidatus Blochmannia floridanus
MNVNYIFVTGGVVSSLGKGIVTASLASVLEARGLDVTIIKLDPYINVDPGTMSPIQHGEVFITEDGAETDLDLGHYERFIKTKMTRYNNCTTGRIYSNVLKRERRGDYLGSTVQIIPHVTSFIKQWLITHSKSYDVLLVEVGGTVGDIESLPFLEAIRQMAIDVNRYHTLYIHLTLVPFISMTGELKTKPTQHSVKELLSIGIQPDILICRSDHLIGDSERKKISLFCNVSKKAVISLQNVNSIYKIPLMLQDQGLDEYICKYFNLNCPKADLSDWKQVVYYQNNPKGTVTIGIVGKYIRLTDAYKSVIEALQHAGLKNRFFVKICFIDAQDLETLSVKKMLKGLDGILVPGGFGYRGVEGKILSAQYARENNIPYFGICLGMQVALIEFARHVVGMEDANSTEFVNNCKYPVISEITGYQCTNNNNDIIQYHDNVDFSRSTMRLGSQVCHLIEGSLTQQMYGKKIIYERFRHRYEINISLFKEIEYAGLSGVGYSKNNNFIEIIECKNHPWFIGSQFHPEFNSTPRDGHPLFVGFINAAIQYQCKIIGS

SEQ ID NO: 40664 - protein, 668 aa, Neurospora crassa
MKPASRLFYLSLFALWSPEAQCKSDESCAISPKAIVSDACASYSTLEQLNRDIKPALEDLTRTTDFFSHYRLNLFNKECPFWNDENGMCGNIACAVETLDNEEDIPEVWRAKELGKLEGPRAKHPGKSVQKEEPKRPLQGKLGEDVGESCVVEYDDECDDRDYCVPDDEGASSKGDYVSLLRNPERFTGYAGDGAKQVWDAIYRENCFQKSSFPKSASLGDTYSVPKNPAAQDFRAVMQAAGRQHMLEQQREQNPLVPFVTKTGLESEDECLEKRVFYKIVSGMHASISTHLCWDFLNQTTGQWQPNLSCYINRLHKFPERISNLYFNYALLTRAVAKLGPYLSSHEEYTFCTGDPAQDADTRAKVLAVTSKAANTVPGPVFDESIMFKNGEGPSLKEDFRNRFRNISRLMDCVGCDKCRLWGKLQTAGYGTALKVLFEFANNDTSATSSETDEIPFKLKRTELVALFNTYARLSSSLDAIQKFRAMVEESEEGQQPQSHEQIEGSENSGAHHIPDRAKKPRHVIVPTPDAADHAEASDTNTATTAVDEAKAAGVTPAPKVEHQQQVEVDNNDDDDDDDEFHEFQRQPQQPDTDPNFVYKKRTLKDDFENEFRAVFAAFKLVIRSYLNLPALIYEITITELKRFWQFYVGLPVMPRTWEFRRPSLDEL

SEQ ID NO: 40665 - protein, 567 aa, Oryza sativa
MASAPPVQEEPLQPGTNHFRSLLAAAVRSISWSYAIFWSISTSCPGVLTWNDGFYNGVVKTRKISNSADLTAGQLVVQRSEQLRELYYSLLSGECDHRARRPIAALSPEDLADTEWYYVVCMTYSFQPGQGLPGKSYASNASVWLRNAQSADSKTFLRSLLAKTIICIPFTSGVLELGTTDPTFIIAYACHNMEQVLEDPKLVNRIVAYFQELQFPICLEVLMSTSPSPNETEDADIVSEGLITHNAIEEGQMVVSDECVSNANRDPITMEIDELYSIYEDLDLDMDLDLDTVRFLEDNGWPVNPSSFQLVPASSTEAVAAAAAANDVDGVANSQVSCFMAWKSAKSNEMAVPVVTGIESQKLLKKVVDCGARMSTGRGSRAALTQESGIKNHVISERRRREKLNEMFLILKSIVPSIHKVDKASILEETIAYLKVLEKRVKELESSSEPSHQRATETGQQRRCEITGKELVSEIGVSGGGDAGREHHHVNVTVTDKVVLLEVQCRWKELVMTRVFDAIKSLCLDVLSVQASAPDGLLGLKIQAKFACSGSVAPGMISEALQKAIGG

SEQ ID NO: 40666 - protein, 274 aa, Prochlorococcus marinus str. NATL2A
MSDFLAAALQLTSTSDIDSNLNAAEEQIELAARRGADLVGLPENFAFLGEDQKKLKIASSIYEKCNSFLVTMARRYQVVLLGGGFPVPAGDGIRTLNRAELFGKDGQSLARYDKIHLFDVDLPEGNTYRESETIVSGSESPPVVDVPGLCKIGLSICYDVRFPELYRDLVNKGADLLMIPAAFTAFTGKDHWQVLLQARAIENTAYVVAPAQTGRHYGRRQSHGHAMVIDPWGTVLADAGVVQGAAIAPADKERVERIRGQMPSLKHRKTELFI

SEQ ID NO: 40667 - protein, 529 aa, Pleurotus ostreatus
MFPGARILATLTLALHLLHGTHAAIGPTGDMYIVNEDVSPDGFTRSAVVARSDPTTNGTSETLTGVLVQGNKGDNFQLNVLNQLSDTTMLKTTSIHWHGFFQSGSTWADGPAFVNQCPIASGNSFLYDFNVPDQAGTFWYHSHLSTQYCDGLRGPFIVYDPSDPHLSLYDVDNADTIITLEDWYHVVAPQNAVLPTADSTLINGKGRFAGGPTSALAVINVESNKRYRFRLISMSCDPNFTFSIDGHSLQVIEADAVNIVPIVVDSIQIFAGQRYSFVLNANQTVDNYWIRADPNLGSTGFDGGINSAILRYAGATEDDPTTTSSTSTPLEETNLVPLENPGAPGPAVPGGADININLAMAFDVTNFELTINGSPFKAPTAPVLLQILSGATTAASLLPSGSIYSLEANKVVEISIPALAVGGPHPFHLHGHTFDVIRSAGSTTYNFDTPARRDVVNTGTDANDNVTIRFVTDNPGPWFLHCHIDWHLEIGLAVVFAEDVTSITAPPAAWDDLCPIYDALSDSDKGGIA

SEQ ID NO: 40668 - protein, 367 aa, Triticum aestivum
MATPQIYRKTLLPVLLLLAAAALYPAAADGDEVLALTESTFEKEVGQDRGALVEFYAPWCGHCKKLAPEYEKLAASFKKAKSVLIAKVDCDEHKSVCSKYGVSGYPTIQWFPKGSLEPKKYEGQRTAEALTEYVNSEAATNVKIAAVPSSVVVLTEETFDSVVLDETKDVLVEFYAPWCGHCKSLAPIYEKVASVFKQDEGVVIANLDADKYTSLAEKYGVSGFPTLKFFPKGNKAGEEYESGRELDDFVKFINEKSGTSRDSKGQLTSEAGLVASLDALVKEFHSAADDKRKEILSKIEEEAAKLSGPAVKHGKIYVNVAKKILQKGSDYTKKETERLHRLLEKSISPSKADEFAIKKNILSAFSS

SEQ ID NO: 40669 - protein, 314 aa, Saccharophagus degradans 2-40
MGSRMTNKLEQLKQFSSVVADTGDIEAIKRYQPLDATTNPSLLFKAAQLPQYAPLLEKALAESSSIDDACDRLAVAIGCEILKIVPGRVSTEVDARLSFDKNASIDKAHRLIDMYEANGIGKERVLIKLASTWEGIRAAEQLQKEGIDCNLTLLFSFSQAAACADAGVFLISPFVGRILDWYKANTDKKEYLPHEDPGVISVSRIYNYYKQHDYKTVVMGASFRNTGELEELAGCDRLTISPDLLEALAQDTGKLERKLSPENSGEPIAKLIENESQYRFSNNEDAMATHKLAEGIRNFAKDQINLINLLKSKA

SEQ ID NO: 40670 - protein, 376 aa, ASPERGILLUS NIDULANS FGSC A4
MPSGSVLVTGGTGYIGSFTTLALLEAGYKVVVADNLYNSSAEALNRIELISGKKAEFAQLDVTDEAAFDKVFEAHPDIDSVIHFAALKLYPLKAVGESGEKPLDYYHVNVYGTICLLRSMVRHNVTNIVFSSSATVYGDATRFPDMIPIPEHCPLGPTNPYGNTKFAIELAITDVINAQRNNAKKAGNETEAAKWNGALLRYFNPAGAHPSGIMGEDPQGVPYNLLPLLAQVATGKREKLLVFGDDYASHDGTAIRDYIHILDLADGHLKALNYLRANNPGVRAWNLGTGRGSTVYEMIRAFSKAVGRDLPYEVAPRRAGDVLNLTSNPTRANTELGWKAQRTLEQACEDLWLWTKNNPQGYRQQPPAELLEQLKK

SEQ ID NO: 40671 - protein, 207 aa, Brassica napus
  misc_feature (40)..(40): Xaa can be any naturally occurring amino acid
  unsure (1)..(207): unsure at all Xaa locations
MAAFEESSDLDAIQEHLLEDFLVADGFMGDFDFNASFVSXGLWCIEPVMNQVPKQEPDSPVLDPDSFVREFLQVEAESSSEQNSSPHETDQSVSPRKEAKRLEEEEEPRHYRGVRRRPWGKFAAEIRDPAKKGSRIWLGTFESNVDAARAYDCAAFKLRGRKAVLNFPLDAGKYEAPVNLGRKRKRSDVQEELQRSQSNSSSSSSDL

SEQ ID NO: 40672 - protein, 143 aa, Prunus persica
QEWPFFRVSIDLIEMVFAKADPGIASLYDKLLVSEDLWSFGERLRANYEETKSLVLQVAGHRALLEGDPYLRQRLLLRDSYITTLNVCQAYTLKQIRDPNYHVKVRPHLSKEYMETTSKPAAELVKLNPTSEYAPGLEDTLIL

SEQ ID NO: 40673 - protein, 381 aa, Cryptococcus neoformans var. grubii
MQIFVKTLTGKTITLEVESSDTIDNVKAKIQDKEGIPPDQQRLIFAGKQLEDGRTLSDYNIQKESTLHLVLRLRGGMQIFVKTLTGKTITLEVESSDTIDNVKAKIQDKEGIPPDQQRLIFAGKQLEDGRTLSDYNIQKESTLHLVLRLRGGMQIFVKTLTGKTITLEVESSDTIDNVKAKIQDKEGIPPDQQRLIFAGKQLDDGRTLSDYNIQKESTLHLVLRLRGGMQIFVKTLTGKTITLEVESSDTIDNVKAKIQDKEGIPPDQQRLIFAGKQLEDGRTLSDYNIQKESTLHLVLRLRGGMQIFVKTLTGKTITLEVESSDTIDNVKAKIQDKEGIPPDQQRLIFAGKQLEDGRTLSDYNIQKESTLHLVLRLRGGM

SEQ ID NO: 40674 - protein, 210 aa, Candidatus Blochmannia floridanus
MLFHYYMIKHINKYNDKNVMWHFYRINREDRERLHQHRSMILWFTGLSGSGKSTLASILEEKLYCRGVSTYSLDGDNIRHGLCKDLSFNSNDRSENIRRVGEVARLMVDAGLVVLVALISPYRIDRQIIRDMCIKDSFLEIFVDTPMLICKQRDPKGLYHQVDCKKIKNFTGIDSIYERPKQPDIYLDGRKTISELMNQLLDLVLVKIFK

SEQ ID NO: 40675 - protein, 276 aa, Rhizobium leguminosarum bv. viciae
WGFDGSSTQQAEGRSSDCVLKPVAIYPDPARTNGALVMCEVMMPDGVTPHASNARATILDDEDAWFGFEQEYFFYQNGRPLGFPEQGYPAPQGPYYTGVGYSNVGDVAREIVEEHLDLCLAAGINHEGINAEVAKGQWEFQIFGKGSKKAADQIWMARYLLQRLTEKYGIDIEYHCKPLGDTDWNGSGMHCNFSTKYMREIGGKAYFEALMAQFEKNLMDHINVYGPDNDKRLTGKHETAPWNKFSYGVADRGASIRVPHSFVKNDYKGYLEDRRP

SEQ ID NO: 40676 - protein, 599 aa, Ustilago maydis 521
MAPTQSERTPLLAGQQPRTSSTSRARPSFGASIGRPDLTAEEEDAIAQESAFSAIQGAAHGVDPNSSAFVPLDQSHFSIAGVPPAVEEEPEEPPLRADIWVIMGAMWIGSFLAALDGTIVATILSAVGSEFRVSKEVGWLGTSYLLTQTAFQPLYGRASDIFGRKPATLFASAIFLLGSLLCGLSQTFWQLCAARALAGIGGGGLTTMSTLVTSDLVSLKSRGTWQGLGNLVYATGAALGGPLGGALADGGLGWRWAFLVQVPLCVVHFAVVSWKIDIPAGPGSMIEKIKRIDALGSLSLVTSVTLILVGLSLGGNEREWSDKLVLGSLISGGVALVVFVLIERFVAREPLMPMAVLFNRTPGFVSIACWFITMSQFGIIFNVPNYFENVEQTTKQYAGLHLIPNAIIASTCSLGSGLIMARTGRYRKMLLLGGLAGFVGPLMMCFWFRGTSEAFYWLSMPWGGAAYGSTLTITLVALIASVDPKDMAAATGVTYLFRATGSVLGISLSSAILQNSLQKNLEKTDIPHKIIQLIRQDVSTIKTLSKPLRVAAIGAYEQSMHTVFIAIAAAGLFAFLALFFIEERDLPGKKPAVAAPARR

SEQ ID NO: 40677 - protein, 276 aa, Rhizobium galegae
WGFDGSSTMQAEGRSSDCVLKPVALYPDPARTNGALVMCEVMMPDGVTPHATNARATILDDEDAWFGFEQEYFFYQNGRPLGFPEQGYPAPQGPYYTGVGYSNVGDVAREIVEEHLDLCLEAGINHEGINAEVAKGQWEFQVFGKGSKKAADQIWMARYLLQRLTEKYGIDIEYHCKPLGDTDWNGSGMHCNFSTKYMREVGGKDYFEALMAAFDKNLMDHIAVYGPDNDKRLTGKHETAPWNKFSYGVADRGASIRVPHSFVKNDYKGYLEDRRP

SEQ ID NO: 40678 - protein, 361 aa, Escherichia coli
DLWHAPAPKNGQAVGTNTIGSSEACMLGGMAMKWRWRKRMEAAGKPTDKPNLVCGPVQICWHKFARYWDVELREIPMRPGQLFMDPKRMIEACDENTIGVVPTFGVTYTGNYEFPQPLHDALDKFQADTGIDIDMHIDAASGGFLAPFVAPDIVWDFRLPRVKSISASGHKFGLAPLGCGWVIWRDEEALPQELVFNVDYLGGQIGTFAINFSRPAGQVIAQYYEFLRLGREGYTKVQNASYQVAAYLADEIAKLGPYEFICTGRPDEGIPAVCFKLKDGEDPGYTLYDLSERLRLRGWQVPAFTLGGEATDIVVMRIMCRRGFEMDFAELLLEDYKASLKYLSDHPKLQGIAQQNSFKHT

SEQ ID NO: 40679 - protein, 189 aa, Candida glabrata CBS138
MANLRTQKRLAASVIGAGKRKVWLDPNETSEIAQANSRNAIRKLVKNGTIVKKAVTVHSRSRTREHALSKRNGRHTGYGKRKGTKEARLPSQVVWIRRLRVLRRLLAKYRDAGKIDKHLYHVLYKEAKGNAFKHKRALVEHIIQAKADAQREKALSEQAEARRMKNRAARERRAQRVAEKREALLKESA

SEQ ID NO: 40680 - protein, 330 aa, Bacillus licheniformis ATCC 14580
MKAIIHEGIKGLSGLKYTDVSDKTPGPGEVKIRLKAAGLNHRDLFLFQSRKAGDAPFIPGSDGAGMIEETGEGVRDLAVHTEVIINPSIGWEYTDSVPQVPDILGGPSDGTFAEHVIVPAKHVLKKPAHLSWEEAGVLPLSALTAYRALFTKGHLEKGEHILIPGAGGGVATNALLMAKAAGARVIVTSRSEEKRKEALRYGADFAIDSRGLWKESLDGERVDLILDSIGPATFANYFDVIKPNGRIVIFGASSGESIQLPLRSLFFPQISIIGTSMGSLEEFRQMIDFIERHSLKPVIDQVFPLSEAVPAFKRMKDGEQFGNIALQIDG

SEQ ID NO: 40681 - protein, 276 aa, Mesorhizobium huakuii
WGFDGSSTMQAEGRSSDCVLKPVALYPDPARTNGILVMCEVMMPDGVTPHESNSRATILDDEDAWFGFEQEYFFYKDGRPLGFPESGYPAPQGPYYTGVGYKNVGDVARKIVEEHLDQCLAAGINHEGINAEVAKGQWEFQIFGKGSKKAADQIWMARYLLLRLTETYGIDIEFHCKPLGDTDWNGSGMHCNFSTKFMREVGGKAYFEALMAQFDKNLMDHIAVYGPDNDKRLTGKHETAPWNKFSYGVADRGASIRVPHSFVKNDYKGYLEDRRP

SEQ ID NO: 40682 - protein, 276 aa, Sinorhizobium saheli
WGFDGSSTNQAEGRSSDCVLKPVAVYPDPVRTNGVLVMCEVMMPDGKTPHPSNSRATILDDEGAWFGFEQEYFFYKDGRPLGFPEQGYPAPQGPYYTGVGYKNVGNIARQIVEEHLDICLAAGINHEGINAEVAKGQWEFQVFGKGSKKAADEVWMARYLLQRLTEKYGIDIEWHCKPLGDTDWNGSGMHCNFSTAYMREVGGKDYFEALMAAFDKNLHEHIAVYGPDNHLRLTGKHETAPWNKFSYGVADRGASIRVPHSFVNNGYRGYLEDRRP

SEQ ID NO: 40683 - protein, 271 aa, Bacillus licheniformis ATCC 14580
MTAFWGEVIGTMLLIVFGAGVCAGVNLKKSLSHQSGWIVIVFGWGLGVAMAVYAVGGISGAHLNPAVTLGLAFVGDFPWEEVPSYILGQMIGAFLGAVLVFLHYLPHWKETEDQGAKLGVFSTGPAIPNTFANLFSETLGTFILVLGLLTIGANKFTDGLNPLVVGFLIVAIGISLGGTTGYAINPARDLGPRIAHFVLPIAGKGSSNWKYAWIPVLGPALGGSFAGVFYNAVFKGHITNTFWIVSVILVVILLGFYIHMKKQAVDQSVNI

SEQ ID NO: 40684 - protein, 87 aa, Brassica napus
  misc_feature (23)..(23): Xaa can be any naturally occurring amino acid
  unsure (1)..(87): unsure at all Xaa locations
MESLLSSSSLLSAAGGGLCLRKXNLKLLSLSGNRVLRCKVVAKPKSSNNLVTRLDGQESSSLFLLCSRHKTRSQANATTGQPEAFDP

SEQ ID NO: 40685 - protein, 276 aa, Sinorhizobium terangae
WGFDGSSTMQAEGRSSDCVLKPVAVYPDPVRTNGVLVMCEVMMPDGKTPHPSNSRATILDDEGAWFGFEQEYFFYKNGRPLGFPEQGYPAPQGPYYTGVGYKNVGDIARQIVEDHLDICLAAGINHEGINAEVAKGQWEFQIFGKGSKKAADEVWLARYLLQRLTEKYGIDIEWHCKPLGDTDWNGSGMHCNFSTAYMREVGGKEYFEALMAAFEKNLHEHIAVYGPDNHMRLTGKHETAPWNKFSYGVADRGASIRVPHSFVNNGYRGYLEDRRP

SEQ ID NO: 40686 - protein, 276 aa, Sinorhizobium fredii
WGFDGSSTNQAEGRSSDCVLKPVAVYPDPVRTNGVLVMCEVMMPDGKTPHPSNSRATILDDEGAWFGFEQEYFFYKNGRPLGFPEQGYPAPQGPYYTGVGYSNVGDVARKIVEEHLDICLAAGINHEGINAEVAKGQWEFQVFGKGSKKAADEVWMARYLLQRLTEKYGIDVEYHCKPLGDTDWNGSGMHCNFSTAYMREVGGKDYFEALMAAFDKNLQEHIDVYGPDNHLRLTGKHETAPWNKFSYGVADRGASIRVPHSFVNNGYKGYLEDRRP

SEQ ID NO: 40687 - protein, 547 aa, Pseudomonas aeruginosa
MAAKEVKFGDSARKKMLVGVNVLADAVKATLGPKGRNVVLDKSFGAPTITKDGVSVAKEIELKDKFENMGAQLVKDVASKANDAAGDGTTTATVLAQAIVNEGLKAVAAGMNPMDLKRGIDKATVAIVAQLKELAKPCADTKAIAQVGTISANSDESIGQIIAEAMEKVGKEGVITVEEGSGLENELSVVEGMQFDRGYLSPYFVNKPDTMAAELDSPLLLLVDKKISNIREMLPVLEAVAKAGRPLLIVAEDVEGEALATLVVNNMRGIVKVAAVKAPGFGDRRKAMLQDIAILTGGTVISEEVGLSLEGATLEHLGNAKRVVINKENTTIIDGAGVQADIEARVLQIRKQIEETTSDYDREKLQERLGKLAGGVAVIKVGAATEVEMKEKKARVEDALHATRAAVEEGVVPGGGVALVRALQAIEGLKGDNEEQNVGIALLRRAVESPLRQIVANAGDEPSVVVDKVKQGSGNYGFNAATGVYGDMIEMGILDPAKVTRSALQAAASIGGLMITTEAMVAEIVEDKPAMGGMPDMGGMGGMGGMM

SEQ ID NO: 40688 - protein, 664 aa, Zea mays
MVTGSMKHLVQVEPAREAAAEGGAPSAGPTYRCAAGGNAASPPAVPGLECCWDIFRLSVEKCPDNKMLGRREIVHGKAGSYTWLTYKQVYDTVLDVGSAIRSCGVGKGGRCGIYGANSPEWVISMQACNAHGIYCVPLYDTLGAGAVEFVLCHAEVQIAFVEEKKIGEMLKTFPNATKYLKTLVSFGKVDPGHKEIVEQNGLSIYSWEEFLQLGGKEKFELPPKEKDDICTIMYTSGTTGDPKGVLISNKSIVTIVSAVDEFLSNSNEQLNMDDVYISYLPLAHIFDRVIEEVFIRHGASIGFWRGDVKLLVEDIGELKPTVFCAVPRVLDRIYGGLQDKITAGGFLKKTLFNVAYKYKQGNMLKGNKHEEAAAMFDRLVFTKVKRGLGGRVRLILSGAAPLSRHVEEYLRVVTCSHVLQGYGLTETCAGSFVSLPNNMSMLGTVGPPVPYVEVRLESVPEMGYDALSSETPRGEICIRGDTLFSGYYKREDLTKEVLVDGWFHTGDIGEWQSDGSMKIIDRKKNIFKLSQGEYVAVENLENIFGQTPAVDSIWVYGNSFESSLVAVVNPNTQALERWAESNGVTGEFATICEDPRAREFILGELTKMGKEKKLKGFELIRAVHLDPAPFDMERDLITPTYKKKRPQLLKHYQTIIDGMYNSMK

SEQ ID NO: 40689 - protein, 276 aa, Sinorhizobium medicae
WGFDGSSTLQAEGRSSDCVLKPVAVYPDPVRTNGALVMCEVMMPDGKTPHASNTRATVLDDEGAWFGFEQEYFFYKNGRPLGFPEQGYPAPQGPYYTGVGYKNVGDVARQIVEEHLDICLAAGINHEGINAEVAKGQWEFQIFGKGSKKAADEVWLARYLLLRLTEKYGIDVEFHCKPLGDTDWNGSGMHANFSTAYLREVGGQDYFEALMAAFEKNLHDHINVYGPDNHLRLTGKHETAPWDKFSYGVADRGASIRVPHSFINNGYQGYLEDRRP

SEQ ID NO: 40690 - protein, 276 aa, Sinorhizobium meliloti
WGFDGSSTQQAEGRSSDCVLKPVAVYPDPVRTNGALVMCEVMMPDGKTPHPSNTRATVLDDESAWFGFEQEYFFYKNGRPLGFPEQGYPAPQGPYYTGVGYKNVGDIARQIVEEHLDICLAAGINHEGINAEVAKGQWEFQVFGKGSKKAADEVWLARYLLLRLTEKYGIDVEFHCKPLGDTDWNGSGMHANFSTAYLREVGGKDYFEALMAAFEKNLHDHINVYGPDNHLRLTGKHETAPWDKFSYGVADRGASIRVPHSFVNNGYRGYLEDRRP

SEQ ID NO: 40691 - protein, 424 aa, Zea mays
MEAAAVAAALRSPTATTAAAAAGPTWRAAAPGAASLAFDRRRSFAFGSIKGLGRQQQLTSRSTRRRSSVVRASWSPSESLPPSSSIAPLRMESPAGQLLSQILHTHPHLLSAAAEQQLEQLQTDREADKEKDKESDAGDKLAPTGGDLVLYRRIAEVKEKERRRTLEEILYALVVQKFVEAGVSLVPALSRSTDPSGRVDQWAETVEEKLQRLHSHEAYEMIENHLTLILGQRQGDATIAAISKLRVGQVYAASVMYGYFLKRVDQRFQLEKTMKGLPWGSEEEDSALNQVMMTDLMPSAQTSSSHPEMGSWTAPAFSTGGPSQSIKPCRLRSYVMSFDSDTLQRYATVRSKEAFGIIEKHTEALFGKPEIVITPEGTLDSSKDEHIRISFAGLRRLILEAVTFGSFLWDVESFVDSRYHFVTS

SEQ ID NO: 40692 - protein, 180 aa, Oenococcus oeni
HGAAIGEENVAKTRDFYHWPYQPFEIPKDVYDLFNDSHQAKDRYYKSWQESFQLYAEAFPRLAEQLENNDSTLNTDNLKLAENNDQELATRVSSSEVMQQIADQNRTFWGGSADLSSSNKTYLKDQGDFTDLTPQGSNVFYGVREFAMAAITNGILLHGNSRAFASTFFIFSDYMKPAIR

SEQ ID NO: 40693 - protein, 516 aa, Pisum sativum
MASMAAIGVLKVPPSSSSSSSSSSSSSKAIARNLSFTSSQLCGDKIFTVSGTRRSSGRNPFIVSPKAVSDSKNSQTCLDPDASRSVLGIILGGGAGTRLYPLTKKRAKPAVPLGANYRLIDIPVSNCLNSNISKIYVLTQFNSASLNRHLSRAYASNLGGYKNEGFVEVLAAQQSPENPNWFQGTADAVRQYLWLFEEHNVLEYLVLAGDHLYRMDYERFIQAHRESDADITVASLPMDEARATAFGLMKIDEEGRIVEFSEKPKGEQLKAMKVDTTILGLDDERAKEMPYIASMGIYVVSKHVMLDLLRDKFPGANDFGSEVIPGATELGLRVQAYLYDGYWEDIGTIEAFYNANLGITKKPVPDFSFYDRSSPIYTQPRYLPPSKMLDADITDSVIGEGCVIKNCKIHHSVVGLRSCISEGAIIEDTLLMGADYYETDADRRFLAAKGGVPIGIGKNSHIKRAIIDKNARIGDDVKIINSDNVQEAARETEGYFIKSGIVTVIKDALIPSGTVI

SEQ ID NO: 40694 - protein, 507 aa, Pisum sativum
MSSIVTSSVINVPRSSSSSKNLSFSSSQLSGDKILTVSGKGAPRGRCTRKHVIVTPKAVSDSQNSQTCLDPDASRSVLGIILGGGAGTRLYPLTKKRAKPAVPLGANYRLIDIPVSNCLNSNISKIYVLTQFNSASLNRHLSRAYASNLGGYKNEGFVEVLAAQQSPENPNWFQGTADAVRQYLWLFEEHNVLEYLILAGDHLYRMDYEKFIQAHRESDADITVAALPMDEKRATAFGLMKIDEEGRIIEFAEKPKGEQLKAMKVDTTILGLDDERAKEMPFIASMGIYVISKNVMLDLLRDKFPGANDFGSEVIPGATSVGMRVQAYLYDGYWEDIGTIEAFYNANLGITKKPVPDFSFYDRSSPIYTQPRYLPPSKMLDADITDSVIGEGCVIKNCKIFHSVVGLRSCISEGAIIEDTLLMGADYYETEADKRFLAAKGSVPIGIGKNSHIKRAIVDKNARIGENVKIINSDNVQEAARETEGYFIKSGIVTIIKDALIPSGTVI

SEQ ID NO: 40695 - protein, 554 aa, Vibrio sp. Ex25
MCSVFGILDIKSDAAALRPIALEMSKKLRHRGPDWSGIYSSERAILAHERLAIVGLNSGAQPLYSPDKKLILAVNGEIYNHKEIRARYEGKYEFQTDSDCEVILALYQDMGADLLEELNGIFAFVLYDEEKDEYLVGRDHIGIIPLYQGHDEHGNYYVASEMKALVPVCKTVSEFPPGSYYSSKDAEPTRYYVRDWNEYAAVQGNTTSKEELTEALEAAVKRQLMTDVPYGVLLSGGLDSSITSAVAKRFAAMRIEDDEKSEAWWPQLHSFAVGLEGAPDLKAAREVADQIGTVHHEMTYTIQEGLDAIRDVIYHIETYDVTTIRASTPMFLMGRKIKAMGIKMVLSGEGADEIFGGYLYFHKAPNAKEFHEETVRKLLALNMFDCARANKSLAAWGVEGRVPFLDKEFIDVAMRLNPADKMCGNGKMEKHILRECFEHYLPESIAWRQKEQFSDGVGYSWIDTLKEVAEQKVTDQQMETAQYRFPYNTPTTKEGYVYREIFEELFPLPSAAECVPGGPSVACSSAKAIEWDESFQNCVDPSGRAVQTVHNDAY

SEQ ID NO: 40696 - protein, 801 aa, Cryptococcus neoformans var. neoformans B-3501A
MSPPQGKGVPVPNLGLKHESKKKGHVMQSSLELVFSYSRSQQMHYGSRSAPSFLDDSSFRGDQFDVDDYDEDQNYNDIYDGIERTGEEQFEGRDLSGRLEDLKMAGAISEGNEDGSTQEELGQDSHITRRSSDEPAFFHSDSVPISPISQLQPSVNQGAKVNTLLPDGIGPIQGLFLAAMPSPRLAPVLPHPGSLDTSFCTEAGPSSNPRTSKRWNSHTRGDSNPMEIRESAALVSSSPQYHGKGKSAENRPLLDGRPTEGYASIQSQKEIRRKSNRRKRSEDGQSTEGQTLFNATAVLVGIGLLSLPLAFAYAGWIGGTIMLLGFGWLTCYTAKLLARLIRADGRMMGYTDIGLRAFGSWAGAGINLLVHFIVSSCNDGILTTGSSVALVLLFGDTLNVLYPSIPSNVWKLVGFFIIVPTVLLPLRLLSLPSLLSSISSFFLIIVLLVDGILPSPEPSSASTGSLLHPSPTSLSPEWSRGNWLGGIGLILAGFGGHAVMPSLARDMKRPEKFDGIVNWAFAIATGISFTAGAAGYLMFGETVSDEVTKDLMREKYHYPRILNIVALWMIVINPLTKFGLSSRPLNLTIEGILRISPSPPPSLFSPFDGGLESALGSGAPETSQVNFPKRRDRSSFSTHNDPRTSRRPSALTSPSNSRPFPQSQSQIVAFEQYVSKERKKRWLRMVSRVVITALCVGVAVVLPGFGRVMAFLGSFSAFMICIILPLLFYIRLSPTLLPTCPPSPHSLTFLPTARSQPMSKWASEKFTNAIHWVLVIASTALMIAGTIWAFLPGSGHDELET

SEQ ID NO: 40697 - protein, 297 aa, Zea mays
MATYFTLNTGARIPSVGLGTYKAGPGVVADAITAAVKAGYRHIDCAPLYKNEKELFDDGVVKREDLFITSKIWCSDLAPEDVPLAIDSTLNDLQLDYLDLYLIHWPFQIKRGSELSPENFVHLDMPKTWQAMERLYGSGKARAVGVSNFSTRKLADLLAVARVPPAVDQVECHPGWQQARLRAFCHSSGVHFSAYAPLGRMKAVASDPVVASVAESLGKTPAQVALRWGIQQGQSVLPKSANESRLKENIDLFGWSIPDELCAKFSEIEQVKQIRNDAFVHPQSIYKTIDELWDGEI

SEQ ID NO: 40698 - protein, 510 aa, Pisum sativum
MASGCVSLKTNTHFPNSKKGSFFGERIKGSLKNSSWVTTQKKIKPASFSAILTSDDPKGSLNLQVPSFLRLRADPKNVISIVLGGGPGTHLYPLTKRAATPAVPVGGCYRLIDIPMSNCINSGINKIFVLTQFNSASLNRHIARTYFGNGVNFGDGFVEVLAATQTPGEAGKKWFQGTADAVRQFTWIFEDAKNINVENVLILAGDHLYRMDYMDLLQSHVDRNADITVSCAAVGDNRASDYGLVKVDDRGNIIQFSEKPKGADLKAMQVDTSRLGLSPQDALKSPYIASMGVYVFKKDVLLKLLKWRYPTSNDFGSEIIPSAIREHNVQAYFFGDYWEDIGTIKSFYDANLALTEESPKFEFYDPKTPIFTSPGFLPPTKIDNSRVVDAIISHGCFLRDCTIQHSIVGERSRLDYGVELQDTVMMGADYYQTESEIASLLAEGKVPIGIGRNTKIKNCIIDKNAKIGKEVVIANKEGVQEADRSEDGFYIRSGITIIMEKATIEDGTVI

SEQ ID NO: 40699 - protein, 238 aa, Oryza sativa
MTKRKIEIKRIKNEEARQVCFSKRRPSVFKKASELYTVCGAEVAMLVKSPAGKFFSFGAPSVGFVLSRFHATTTSRKHSSMGVTIQHDNSATIKLHELNQQHIELQNQLQAQNEKMKALQEVAKKESGGKVMGWLNSKVEDICQEDLEEFKMVLESLKYLTRGIINQLFQNYAMFSNMMRVQHCVTALPNQQFLPSSEDVKPMIHHVPSSSYGWNTSIDSKPNSSDAHVVGARRYFPK

SEQ ID NO: 40700 - protein, 462 aa, Vibrio sp. Ex25
MSNQHQYFGHPRGLFLLFGTELWERFSYYAMRAILVLYLTDTTMNGGLGWSTKDALDLYGIYTGLVYITPLIGGYLADNYLGQRRSILLGGALMAIGQFTLALPADALGIGSLHSFYLGLGLLITGNGLFKPNISTMVGDLYKEGDNRRDGAFTIFYMGINLGALLAGVVSGSVTTSYGWKAGFVAAGVGMIISLVMQMVLAQSWLGDIGREPAAKRDLSNKNSTTKQPLTKEEVNRLKVILVMSLFTIVFWAGFEQAGGLMNIYTQQYTDRMIGGFEVPAAWFQSLNPFFIITLAPVLAVLWVKLGKREPTSPVKFAMALFFLAIGFLCMVGAVLEQGGDTTVKTSMLWLVGAFFFHTLGELCLSPIGLSLVTKLAPLRLASLMMGAWFGCNAIANYVAGYVGSHVGELGAMAIFSGIAVSATVSGVILLLFSNTLVRWMHGAENTHSTAEQVEEQQVQVA

SEQ ID NO: 40701 - protein, 674 aa, Rhodobacter capsulatus
MAAKDIDDTKPDTAADEDASFDMSQAAVKRMIGEAKERGYITIDQLNAVMPPETVSGEQIEDVMSMLSEMGINVVEGEEVEESEGGEVVETGSGSREIAVAGAAGETLDRTDDPVRMYLREMGSVELLSREGEIAIAKRIEAGRNTMIAGLCESPLTFQAITIWRDELLSEEILLRDVIDLEATFGRSLDGDEGLEGMEGIEGPVVEGLDLEAAEGAAPAARRPASDEPEYDADGNPISRIDEEEDDDDSSNMSLAAMEAALKPKVLETLELIARDYAKLAEMQDLRMSATLNEDGTFTVAEEAAYQKLRSEIVLLVNELHLHNNRIEALIDQLYGINRKIMSIDSGMVKLADAARINRREFIDEYRGYELDPTWMDRMSAKPARAWVTLFEKSRHKVEDLRHEMAQVGQYVGVDISEFRRIVNQVQKGEKEARQAKKEMVEANLRLVISIAKKYTNRGLQFLDLIQEGNIGLMKAVDKFEYRRGYKFSTYATWWIRQAITRSIADQARTIRIPVHMIETINKLVRTGRQMLHEIGREPTPEELAEKLQMPLEKVRKVMKIAKEPISLETPIGHEEDSQLGDFIEDKNAILPLDSAIQENLKETTTRVLPSLTPREERVLRMRFGIGMNTDHTLEEVGQQFSVTRERIRQIEAKALRKLKHPSRSRKLPSFLDQ

SEQ ID NO: 40702 - protein, 198 aa, Cryptococcus neoformans var. neoformans B-3501A
MAMQSIKCVVVGDGAVGKTCLLISYTTNSFPGEYVPTVFDNYSASVLVDGRPVSLGLWDTAGQEDYDRLRPLSYPQTDVFLVCFSIVSPPSFENVKTWIPEIRHHAPTTPILLIGTKLDLRDDPVTLSRLKERRFQPIGFEMGVRCAREIGAVRYLEASSRTQKGLKNVFDEAIRAVLSPSTRDAREKKKKKQQCLIL

SEQ ID NO: 40703 - protein, 1361 aa, GIBBERELLA ZEAE PH-1
MAEAADPDGDTTMEVISPKNQTSFRAPTLERIDSLASMESRVDPDAQTTVTDFLDFTDYLPSDVVRSLILIGKLDERYANASLKIHDLTELWGSLPKINMEERPAPVQLRADISEHLNQAVSSRAFAHAEAIRMSDNISRHYSKAKILLSKLKSMRDNYTTEEQKSPVQTKSPQAARSKALKAAADGQKHRRPQGPRIIVPGEVLAPYDIDQDILTDESDVSSDDDSDTTAQNRRTPGPAPRIKLVSNKLPKTPSRLARPVTYATPALSEAAAANNAALLQPPPDDAVVGSPDAPWLQLTQYELAKLRKRMKKNATWTPSETMIARELKALGRGPDAYHEAKKDAKEKGERFEPVVPQAIVDTKSGEKQLPAGALSPDTLSAEEVATSNRGMKLNEAKKLKREALAKMAAEEAEESARKMNEAAKLFLGNGNGNKNANNNNTTTNNNNGSNGTPKTPTSETPIKETPKPTKTRAASRSTKRKREPETEEPANTNGSAEKNESRPQVKRTKTETPVPPPTQLTLSKGPSPENPAPTPAAAPVDHPVASHAETPVPIPIPAMATRGSAKSPTPNPATTSNTGPTKPPGPPHETPVPLPFSEGRKSVTPVLPPVRENTKRETRGDAAKRTQQAQQQQIDPPAIQAIPEVSEEETLKSEPKTSPLLQTATVQIAVAPPQSPPPPPPQYAPEVASRQVPSRAPTPQITPGPEGLAIRRPSSRGKAASQEPQLSLAADRPRRASTARNTPAPEPRPPKRTKRPAPGIVSTTKSGGNSAVGKRKAPPKKKARPKKDRGSAEVELEDVDDDGNPIDPDEPKYCLCNRVSFGTMIACENSECKQEWFHLECVGLTEVPARTTKWYCPECRVKLNIGEKGEWGLIRKYKMPVDYSKWDALELSDDSDIEVHPNVDKRSFIRAKQNQIHQERQHRKLQIETYKYERIVNDGLIKRISGLLASLRAHASEAATRNPAEVAFQAVMESAGNPKDDKPPVPPEGVHTHEKEQPSYTKMMATLLDQVNKALDEKKPENRYEAMIAEIQEHEDKVTNLQKELEVKLAELEKEEGRKITSEGIHTGFDSSHVAKSTPEDKKKETTQVELLNPGAAAGSSSSSGAEKQDVKIDDDSDIESSPAGKKFGTIKANDYQTSLQFLLQNPQILVEKETDGLLVQAFDAALEGKDDLSRQYIHQGLLLQYCRALGKDGVGLFFKRIMTKGHQAQEVFYKDVQETYMKIRTRSREILAERAKEGQTEGVEQIQLHAVEPGTVINIKVPAADSEDPEEQEAREIFEHFAPEMRKALETGSLDEVNKVLGEMPIDEAEELVGLFGEANILSLEEQIIDATTEEGKKQLKDIEAAASSDKKEEYDDPE

SEQ ID NO: 40704 - protein, 456 aa, Vibrio vulnificus
MHRYKKEASNLIKLATPVLIASVAQTGMGFVDTVMAGGVSATDMAAVSVAASIWLPSILFGIGLLMALVPVVAQLNGAGKREQVPFEIQQGAVMALLISIPIIGVLFQTQWILGYMNVDAVMATKTIGYIHAVMFAVPAFLLFQTLRSLTDGLSLTKPAMVIGFIGLLLNIPLNWMFVYGKLGAPALGGVGCGVATAIVYWIMFLLLLFYVTTSHRLRQVQLFTTFHPPQLNAQVKLFKLGFPVAAALFFEVTLFAVVALLVAPLGSTVVAAHQVAINFSSLVFMLPMSIGAATSIRVGHMLGEKSTEGARIASHVGILVGLSTAVFTALLTVILREQIALLYTDNRVVITLAMQLLIFTAIYQCTDAIQVIAAGALRGYKDMRAIFNRTFIAYWLLGLPTGYVLGLTDWIVEPMGAQGFWIGFIVGLSSAAAMLGVRLHWLHRQNDEIQLNYEAR

SEQ ID NO: 40705 - protein, 456 aa, Vibrio vulnificus YJ016
MHRYKKEASSLIKLATPVLIASVAQTGMGFVDTVMAGGVSATDMAAVSVAASIWLPSILFGIGLLMALVPVVAQLNGAGKREQVPFEIQQGAVMALLISIPIIGVLFQTQWILGYMNVDAVMATKTIGYIHAVMFAVPAFLLFQTLRSLTDGLSLTKPAMVIGFIGLLLNIPLNWMFVYGKLGAPALGGVGCGVATAIVYWIMFLLLLLYVTTSQRLRQVQLFTTFHPPQLNAQVKLFKLGFPVAAALFFEVTLFAVVALLVAPLGSTVVAAHQVAINFSSLVFMLPMSIGAATSIRVGHMLGEKSTEGARIASHVGILVGLSTAVFTALLTVILREQIALLYTDNRVVITLAMQLLIFAAIYQCTDAIQVIAAGALRGYKDMRAIFNRTFIAYWLLGLPTGYVLGLTDWIVEPMGAQGFWIGFIVGLSSAAAMLGVRLHWLHRQNDEIQLNYEAR

SEQ ID NO: 40706 - protein, 421 aa, Eucalyptus grandis
MSTHDSEHGHIIEVCQDVPAMETGQVGSKVCAEAPCGFSDVRNSLKDARERSTSTKKLLIAVVLCIIFMSIEVFGGIEANSLAILTDAAHLLSDVAAYAISLFSLWASGWEATPRQSYGFFRIEILGALVSIQIIWLLAGILVYEAIERLINGTTEVHGFLMFIIAAFGLLVNIAMALLLGHDHSHGHGHDHGHGHSHGHDDAHEHSDHAHSHEDHGDLHTHGLTIKKHDHHHHGEDSKGHADQLHGHETDQTEPLLQTCSEAEGDSKLGAKQKQQRNINMQGAYLHVLGDSIQSVGVMIGGAIIWIKPEWTIVDLICTLIFSVIVLGTTIRMLRNILEVLMESTPREIDATRLESGLCKMDEVIAVHELHIWAITVGKVLLACHVKIKRDANADMVLDKVVDYIRREYKISHVTIQVERE

SEQ ID NO: 40707 - protein, 317 aa, Polaromonas sp. JS666
MRRPALYSSSSHDRRGNDAPDAPEADPPAQSPPQELPLPARTSRFSRLAARFPAYNLYLLWSVIALLALLLAISFSLSLHPPGRKLTQHDINAAVLKTLETTTLPSAAAKAYQVISPSVVRVVGQGREKDGKDGSKEEGERSVGTGVVIVDKGIILTNLHVVQGAENIKVTFSDGLESTASIVGIQLENDLAVLQADKIPDDMIAATMRSTADLAPGDEVMAVGYPFGIGPSASAGVISGLKRTFRSPEGKQQMTNLIQFDAAANPGNSGGPLVTMDGEVIGIVTAIYNPNQQRTFVGIGFAVPIENAASAAGMPPF

SEQ ID NO: 40708 - protein, 319 aa, Aspergillus niger
MASPTVKLNSGYDMPLVGFGLWKVNNDTCADQIYHAIKEGYRLFDGACDYGNEVEAGQGIARAIKDGLVKREELFIVSKLWNSFHDGDRVEPICRKQLADWGIDYFDLYIVHFPISLKYVDPAVRYPPGWKSEKDELEFGNATIQETWTAMESLVDKKLARSIGISNFSAQLVMDLLRYARIRPATLQIEHHPYLTQTRLVEYAQKEGLTVTAYSSFGPLSFLELSVQNAVDSPPLFEHQLVKSIAEKHGRTPAQVLLRWATQRGIAVIPKSNNPQRLKQNLDVTGWNLEEEEIKAISGLDRGLRFNDPLGYGLYAPIF

SEQ ID NO: 40709 - protein, 467 aa, Burkholderia fungorum LB400
MKAGLKQRHMTMIALGGVIGAGLFVGSGVVVQQAGPAAVLSFLITGALVVLVMRMLGEMACAMPAVGSFYEYARLAFGGKRACGNLAGFLTGWMYWYFWVIVVAVEAVAGAKLVQFWLPDVPAWAISLVLLVTLTATNLVSVGSYGEFEFWFASIKVAAIMVFLFLGSMYVLGLWPASKHVTEVLPTLFSHGGLMPKGIGPVLSGAVAATGFYFGAEIVTIAAAEAQEPAKAVARATNSVITRVLVFYVGSILLVVALVPWNSPKMATPYVSALDAMGIPAAASVMNAIVLTAVLSALNSGLYAASRMIFALTRHGDAPAALARVNRRGVPVRAILIGTVFGYASVVMSYVSPDTVFAFLVNSYGTVAIFVYVLIAISQLKLRARIERDAPQTLRVRMWCYPYLTWVSIIGMVGILVAMAFIPEQRQPLWFGVASLGVLLLAYPLRGRRSDAMPGEPETVEYRHHHR

SEQ ID NO: 40710 - protein, 642 aa, Azoarcus sp. EbN1
MCGIAGLFDLRGKRDFSRDLVRRMNDVQVHRGPDEGGYHFEPGIALAHRRLSIIDLSTGQQPLFNEDGSVAVVFNGEIYNFQELVPELEALGHAFHTRSDTEVIVHAWEAWGEDCVQRFRGMFAFALWDRNRETLFLARDRLAVKPLFYALLPDGTFAFGSELKVLMQHPLLDRRIDAHAVEEYFALGYVAEPRTIFAGAKKLGAAETLCVRRGQPVPQPRCYWDVHFMLDNPLSLAEASAELTARLRESVRLRMIAEVPLGAFLSGGVDSSAVVATMAGLSDEPVHTCSIAFDDPAFNESDFAQKVADRYRTNHYVETVKSDDFDLIDTLAGLYDEPYADSSAIPTWRVCQLARKRVTVALSGDGGDESFGGYRRYRLHLMEERMRGALPLGVRQPMFGLLGRLYPKADWAPRMFRAKTTFQALARDSLQAYFHSVSILRDAMRRQLFSNRFRSELAGYNAIEVFRRHAATAHTDDALALIQYVDLKTYLVGDINTKVDRASMAHSLEVREPLMDHKLVEWLATLPSGLKVKGQEGKYLFKKAMEPLLPNDVLYRPKMGFSVPLSRWFRGPLRERVRQTVLGETLAATGIFNPDYLRHLVDAHQSGARDYSSPLWSLMMFEAFVRSSGGCPARAPELAAAV

SEQ ID NO: 40711 - protein, 457 aa, Glycine max
MVSLGATCALCCSMFMVFVTLSLAGDIVHPDSIAPRRPGCDNNFVLVKVPTWIDGVESCEYVGVGARFGPTLESKEKHANHTRVAIADPPDCCSKPKNKLTGEIILVHRGQCSFTTKANIAEEAGASAILIINYRTELFKMVCEANETDVDIGIPAVMLPQDAGENLKNHILNNSVVSVQLYSPLRPLVDVAEVFLWLMAVGTILCASYWSAWTARESAIEQEKLLKDASDEYINAENAGSSAYVEISTAAAISFVVIASCFLVMLYKLMAYWFVEVLVVLFCIGGVEGLQTCLVALLSCFKWFQHAAQTFVKVPFFGAVSYLTVAVTPFCIVFAVLWGVYRRVSFAWIGQDILGITLIITVLQIVRIPNLKVGTVLLSCAFLYDIFWVFVSKWRFHESVMIVVARGDRSGEDGIPMLLTIPRMFDPWGGYSIIGFGDIILPGLLVAFSLRLNRWHT

SEQ ID NO: 40712 - protein, 272 aa, Mycoplasma penetrans HF-2
MTTWWLGLLSELVGTAVLILLGNGVCASVSYKRMNANQSGKWILISFAWGLAVFAGAMVSIAMGGDGWLNPVVSIMQAIIASKNPGGLYATGILATGSVAAGIAATFFISVIFQMLGAMLGQSVLNFINYKFIKDRENPLDVIRGAHSTGAAYKNKEDKATIFNLSYEFVGTLVLTGMILVFGSNKSGIPSVNIGPLFVMLIITSIGMSLGSATGFSLNPARDLGPRIVFAGLVNFLRKEDKVAGICDWGYSWVPVVAPMAAGVVMGCFGLI

SEQ ID NO: 40713 - protein, 485 aa, Pseudomonas syringae pv. tomato str. DC3000
MLKNQLKDPSLLVDRAYVDGQWISADDGATLAISDPATGEVIAQVPALQGAETRRAIEAADRAWPAWRARPAAERAALLERWHQAMLDNVEDLALIMTLEQGKPLNESRGEIRYGASFVKWFAEEARRSYGETIPTPSADRRLMTLKQPVGVCAAITPWNFPNAMITRKCAPALAAGCTIIVKPSDLTPLSALALAVLAERAGIPVGVFSVVTGMPTAIGEELTGNPVVRKISFTGSTPIGRLLMRQSAEHIKRLSLELGGNAPFIVFDDADLEQAVAGIMLSKFRNAGQTCVCANRILVQSGIYDRFAARLVEEVAKLKVGNGLEEGVTIGPLINPAAVSKIARHIDDALSQGAKLLYGGLPNGDGQFVQPTVLGDTHAGMLLANEETFGPVAPLMRFTDEAEALALANATPYGLAAYYFTQDLRRSWRFGEALEFGMVGLNTGIISMEIAPFGGIKQSGLGREGSSYGLDEYLEVKAFHVGGL

SEQ ID NO: 40714 - protein, 348 aa, Listeria monocytogenes str. 4b F2365
MKALKLYGKRDLRYEEADMPTIEQPDDVILKVKTVGICGSDISRYSKLGPYVPGMVWGHEFSGEVIEVGSEVTDIEIGDRAAGCPALYCGECEYCKKGEFARCRKLTVIGARHPGAYAEYIKLPAENVVKIPDELDYEAAALVEPSAVVVHGFYHTKLQAGDDVVVVGSGNIGLLAIQWAKVFGAKRVIAIDVDDKKLALAKEVGADVVINSLKEDPLEVVAAHTDGLNADLVVEAAGSPITSAQVFAYAKKGGGVVFLGIPYADVTIERFYFEKIVRSELTVWGSWNAISAPFPGKEWQTTIHFLANKQINIEPMITHRLSLAEGPEVFERIYERNEFFGKVLFFPE

SEQ ID NO: 40715 - protein, 331 aa, Solanum bulbocastanum
MSGNSTSVVGAGGGGGGEGGMGYGYGYRPPFTAVQWQELEHQAMIYKYLVAGLPVPPDLVVPIRRSFEAISARFFHHPSLGYCSYYGKKFDPEPGRCRRTDGKKWRCSKDAYPDSKYCERHMHRGRNRSRKPVESQSTSQSLSTSMSQITTGSSNTKERFQNSSSGTFQNMPLYSVANSGTLNYGSTATKLQMEPASYGIDNKDYRYLHGITRDADEHNLSSEVSATVRSLGMGTNTDSTWVLPSQVSSSPMVRSKNDSQLLGSSTEMHLPNLLEPMIDATISKRRHQHCFFGSDIDSPGTVKEEQHSMRPFFNEWPTAKESWSNLDDEGS

SEQ ID NO: 40716 - protein, 180 aa, Oenococcus oeni
HGAAIGEENVAKTRDFYHWPYQPFEIPKDVYDLFNDSHQAKDRYYKSWQESFQLYAEAFPRLAEQLENNDSTLNTDNLKLAENNDQELATRVSSSEVMQQIADQNRTFWGGSADLSSSNKTYLKDQGDFTDLTPQGSNVFYGVREFVMAAITNGILLHGNSRAFASTFFIFSDYMKPAIR

SEQ ID NO: 40717 - protein, 488 aa, Solanum bulbocastanum
MATLRYLLSKSSTPLKLSNPFHLHRSNNFPHISQFLGALNSFVSREFHCHSPNSRSFSTSPEYVAQDSDSSIAAALSLDSRVPATVITGFLGSGKTTLLNHILTSQHGKRIAVIENEFGEVDIDGSLVASHSSSNEEILMVNNGCLCCTVRGDLVKMLLELVKNRRDRFDHIVIETTANLRRSRFALIQTVACTELLPSPSNNVDAVIRVGKKRETYAYVALVLCFDILSVPDGLAKPGPVIETFCSDELVSRHVKLDGVVTLVDCKHALQHLNRVKPRFVSNEAVEQVAYADRIILNKIDLVTESELELLTKRIKHINGMAQIKRAKHGVVDMDFVLGVGGYDLDRVDSEVQSEGSHCGHKHEDGHEHHKGHHHDHVHDSAVSSVSIVSEGTLDLDEVDDWLERLIEENGDDLYRMKGVLSVSDSEQRYVFQVLINFVFVGVHSILDGCPGKTWEPNEKRINKLVFIGRNLDETALRKGFKGCLCEE

SEQ ID NO: 40718 - protein, 447 aa, Glycine max
MGKEKVHINIVVIGHVDSGKSTTTGHLIYKLGGIDKRVIERFEKEAAEMNKRSFKYAWVLDKLKAERERGITIDIALWKFETTKYYCTVIDAPGHRDFIKNMITGTSQADCAVLIIDSTTGGFEAGISKDGQTREHALLAFTLGVKQMICCCNKMDATTPKYSKARYDEIVKEVSSYLKKVGYNPDKIPFVPISGFEGDNMIERSTNLDWYKGPTLLEALDQINEPKRPSDKPLRLPLQDVYKIGGIGTVPVGRVETGVVKPGMVVTFGPTGLTTEVKSVEMHHEALTEALPGDNVGFNVKNVAVKDLKRGFVASNSKDDPAKEAANFTSQVIIMNHPGQIGNGYAPVLDCHTSHIAVKFSEILTKIDRRSGKELEKEPKFLKNGDAGMVKMVPTKPMVVETFSEYPPLGRFAVRDMRQTVAVGVIKSVEKKDPTGAKVTKAAAKKK

SEQ ID NO: 40719 - protein, 180 aa, Oenococcus oeni
HGAAIGEENVAKTRDFYHWPYQPFEIPKDVYDLFNDSHQAKDRYYKSWQESFELYAKAFPQLAEQLENNDSNLNTANLKLAENNDQELATRVSSSEVMQQIADQNRTFWGGSADLSSSNKTYLKDQGDFTDLTPQGSNVFYGVREFAMAAITNGILLHGNSRAFASTFFIFSDYMKPAIR

SEQ ID NO: 40720 - protein, 180 aa, Oenococcus oeni
HGAAIGEENVAKPRDFYHWPYQPFEIPKDVYDLFNDGHQAKDRYYKSWQESFQLYAEAFPRLAEQLENNDSTLNPDNLKLAENNDQELATRVSSSEVMQQIADQNRTFWGGSADLSSSNKTYLKDQGDFTDLTPQGSNVFYGVREFAMAAITNGILLHGNSRAFASTFFIFSDYMKPAIR

SEQ ID NO: 40721 - protein, 614 aa, Polaromonas sp. JS666
MSASSSLIDIKVPDIGDFDEVSVIEVLVKAGDTIKAEQSLITVESDKASMEIPSSQAGVVKEVKVKIGDKVKQGSIVLLLEGAGAALAPKSEEKQTPAPVPSGQAAPASAAAQAPAPAAASFAGTADLDCDVLVLGAGPGGYSAAFRAADLGLKVVLVERYATLGGVCLNVGCIPSKALLHVAAVMDEVRHFDSLGVSFGEPVLDINKLRTHKEKVVGKLTGGLAAMAKMRKVTVVRGYGSFVGAHHVEVQETSGAAQETTGKKQTIAFKHCVIAAGSQAVRLPFMPEDPRVVDSTGALNMKEVPKRMLILGGGIIGLEMGTVYSSLGARLDVVEMLDGLMQGADRDLVKVWQKMNAPRFDNIMLKTKTVAAKATAAGIEVSFEGEGAPAPQTYDLVLQAVGRTPNGKKIAAEKAGITVTDRGFIPVDIQMRTNVPHIFAIGDVVGQPMLAHKAVHEAHVAAEVIAGELQGNKELASAAFNARVIPSVAYTDPEIAWVGLTEDQAKAQGIKVKKGLFPWTASGRAIANGRDEGFTKLLFDDSPEAHGHGKILGGGIVGTHAGDLIGEIALAIEMGADAVDIGKTIHPHPTLGESMGLAAEVAHGSCTDIPPARK

SEQ ID NO: 40722 - protein, 328 aa, Methanothermobacter thermautotrophicus str. Delta H
MIESKYTNKGSDFSETELEEQEIMDAYSEAVMGAADRVSPSVVRVTTVARSKNRTVGGGSGLIYTEYGHIITNSHVVHGSERIEVTLNTGEEYRATVVGDDPHTDISVLKIEPQHELRTPEFADSSRVRVGQLALAIGNPFGFQFTVTAGVVSATGRSLRTMTGRLVDGVIQTDAALNPGKSGGPLVDFRGRVLGINTALIRPAQGLCFAIPSNTVREVADKLIEDGKIRRAHLGVACQNMVLKPETVEKLKLNSDRGVMVASLSDGPAGDAGVMRGDIIIALDGEAVETVDDLHRILNEERIGMECDLDVIRGSEIFKISVKPSELE

SEQ ID NO: 40723 - protein, 308 aa, Bordetella bronchiseptica RB50
MTQSSQTTSPSADARVKHRYLDLDELRIFYREAGPADAPVVLLPHGYPCSSFQYRDFMPALADQWRLLAPDFPGFGYSDTPDTARFACDFEHYTDFLQQFAHALGLPSYALYLHDYGSQIGLRLAMREPDKVSGLIIQNGDIYEDELGPRYAPLQAYWADPTLEGRYKLSLAVSEEGFRDEFLNDLPDERADCITPDMWKLAWALLREPRRREIMVGLMEGLEDNLAWFPRYQAYLRERQPPTLIVWGVHDGYMPEAAARAYLRDLPDAELHLLPAGHWALETHLAPIVALTRAFLQRVHATPNFPPP

SEQ ID NO: 40724 - protein, 180 aa, Oenococcus oeni
HGAAIGEENVPKTRDFYHWPYQPFEIPKDVYDLFNDSHQAKDRYYKSWQESFQLYAEAFPRLAEQLENNDSTLNTDNLKLAENNDQELATRVSSSEVMQQIADQNRTFWGGSADLSSSNKTYLKDQGDFTDLTPQGSNVFYGVREFAMAAITNGILLHGNSRAFASTFFIFSDYMKPAIR

SEQ ID NO: 40725 - protein, 716 aa, GIBBERELLA ZEAE PH-1
MVSSKLLVVLGLASLTAAQCPYADPAKLAARDEGSSREHLKDYEVDDSKGHMSSDAGGPFEEQESLKAGERGPTLLEDFIFRQKITHFDHERVPERAVHARGAGAHGYFKSYSDWSNITAASFLSSKDKNTPVFVRFSTVAGSRGSADTVRDVHGFATRFYTDAGLFDIVGNNIPVFFIQDAIQFPDLIHAVKPSPDSEIPQAATAHDSAWDFFSQQTTTLHTLFWAMAGYGIPRSFRHVDGFGVHTFRLVTDEGDTKFVKWHWKSKQGKASLVWDEAQHLAGKNADYHRADLWNAIESGNGPEWELNAQIFDEDQALAFGFDVLDATKIIPEELAPLQPIGVMKLDTNPVNYFAETEQVMFQPGHIVRGIDFTEDPLLQGRIFSYLDTQLNRHGGPNFEQLPINRPLSPIHNNNRDGAGQNFIHKNTAASDSLDTPNTLNKGYPVQANQTQGKGFFTAPGRKVSGNLVRARASTFSDHWSQPRLFYNSLTKVEQQFLINAIRFETSQLMSETVQKNVLYQLNKISHDIAVRVGRALGLKAPEADDKYYHDNTTAGISIFGTKLPSIATLSVGVLVSINSNNSIQQAKALKKALGEDKVTVSIIGEVLGDDVEVTYSAATAAQFDSVVVTSGTESLFNGTGKSTLFPPGRPTQIIVDGYHWGKPVGFIGGAKAAAQAARVSKGKGVYFPKNVNSLVEDLKDGLATFKFTDRFPLDH

SEQ ID NO: 40726 - protein, 932 aa, Bradyrhizobium japonicum USDA 110
MSLQTLPSDAADSRPNRPEDVQALEADARLRDDIRLLGRILGDTVRDQEGADLFDLVERIRQTSIRFHRDEDRLARRELEQILDSMSTSETVRIVRAFSYFSHLANIAEDQNNIRQMRARTAAKIGGSGVLADTLAHAKAAGIGPDALRNFFKTALVSPVLTAHPTEVRRKSTMDREMEVASLLDRRERVALTEDEAAASDEQLRREVLTLWQTNLLRRTKLTVLDEVANGLSFYDYTFLREVPRLVNVLEDRLEEDGDQAASELASFLRMGSWIGGDRDGNPFVTADVMRGTLRLQSSRVMQFYLNELHVLGSELSIAAHLADVSEELRTLAERSPDTSPHRSGEPYRLAVSGIYARLTATAEALEVEITRRPVGKGRPYESVKELQADLDVLHRSLISNNARVIARGRLRLLRRAVDCFGFHLARLDIRQNSAVHERTIAELMDAANPGMSYLALGEDARISLLTNELRSTRALVSPFVKYSDETMGELNVFHAAAEAHAKFGSDAIPQCIISMCKGMSDMLEVAVLLKEVGLVHPSGRSAINIVPLFETIEDLQASSAIMDRMLSLHDYRRLVDSRGSVQEVMLGYSDSNKDGGFVTSGWELYKAEINLVDVFERHHVRLRLFHGRGGSVGRGGGPSYDAIIAQPGGAVNGQIRITEQGEIISSKYSNAEVGRNNLEILAAATLEASLLHPRQSAPRREYLTAMDELSSLAFRAYRGLVYETDGFVDYFWASTVINEIATLNIGSRPASRKKTRAIEDLRAIPWVFSWAQCRLMLPGWYGFGTAVEQWIAEHPDKGMPFLKELYKEWPFFRMLLSNMDMVLAKSSIAIASRYAELVPDEALREKIFGRIRREWHSCIETLLDIMGQDRLLQGNPLLERSVRHRFPYLDPLNHVQVELLREHRAQNPDEQVLRGIQLTINGISAGLRNTG

SEQ ID NO: 40727 - protein, 1136 aa, GIBBERELLA ZEAE PH-1
MSSINNTFDRVSSTSAVCPRHSPSPEDQLRPPVSGKQRRISNRSAPPAPGHPDIFTMGGGTEPKGNDSSYPLFAERPVGVPKTSILKGRIEPFYKSGQYYKVNLQANMDNARYSGKPHVQLSVWDAPDLSRPTFEDAVSHEFRETHTGTSFGPSWSTHWFKVILRIPEDIKDEELIELHWDASNEGTIWTEDGVPIQGLTGSGERIEWIIPDSFRDGEEHTIYIEMACNGMFGNAPNGTTTIAPPDPNRRFNLSKADIVAVNVPARKLHIDIWEIGDAARELPENSAEQNHALAVAMKIINTFEVNNQDSILKCREIAREILGPDVDSHKVYEVGKDPVVFGIGHCHIDSCWLWPWAETKRKVVRSWMNQCDLMERYPEANFACSQAQQYKWLKTYYPAAYKRVKQKVKEGQFHPIGGSWVEHDTNLPSGESLVRQFFYGQRFFEAEFGSRCRTFWLPDTFGYSSQLPQLCRLADMDRFLTQKLSWNNINNFPHTTFMWVSPDGSQVICHMPPSETYTANADFGDLKRSIEKHKTMRVDSSSLLVFGKGDGGGGPTWQHFEKLRRCAGISNTIGGIPKIKMGLTVDDYFDRLNQKATEFPTWYGELYFELHRGTYTTQANNKYYNRKAEVMLRDIEQLATFASIKNKKYKYPTKDLDDMWESVLLCQFHDCLPGSSIEMCYDDSDKVYAEVFETGKRLLNDLYDALHVTSQFSSSLDESVAINTLPWHRKELVELSDSEVGVACGDGQLLALRSFKVQEEKPAVTVMEQSTDVYVLQNDQLRVVVDNGVITSIYDIENDREVVEKGGEANKFVIFDDIPLYWQAWDVEVYHLDARRNVEYGKTKIFEQKPHRVTLVTEIKVSENSSIKSYTTLSAALKGQPPQIDVKANVNWHEDSKFLKVEFPVNVVNNEASYETAFSITKRPTHYNTSWDMAKFEVCCHKFADLSENNYGVSILNDCKYGFATAGKMMRLSLLRSPKAPDANADMGRHTIRWAILPHKGGLSSTTVKAAYAFNNPLKPVTASKVVLESLSSAPIKLVNTDESDSLVLDTIKRGQDDEDVTRKEGLRVNKGQSIIIRVYESLGGRSRGTIKTSFDVKRVTKTNILEDDLEEIEYEDGKIPITLRPFEVATFKLQL

SEQ ID NO: 40728 - protein, 553 aa, Arabidopsis thaliana
MGCLCINLKKKVKKPTPDISGEQNTEVKSREITPKEQPRQRQPAPRAKFQIVVQPHKLPLPLPQPQEKQKLINHQKQSTLQQPEPILGRPFEDIKEKYSLGRELGRGQFGITYICTEISSGKNFACKSILKRKLIRTKARDREDVRREIQIMHYLSGQPNIVEIKGAYEDRQSVHLVMELCEGGELFDKITKRGHYSEKAAAEIIRSVVKVVQICHFMGVIHRDLKPENFLLSSKDEASSMLKATDFGVSVFIEEGKVYEDIVGSAYYVAPEVLKRNYGKAIDIWSAGVILYILLCGNPPFWAETDKGIFEEILRGEIDFESEPWPSISESAKDLVRNMLKYDPKKRFTAAQVLEHPWIREGGEASDKPIDSAVLSRMKQLRAMNKLKKLAFKFIAQNLKEEELKGLKTMFANMDTDKSGTITYDELKSGLEKLGSRLTETEVKQLLEDADVDGNGTIDYIEFISATMNRFRVEREDNLFKAFQHFDKDNSGFISRQELETAMKEYNMGDDIMIKEIISEVDADNDGSINYQEFCNMMKSCSQSHQSKLVQPN

SEQ ID NO: 40729 - protein, 873 aa, Eucalyptus camaldulensis
MEGLMRNRGGVLCGVSLSVCGQEEMQAFSRDGSSQYSLATGILLSLGARSNRVVQLRSFIVSSLDRRYRIWENFLVLLVVYTAWASPFEFGFLKKPKPPLSIIDNVVNGFFAIDIVLTFFVAYLDKATYLLVDDPKKIAWRYMTSWFALDVISIIPSELAQKISHSPLGGYGLFNMLRLWRLRRVSALFSRLEKDRNYNYFVLRCAKLLCVTVFAVHCAGCFYYLLAARNHDPAETWMGKAILHDGLGIRYVTSLYWSITTLTTVGYGDLHPVNVREMLFDIFFMLFNLGLTAYLIGNMTNLVVHGTSRTRKFRDTIQAASSFAQRNQLPPRLQDQMLAHLCLKYRTDSEGLRQKETLDSLPKAIRSSILHYLFYNIVDQVYLFRGISNDLLFQLVSEMKDEYFPPNEDVILQNEAPTDFYILVTGAVDLLVVKNGTEQPVGEAKSGDICGEIGVLCYRPQLFTVRTKRLSQLLRLNRTTLFNIIQSNVEDGTIIMNNLLQHLKDLKDPTMESILIDAENMVAHGQLDLPLSLCFATLRGDDLMLSQPLRRGLDPNESDNSGRTPLHIAASKGSENCALLLMDYGADPNSRDSEGNVPLWEAIKGGSEPVVKLLAENGANLVSGDVGQFSCTAAEQNNLDLLKEISRYGGDVTLPKSNGTTALHVAVSEDNIEIVKFLLDRGADINKPDIHGWTPRDLADQQGHEEIGILFQSIKETEMPPAIRSEPNLPPASQEKTVDAAFGQSRPRRRTSNFHNSLFGIMSAARDGEGDVLLSINHNKSANKPFVARPAIRVVVSCPEVGDVEGKLMLLPENFQELLEMARKKFGLTLLKVLTKNGAEIDDVAVIRDGDHLVFLSKEVKDDFANRNDKKVQ

SEQ ID NO: 40730 - protein, 642 aa, Azoarcus sp. EbN1
MCGIHGIYRFDAAPVSPAQLSAMGDVTRHRGPDDEGRYIDADGRCGIAMRRLSIIDLAGGHQPISNADDTLWGVCNGEIYNFRELRAELQERGYRFKTGSDSEVLVHLYDAFGDDFVHRLDGMFNFALWDARRKRLLIGRDPLGVKPLYVHRSASMLAFATEAKALLELPGVTRELDHDVVADYLHLGYVAAPHSMFRDIRKLPPATLLSVENGEVRQWRYWRLPSSVARYVTEAEWIGRIRDGMERAVHRQMVSDVPIGAFLSGGVDSSAVVAFMAKHSAHPIRTYAIGFEGGEAEQLYNELPYARQVAQLIGTEHHEIVVTPDVVGLLPKLLWHMDEPVSDSAFITTFLVSEFARRDVKVILSGVGGDELFGGYRRYLGGHYVRKLQRLPRWSRQLMSRTAAMLPSDRHSKVLNTMRLARGFLASAELSPDERYRHYLQVLDRASIAELMNGRTGTTDALRDAFAAAGDEDALNRMFAVDAETQLPDDLLLLTDKMSMAVSLECRVPLLDRELVELAAAIPEALKVRDGRLKHLMKEALADVLPASILDRKKRGFGTPMGAWLKRDLAPVLRRLLSADVVRDRALFEPKVIARLMADHDANRIDGTDALLALMNLEIWSRIFLDRRSPDDVTTELKAYLP

SEQ ID NO: 40731 - protein, 416 aa, Aspergillus niger
MDSSKSPPSLRTSLRAALHRRKSKQSLRRLTLIPETSTDFSSNDFLSLSTSPLFRARYTSHLAQAPPFYPFASGGSRLLTGNSPYAEALESFIADFHNAPSGLLFNSGFDANVGVLSCIPQPGDIIIHDEYIHASAHEGMRLSRAGKKIPFAHSCPRSLEDVLRREVEGDEMVRNGKKNVFLVIESIYSMDGDIAPIREFVEVVERVVTAGNAYFVVDEAHATGAFGPRGAGVVQELGVEEKMFIRVHTFGKALASHGAIVLCCPDTREYLINYARSLIYTTALGFPFLASIRTAYELLSEGETEVPQRNLQHLIQYLGNRLDGLGSWDPAIFEVDHFPRSPIFSLRSPVPRQLAAACQQRGFMVHPIMSPTVPKGKERVRVCLHAGNTVEEIDGLVETILEWLNGRESEKRVARL

SEQ ID NO: 40732 - protein, 130 aa, Brassica napus
  misc_feature (125)..(125): Xaa can be any naturally occurring amino acid
  unsure (1)..(130): unsure at all Xaa locations
MDEKLVKKRRIVLVPVPAQGHVTPIMQLGKALHSKGFSITVIQTQYNRVSSSKDFSDFNFLTIPGSLTDSDLKNLGPVQFLMKLNQACEASFKQCLGQILKEQGDNDEIACVIYDEYMSLSKAAXKEFQL

SEQ ID NO: 40733 - protein, 474 aa, Oryza sativa
MPPQEPAPAANGAAPAPAPAAAAAAAGGKRRKRGRWAAAAGVGALLVALLAVAVSSRSFPAASSSSRGGDCGCPGTRKYTGMVEDCCCDYETVDAINEEVLHPILQELVTLPFFRYFKVKLWCDCPFWPDDGMCRLTDCSVCECPENEFPEPFKKPYSGLSPDSMICQEGKPQATVDRTLDAKVFKGWIETDNPWTYDDETDNAEMTYVNLQLNPERYTGYTGDSARRIWDSVYKENCPKYPSEEMCQEKKALYKLISGLHSSISVHIAYDYLLDESANLWGHNLPLLYDRVLKYPERVQNLYFTYLFVLRAVTKAADYLEQAEYNTGNPEEDLKTQSLVKQLLYNPKLRSACPLPFDEAKLWQGENGPELKQEIQKQFRNISAIMDCVGCEKCRLWGKLQVLGLGTALKILFSVDGENHLNQSLQLQRNEVIALVNLLNRLSESVNFVHEKGPSIEDVIKQQSSSTVKPVFPI

SEQ ID NO: 40734 - protein, 873 aa, Eucalyptus camaldulensis
MEGLMRNRGGVLCGVSLSVCGQEEMQAFSRDGSSQYSPATGILLSLGARSNRAVQLRSFIVSSLDRRYRIWENFLVLLVVYTAWASPFEFGFLKKPKPPLSIIDNVVNGFFAIDIVLTFFVAYLDKATYLLVDDPKKIAWRYTTSWFALDVISTIPSELAQKISHSPLGGYGLFNMLRLWRLRRVSALFSRLEKDRNYNYFVLRCAKLLCVTVFAVHCAGCFYYLLAARNHDPAETWMGKAILHDGLGIRYVTSLYWSITTLTTVGYGDLHPVNVREMLFDIFFMLFNLGLTAYLIGNMTNLVVHGTSRTRKFRDTIQAASSFAQRNQLPPRLQDQMLAHLCLKYRTDSEGLRQKETLDSLPKAIRSSILHYLFYNIVDRVYLFRGISNDLLFQLVSEMKDEYFPPNEDVILQNEAPTDFYILVTGAVDLLVVKNGTEQPVGEAKSGDICGEIGVLCYRPQLFTVRTKRLSQLLRLNRTTLFNIIQSNVEDGTIIMNNLLQHLKDLKDPTMESILIDAENMVAHGQLDLPLSLCFATLRGDNLMLSQPLRRGLDPNESDNSGRTPLHIAASKGSENCALLLMDYGADPNSRDSEGNVPLWEAIKGGSEPVVKLLALNGANLVSGDVGQFSCTAAEQNNLDLLKEISRYGGDVTLPKSNGTTALHVAVSEDNIEIVKFLLDRGADINKPDIHGWTPRDLADQQGHEEIGILFQSIKETEMPPAIRSEPNLPPASQEKTVDAAFGQSRPRRRTSNFHNSLFGIMSAARDGEGDVLLSINHNKSANKPFVARPAIRVVVSCPEVGDVEGKLMLLPENFQELLEMARKKFGLTLLKVLTKNGAEIDDVAVIRDGDHLVFLSKEVKDDFANRNDKKVQ

SEQ ID NO: 40735 - protein, 482 aa, Debaryomyces hansenii CBS767
MVHLGPKPPQHRKGTFTDVPEDLMKELNELEELLTVSPDTLKKITEHFIGELEKGLSKQGGNIPMIPGWVLDFPTGKEKGDYLAIDLGGTNLRVVLVKLGGNRDFDTTQSKFALPETMRTATSDELWTFIAECLKKFVQEEFPQGCTKPLPLGFTFSYPASQKSINTGVLQRWTKGWDIDGVEGHDVVPMLQKAIEKVGVPINVVALINDTTGTLVASMYTDAETRMGLIYGTGCNGAYYDVVSDIPKLEGKMPSDVDQSAPMAINCEYGAFDNELVVLPRTKYDILIDKQSPRPGQQSYEKMISGYYLGEVLRLILLDLAKEKKLIFKGQDLSKLETEFILDTSFPSRIEEDPFENLSDTAELFQKELGIQTTSPERKIIRRLAELIGERSARLFVCGIAAICKKRGYKTAHCAADGSVYNKYPGVKERTAKALRDIFEWETKEDLITIVHAEDGSGVGAAVIAALTEKRLEQGLSVGIQD

SEQ ID NO: 40736 - protein, 478 aa, Enterococcus faecalis V583
MKNQHLTTSQGSPVGDNQNSLTAGEFGPVLIQDVHLLEKLAHFNRERVPERVVHAKGAGAHGIFKVSQSMAQYTKADFLSEVGKETPLFARFSTVAGELGSSDTLRDPRGFALKFYTDEGNYDLVGNNTPIFFIRDAIKFPDFIHSQKRNPRTHLKSPEAVWDFWSHSPESLHQVTILMSDRGIPLSFRHMHGFGSHTFKWVNAAGEVFFVKYHFKTNQGIKNLESQLAEEIAGKNPDFHIEDLHNAIENQEFPSWTLSVQIIPYADALTMKETLFDVTKTVSQKEYPLIEVGTMTLNRNPENYFAEVEQVTFSPGNFVPGIEASPDKLLQGRLFAYGDAHRHRVGANSHQLPINQAKAPVNNYQKDGNMRFNNGNSEINYEPNSYTETPKEDPTAKISSFEVEGNVGNYSYNQDHFTQANALYNLLPSEEKENLINNIAASLGQVKNQEIIARQIDLFTRVNPEYGARVAQAIKQQA

SEQ ID NO: 40737 - protein, 477 aa, Enterococcus faecalis V583
MKRVIWFRRDLRLQDNKALAHALQNSAADELILLFQMNPQQFIQESANHNAFFASLASFKERIDQEAHLQIMVGEPLDLFSRLKRKLPDWQAIYFNEDTCGFGAKRDQQAMRFFEENNIQSFSFQDAYLHGSEEIKKNDGSKYQVFTPYYNKWKEAPKETPIPVSYTAEKIFSACLFPEEEAAYREQIARIPLTHYSVGEETARRRLNTFIDQKLQSYENKRDFPYQDQTSHLSTFLRTGELSIRTIWQELASVPSSLSKETFKKELAWRDFYNMIYSAFPQQKEEAIQEKFRYIQWTNDPEMFVKWQKGETGYPIIDAAMRQLNQTGWMHNRLRMITASFLVKNLHIDWRWGEKYFQKMLIDYDAANNIGGWQWAASTGTDAVPYFRIFNPIIQSKKFDNDGQFIKKYVPELKQVPQKYIHQPNLMNEALQTQYHVHLGENYPKPIVDYASSKKQTLFLYEASKEIHQEMNNPRFQ

SEQ ID NO: 40738 - protein, 277 aa, Glycine max
MASGRSYGDANQKVDYVFKVVLIGDSAVGKSQILARFARNEFSLDSKATIGVEFQTRTLVIQHKSIKAQIWDTAGQERCYVLFQIPNDIQKSYLCHFNCIFCIYVMENHMVGFIRNYSCLEVSYLLNNVTVGYRAVTSAYYRGAVGAMLVYDITKRQSFDHIPRWLEELRNHADKNIVIILIGNKSDLENQRQVPTEDAKEFAEKEGLFFLETSALEATNVETAFMTVLTEIFNIVNKKNLAAGDNQGNGNAASLSGKQIIVPGTAQEIPKRSMCCQ

SEQ ID NO: 40739 - protein, 396 aa, Escherichia coli
MFENITTAPADPILGLADLLRADERPGKIDLGMGVYNDETGKTPVLTSVKKAEQYLLENETTKNYLGIDGIPEFGRCTQELLFGKGSALINDKRARTAQTPGGTGALRVAADFLAKNTSVRRVWVSNPGWPTHKSVFNSAGLEVREYAYYDAENHTLDFDALINSLNEAQAGDVVLFHGCCHNPTGIDPTLEQWQTLAQLSVEKGWLPLFDFAYQGFARGLEEDAEGLRAFAAMHKELIVASSYSKNFGLYNERVGTCTLVAADSETVDRAFSQMKAAIRVNYSSPPAHGASVVATILGNDALRAIWEQELTDMRQRIQRMRQLFVNTLQEKGANRDFSFTIKQNGMFFFGGLTKEQVLRLREEFGVYAVASGRLNVAGMTPDNLAPLCEAIVAVL

SEQ ID NO: 40740 - protein, 180 aa, Oenococcus oeni
HGAAIGEENVAKTRDFYHWSYQPFEIPKDVYDLFNDSHQAKDQYYKSWQESFELYAKAFPQLAEQLKNNDSTLNTANLKLAENNGQELATRVSSSEVMQQIADQNRTFWGGSADLSSSNKTYLKDQGDFTDLTPQGSNVFYGVREFTMAAITNGILLHGNSRAFASTFFIFSDYMKPAIR

SEQ ID NO: 40741 - protein, 469 aa, Zea mays
  misc_feature (20)..(20): Xaa can be any naturally occurring amino acid
  unsure (1)..(469): unsure at all Xaa locations
MGFGMGNNNNGASSSSSRLXRRAPLLPRHGSSGGREGGGLSSQPKTFANVFIAVVGAGVLGLPYTFSRTGWAAGSLLLFSVAALTFYCMMLLVACRRRLADEHPKIASFGDLGDAVFGAHGRFAVDVMLVLSQFSFCVGYLIFISNTMAHLYPITAAASSSSALLSPKALVIWAMLPFQLGLNSIKTLTLLAPLSIFADVVDLGAMGVVLGQDVAAWLAKPVPVVAFGGAGALLYGLGVSVYAFEGIGMVLPLEAEAANKSKFGVTLGLSMAFIAVMYGLFGVMGYVAFGDATRDIITTNLGAGWLSAAVQLGLCINLFFTMPVMMNPVYEVAERLLHGKRYCWWLRWLLVVVVGLAAMYVPNFTDFLALVGSSVCVLLGFVLPASFHLKVFGAEMEWPGVLSDVLLVVIGLALAVFGTYTSLLQIFQSSIIAFSRATTIHVLSVVREWLVLDGGNLYAFRTTDFSYSR

SEQ ID NO: 40742 - protein, 611 aa, Ustilago maydis 521
MSLRLTAARLARVNANRAHCLTTPSSSLARLSLCSSLVGEHFRSATFSTAAVRMSSIAATSLNPPPAPLRVKPPTAEQEQADYEAAVKQVQDWFDSPRFKGIKRPYGPEAVVSKRGSMPVQPPASSLAADKLFAILSEHAAKGTPAHTMGAIDPVQQSQMAHNQEVVYVSGWACSSVLTTCNNEVGPDLADYPYTTVPNQVQRLFKAQQHHDRKHWDERCQLTPEQKAKTPWVDYLRPIIADADTGHGGLSTVFKLAKLFAEQGAAGIHLEDQLHGGKKCGHQAGKVLVPTSEHVNRLTATRFAWDILGSANILIARTDSESAKLISSSIDARDHEFIKGAYNLPEGTKSLADTLAAKEASGASGPEVDAVEKAWMDKCELLTFNEAVAKHNASNKKGIEVYSQKVAGGVSNGEARAIAKEVFGAEGVPTWCWDAPRTKEGYYHFKGGVAAAIKRVKIFGAYADMLWLETKTPDLKQAQTFAADIHRDLPGKWLVYNLSPSFNWSAHGFSDQDLKNFVWDLAKSGFVFQLISLAGLHSTGAMTCELSQRFKTDGMLAYVELVQRKEKEIGCDVLTHQKWSGAAYVDRMLQAVSSGSSATQAMGADSTESTF

SEQ ID NO: 40743 - protein, 157 aa, Solanum bulbocastanum
DPDSLIEIYPEDGDREGFAVSDIEGKPERLRSYVMYLDADTLQRYATLRSKEAVTVIEKQTQALFGRPDIKVSGDGTLDVSNDEVLSVTYSGLTMLVLEAVAFGSFLWETESYVELGMGPNPELIDCQWLFELLPEQERVARAGQGTEGTWLSNSQI

SEQ ID NO: 40744 - protein, 180 aa, Oenococcus oeni
HGAAIGEENVAKTRDFYHWPYQPFEIPKDVYDLFNDSHQAKDRYYKSWQESFQLYAEAFPRLAEQLENNDSTLNTDNLKLAENNDQELATRVSSSEVMQQIADQNRTFWGGSADLSSSNKTYLKDQGDFTDLTPQGSNVFYGVREFAMAAITNGILLHGNSRAFASAFFIFSDYMKPAIR

SEQ ID NO: 40745 - protein, 377 aa, Solanum bulbocastanum
MDYRVLSYVSKSITPFSLLLLLYIFPATETTAAAANTTYKAFNLSTITFEEGYSPLFSDFNIERSPDDRSFRLLLNKFSGSGVISTEYYNYGFFSASIKLPAIYTAGIVVAFYTSNADTFEKNHDELDIEFLGNVNGQPWRFQTNMYGNGSVSRGREERYRMWFDPSKDFHQYSILWTPKNIIFYIDETPLREVNRHPAMGGDFPSKPMSLYATIWDASSWATNGGKAKVDYKYEPFATELKDLVLEGCIVDPTEQIPSTNCTDRSAKLLAQDYSYITPERRKSMKFFRERYMYYSYCYDNLRYPVPPPECVIVQSERDLFRDSGRLRQKMKFGGSHSHSHSQTHRKHRPGRSSRRRNKVVGGASKSGRRGSAAAAM

SEQ ID NO: 40746 - protein, 432 aa, Solanum bulbocastanum
MATLRYLLSKSSTPLKLSNPFHLHRSNNFPHISQFLGALNSFVSREFHCHSPNSRSFSTSPEYVAQDSDSSIAAALSLDSRVPATVITGFLGSGKTTLLNHILTSQHGKRIAVIENEFGEVDIDGSLVASHSSSNEEILMVNNGCLCCTVRGDLVKMLLELVKNRRDRFDHIVIETTGLAKPGPVIETFCSDELVSRHVKLDGVVTLVDCKHALQHLNRVKPRFVSNEAVEQVAYADRIILNKIDLVTESELELLTKRIKHINGMAQIKRAKHGVVDMDFVLGVGGYDLDRVDSEVQSEGSHCGHKHEDGHEHHKGHHHDHVHDSAVSSVSIVSEGTLDLDEVDDWLERLIEENGDDLYRMKGVLSVSDSEQRYVFQVLINFVFVGVHSILDGCPGKTWEPNEKRINKLVFIGRNLDETALRKGFKGCLCEE

SEQ ID NO: 40747 - protein, 113 aa, Oenococcus oeni
DIKLLVVSDAEGILGIGDWGVQGVDIAVGKLMVYTVAAGIDPSTVLAVVIDAGTNNEKLLKDPMYLGNKFNRVRGDKYYDFIDKFVNHAESLFPNLYLHWEDFGRSNASNILN

SEQ ID NO: 40748 - protein, 236 aa, Solanum bulbocastanum
MSGNSTSVVGAGGGGGGEGGMGYGYGYRPPFTAVQWQELEHQAMIYKYLVAGLPVPPDLVVPIRRSFEAISARFFHHPSLGYCSYYGKKFDPEPGRCRRTDGKKWRCSKDAYPDSKYCERHMHRGRNRSRKPVESQSTSQSLSTSMSQITTGSSNTKGSFQNSSSRTFQNMPLYSVANSGTLNYGSTATKLQMEPASYGIDNKDYRYLGFVLRSSSYAWITENNVSSSLDPGHFLF

SEQ ID NO: 40749 - protein, 322 aa, Arabidopsis thaliana
MADGGKMVCVTGASGYVASWIVKLLLLRGYTVRATVRDPSDEKKTEHLLALDGAKEKLKLFKADLLEEGSFEQAIEGCDAVFHTASPVSLTVTDPQIELIDPAVKGTLNVLKTCAKVSSVKRVIVTSSMAAVLFREPTLGPNDLVDESCFSDPNFCTEKKLWYALSKTLAEDEAWRFAKEKGLDLVVINPGLVLGPLLKPSLTFSVNVIVELITGKDNFINKDFRLVDVRDVALAHIKAFETPSANGRYIIEGPVVTINDIEKILREFFPDLNLGNKGEASEIIPVIYKLCVEKVKSLGIEFTPTEATLRDTILSLKEKCLV

SEQ ID NO: 40750 - protein, 113 aa, Oenococcus oeni
DIKLLVVSDGEGILGIGDWGVQGVDIAVGKLMVYTVAAGIDPSTVLAVVIDAGTNNEKLLKDPMYLGNKFNRVRGDKYYDFIDKFVNHAESLFPNLYLHWEDFGRSNASNILN

SEQ ID NO: 40751 - protein, 462 aa, Bacillus thuringiensis serovar konkukian str. 97-27
MTFSKSTTDKPSYTYEELSEKNKAYVWHPFTQMKDYLEEDPVIIERGEGRKLYDVNGNEYWDGVSSIWLNVHGHQVPELDEAIREQLNKIAHSTMLGLANVPSILLAEKIIEVVPEGLKKVFYSDSGSSAVEIAIKMAFQYWQHKGKPKKQRFVTLKEAYHGDTIGAVSVGAIDLFHQVYSSLLFEAIKMPYPYTYRSPYGNDKAEIVKKHLEEMEELLKDKHEEIAAIIVEPLMQGAGGMITMPKGYLRGLRNLCTKYNVLFITDEVATGFGRTGKMFACEHENVTPDILTAGKGLTGGYLPVAITVTTDEIYNAFLGSYEEQKTFFHGHSYTGNPLGCAVAIANLELYEKTNLIEEVARKTEYVATQLEELFACKHVGDIRQCGLMVGIELVKNKETKEAFEWTERVGVQVCKRSRELGMILRPLGNTIVFMPPLASTIDEIDEMLRILYKAISDITEGE

SEQ ID NO: 40752 - protein, 605 aa, Methylobacterium extorquens
MASNGTNGGAPAYAIIDHTFDVVIVGAGGAGLRATVGCSQAGLRTACITKVFPTRSHTVAAQGGISASLGNMGPDDWRWHMYDTVKGSDWLGDQDAIEYLVRNAPAAVYELEHWGVPFSRTDEGKIYQRPFGGMTTDYGKGTAQRTCAAADRTGHAMLHTLYGQAVKNKTQFFIEYFALDLIMDEDGRCRGVLAIDQATGEIHRFRAQQTILATGGYGRAYFSATSAHTCTGDGNAMVLRAGLPLQDMEFVQFHPTGIYGAGCLITEGARGEGGYLTNSEGERFMERYAPSAKDLASRDVVSRSMTMEIRDGRGVGKEGDHIFLHLDHLDPKILHERLPGISESAKIFAGVDVTKEPIPVLPTVHYNMGGIPTNFHGEVLTLKNGNPDTVVPGLMALGEAACVSVHGANRLGSNSLIDLVVFGRAAGLRCADIVEPDARQPELPKGSADKALTRLDRFRYADGGTPTAQLRDRMQRTMQNNCAVFRTGEVLEEGKGLIHEVWRGVSDIAITDRSLVWNTDLLETLEFDNLIGQAVVTMESAVNRKESRGAHAREDFPDRDDKEWMKHTLAWLDQSKHGVEIDYRPVHTYTMSNDIQYIEPKARVY

SEQ ID NO: 40753 - protein, 234 aa, Solanum bulbocastanum
MYHRYLHGITPDADEHNLSSEASATVRSLGMGTNTDSTWVLPSQVSSSPMARSKNDSQLLGSSTEMHLPNLLEPMIDATISKRRHQHCFFGSDIDSPGTVKEEQHSMRPFFNEWPTAKESWSNLDDEGSNKNNFSTTQLSISIPIAPSNFSSRSACSPNEPTTLNTTSTLQESGSFYAERLQMGSSIQKCNSFNLSTDKCLTQYAEGMEMGNSSFSLIDFKAECSNDRKDRKLP

SEQ ID NO: 40754 - protein, 410 aa, Streptococcus agalactiae NEM316
MTLQRVVVTGYGVTSPIGNTPEEFWNSLKEGNVGIGPITKFDSSDFMVKNAAEIHDFPFDKYFVKKDLNRFDMYSLYALYASSEAIQHANLNLDEIDADRFGVIVASGIGGIQEIEEQVIRLHEKGPKRVKPMTLPKALPNMAAGNVAMRLGAHGVCKSINTACASSNDAIGDAFRNIKFGIQDIMVVGGAEAAITKFAIAGFQSLTALSTTEDPSRASIPFDKDRNGFIMGEGSGMLVLESLEHAEKRGATILAEVVGYGNTCDAYHMTSPHPEGLGATKAIQLALVEANIKPEEVNYVNAHGTSTPANEKGESQAIVAALGTDVPVSSTKSFTGHLLGAAGAVEAIATIEAIRHSYVPMTAGTTELSEDITANVIFGQGQDADIRYAISNTFGFGGHNAVLAFKRWED

SEQ ID NO: 40755 - protein, 452 aa, Magnetospirillum magnetotacticum MS-1
MISGRTQAAGLPEAPSMDKATTQPPLVPTTGVDYQPVVTLNGWTLPWRMRGDWKEFHLVAEPVVREMAPGMKAHLWGYNGQSPGPTIEAVEGDKVRIFVTNKLPEATAVHWHGQTLPNGMDGVAGLNQPGIPPGKTFVYEFILRRSGTFMYHPHSDEMIQMAMGMMGFFVVHPRDPAERRVDRDFVWLLNAYDIEAGSYVPKVNTMLDMNMWCFNSRVWPGIDPVVVRQGDKVRMRFGNLTMTNHPIHVHGVDFKVTGTDGGWIDQDRQWPEVSVDVAVGQMRAIEFNADALGDWAMHCHKSHHTMNAMGHSVRTYIGVNLKSTAKQIQKIAPGYMPMGSTGGGMMTEMEMPLPENTLPMMTGAGPFGSVEMGGMFTVLKVRAGLAANDYRDPGWYQHPPGTLAYEWTGDPLPEPSRDPKTPRGKRARETDLHVVDPRTRRTASNSGGHENH

SEQ ID NO: 40756 - protein, 118 aa, Brassica rapa subsp. pekinensis
  misc_feature (6)..(7): Xaa can be any naturally occurring amino acid
  unsure (1)..(118): unsure at all Xaa locations
LGPFMXXGMEVEAHHFDPVASKLAWEQVFKLFYGMTTDQAVVEEEEAKLATVLDVYEARLKEFKYLAGETFTLTDLHHIPVIQYLLGTPTKKLFDERPHVSEWVAEITNRPASQKILQ

SEQ ID NO: 40757 - protein, 448 aa, Pseudomonas aeruginosa UCBPP-PA14
MPTPDKNNKIDVQAFIDAQAVSAFQLRVLSLCFLIVAMDGFDTAAIGFIAPALAHDWQLSPAQLSPILGAALAGLALGAFAAGPLADRFGRKSVLLLSVLFFGGWSLASAYAGSVETLALLRFFTGLGLGGAMPNAITLTSEYCPRRHRALMVTAMFCGFTLGSALGGLLAARMVPALGWESVLLLGGGLPLASLPLLWACLPESVRFLARRAPDAARLRRILERLGRLPDGWAGRLELPADESDGTSPLRQILGAELRGGTLLLWATFFMGLLIIYLLTNWLPTLIGGTGFSLGEAATISAMFQLGGTLGALLLGSAMDRFDAHRVLSLAYVGGALFILGIASLYHSFALLALCVAGVGFCISGSQVGANALAADFYPTRSRATGVSWALGLGRIGSIVGSLSGGALLGLGLGFSGILALLVIPALLAAVAVHRLGRRRARPSSVTL

SEQ ID NO: 40758 - protein, 502 aa, Lycopersicon esculentum
MVLTTTSIRDSEESLHCTFASRYVQEPLPKFKMPKKSMPKEAAYQIVNDELMLDGNPRLNLASFVSTWMEPECDKLIMSSINKNYVDMDEYPVTTELQNRCVNMLAHLFHAPVGDDETAVGVGTVGSSEAIMLAGLAFKRKWQSKRKAEGKPFDKPNIVTGANVQVCWEKFARYFEVELKEVKLKEGYYVMDPAKAVEIVDENTICVAAILGSTLTGEFEDVKLLNELLTKKNKETGWETPIHVDAASGGFIAPFLWPDLEWDFRLPLVKSINVSGHKYGLVYAGVGWVIWRSKEDLPDELVFHINYLGSDQPTFTLNFSKGSYQIIAQYYQLIRLGFEGYKNVMKNCLSNAKVLTEGITKMGRFDIVSKDVGVPVVAFSLRDSSKYTVFEVSEHLRRFGWIVPAYTMPPDAEHIAVLRVVIREDFSHSLAERLVSDIEKILSELDTQPPRLPTKAVRVTAEEVRDDKGDGLHHFHMDTVETQKDIIKHWRKIAGKKTSGVC

SEQ ID NO: 40759 - protein, 557 aa, Enterococcus faecalis V583
MNRNWWQKEVAYQIYPRSFSDSNNDGIGDLQGIIQKLDYLENLGITLIWLSPMYPSPMADNGYDISDYYGISSDFGTMADFDELIEEAKKRNIKVILDLVVNHTSDEHAWFQDVLKNPQSRFRDFYIIKEGREAPTNWRSNFGGSVWEKLPGEDAYYFHAFHKKQPDLNWENPELRKEIYQMIRFWLNKGIAGFRVDAINFIKKDLTWTNLPADGADQLAKVTKASRNMPGMSDFLNELKEKAFAGFDIVTVAEAAGVNYLNLSEFIGETGYFDMIFDFKWADLDVKSGSEWFYRIDWSWNDLRTLIFKQQEAMQEAGWSANFIENHDQPRATTKYLKEQAQQPNAVKTFGAMYFFLRGTPFIYQGQELGMTNFERGSIDEFDDISSIDQYYRAIKEGFTPKEALSLVNLRSRDNARTPFPWNDSMYGGFSSVKPWLGMVDNYKEINAEAEIKNSQSIFHFYKRMIAFRQKSPYTDILLYGTFEGLSNLPDNVIAYKRKLNEKTIYAFFNFGEAVPIPHYLVNGTVIFDTQSEEREQLVQQGTLLKSYQGLLITINE

SEQ ID NO: 40760 - protein, 158 aa, Listeria innocua Clip11262
MNVHDFSEKAMNGKEIALSDYKGKVLLIVNTASKCGLTPQLEGLEKMYKKLGGDNFEILGFPCNQFLRQDPGSDEEILEFCQMNYGVTFQMFSKIKVKGKDAAPLYKYLTEQTGGKKVEWNFAKFLIDENGEVVERFPSKMKPEDFEDKVEALVAAVK

SEQ ID NO: 40761 - protein, 149 aa, Arabidopsis thaliana
MANSSFKLEHPLERRQIESSRIREKYPDRIPVMFSSIYVPLCVIVERAERSDVPNIDKKKYLVPADLTVGQFVYVVRKRIKLSAEKAIFVFVKNTLPPTAAMMSAIYDENKDEDGFLYMTYSGENTFGVYYMLFYNTMNMQKLYVLLLM

SEQ ID NO: 40762 - protein, 488 aa, Pseudomonas aeruginosa UCBPP-PA14
MSSPSLVELKAILRLAGPLIAAQLAYVAMVFTDTVMMGKLGPDALAAGGLGAVSYAFVSTFCVGVVAAVGNLVAIRHGCDDAAGAAAAARSGLWVGAALALAAGLLLWNLRPLLLLFGQAPQTVDGAMQFLHSLTFALPGYMAFMVLRGFTSAIDRAGPVMAISVLGALANLALNYSFIEGLFGLPRLGLAGIGLVTALVMNCMPLLLALYIRRQPAYAAYSLLRGLGRPQRAMVEEILRLGLPIGGTYAVESGMFTVATLCMGIIGDHALAAHQIAIQAVYVAFMVPVGLSYATTYRIGQHFGAGRLLEARRAGRVGIGFGALCMLLFAGLFWWMPEAIIGLFLDRDAPANREVAAMAVSLLAIAAWFELFDGTQNVAMGAIRGLKDARTTFLVGLACYWLVGVPLACLLAFAAGWGAAGVWWGLAGGLACAAIGLTLAFEWKTARLLPKATASETSALNCRAAGRGAPSARRCPGNAPVPPAAAAD

SEQ ID NO: 40763 - protein, 619 aa, Azoarcus sp. EbN1
MINRPWISSDMHRKVEGPRLLARITGAISRNAPLHGAGRSNSLSGLVEFRSGFCSHDGGVAVHRAGDLVCMALGSPRFEPGALHERASTAGIAAAWLDAFRERGARAPAAAKGRFAVVVLNGGEGSAWLAVDRFGTHPLCHAIEDGMLAFATRADEVPVVAKALDTQALFDYLYFHMIPAPRTVFAGVERLLPGHVLHWRDGKARSERYWTPRFAPDRSLDLEAGKLRFLEIVESAVARETSDGQPGAFLSGGTDSSTVSGMLCRVLGRPAPTYSIGFDAAGYDEMAYARIAAKHFGTDHHEYYVTPDDLIEGIPKVAAYYDEPFGNSSVVPSWLCARNARNDGITRMLAGDGGDELFGGNSRYAKQRIFGFYDAVPGVLRSSMLEPMLGLRGMDRVPVVKKAASYVSQARVPLPDRMGMYNLLLRLGPTHVLTADFLGLVQQEAPLAAQRTVWAETAGQPLVNRMLAFDWKYTLADNDLSKVLGSTALAGVEVAFPLLSDELLEFSLTLPAEWKLKGLTLRWFFKEALRGFLPDEIIAKKKHGFGLPFGVWASQHAGLRSMARDSLETLKQRGIVRGAFIDDLLTNLLPAHPGYYGEMVWILQMLELWLREHAPEYRL

SEQ ID NO: 40764 - protein, 382 aa, Arabidopsis thaliana
MYNLPRDLPEEVLCRIPLTSLRPVRSTCKKWSTLSKCGSFAKKHLAQAKVLADAKEFMVVLMMNFRVYLMRVNLQNNVVESSSSSSSSSSSCIKREAKLISLGDEEADISQVFHCDGLLLCISITESKTRLVVWNPYWGHTRLFEPTHQFNKFDSYSYALGYDKSRKSHKILRGITCLDPFKIYDFNSDLWRDLDVTPEWHLWQMLHGVSLKGNAYWFARENYTETMDTDHFFLLCFDFTSETFGPPLPLPFEFAVSEDTMSVSSVREEQLVVLYQPWDYLQLDIWVTSKIEPNAVSWNSKVFLSVSLKQLVSPQFQLTFGSFFIDEEKKVAVVFDKDYDNKRNIAYIFGVDGSFKAVDLGDSDRKCFPLVCSYVPSLVQLN

SEQ ID NO: 40765 - protein, 211 aa, Mycobacterium tuberculosis H37Rv
MANTDRPALPHKRAVPPSRADSGPRRRRTKLLDAVAGFGVTLGSMFKKTVTEEYPERPGPVAARYHGRHQLNRYPDGLEKCIGCELCAWACPADAIYVEGADNTEEERFSPGERYGRVYQINYLRCIGCGLCIEACPTRALTMTYDYELADDNRADLIYEKDRLLAPLLPEMAAPPHPRTPGATDKDYYLGNVTAEGLRGVRESQTTGDSR

SEQ ID NO: 40766 - protein, 326 aa, Streptomyces coelicolor A3(2)
MTWLITGGAGYIGAHVVRAMTEAGEKAVVYDDLSTGIAERVPDGVPLVVGSVLDGERVARALADHSVTGVVHLAAKKQVGESVDLPLHYYRQNVEGLRVLLDAVTAAGVPSFVFSSSAAVYGMPDVDLVTEETPCVPMSPYGETKLAGEWLVRATGRATGLATASLRYFNVAGAASPDLVDTGVYNLVPMVFEKLTESAAPRIFGDDYATPDGTCVRDYIHVVDLAEAHVAAARALQSSPGTALTLNIGRGEGVSVREMIDRINAVTGCDQPPTVTPRRPGDPARVVASADRAAVELGWKAKYDVEDMITSAWAGWVRLHPEAARD

SEQ ID NO: 40767 - protein, 552 aa, Triticum aestivum
MSFVGRVDPSTTYADNIYVHKFGAPNSNFAARRFGSDTQLFRYGPEPFNSEDYGHMGFPEAPSAAFQNSFYNQQASLTPCSDAEKDSPVFSNVSQQNSQSISDNQSSGLEVEFDDEIRLKLQELEHALLDDGDDILFEISQAGCISDEWADPMKDVLLATSPKESESSISCAGSNSGEARTPKQLLFDCATALAEYNVDEAQAIITDLRQMVSIQGDPSHRIAAYLVEGLAARIVASGTGIYKALTCKDPPTLYQLSAMQILFEICPCYRFGFMAANYAILEACKGEERMHIIDFDINQGSQYITLMQFMKDDANKPRHLRITGVDDHETVQRTVGGLKVIGQRLEKLAEDCGISFEFRAVGADIGDVTPAMLDCRPGEALVVNFAFQLHHLPDESVSIMNERDQLLRMVKGLQPKLVTLVEQDANTNTAPFQTRFREVYDYYSALFDSLDATLPRESPDRMNVERQCLAREIVNILACEGPDRVERYEVAGKWRARMTMAGFAPCPFSSNVIGGIRSLLSSYCDRYKFEEDHGGLHFGWGEKTLIVASAWQ

SEQ ID NO: 40768 - protein, 450 aa, Lactobacillus acidophilus NCFM
MRRGKNLEQKKSGLPTLASTTIWMISLGYLGVQIAFTLETSQMSRIFQTLGADPTKLGWFFILPPLAGLLVQPGIGSLSDRTWIPKIGRRLPYLLIGMVFAVITMIILPNVGSFGLGYGSLEALVFGAVAIAVLDVASNMAMQPFKMMIGDMVNDDQKSYAYGIQSMLSNFGAVIAAFFPFLLTSLGVANTAKKGVVPQSVVISFYVGAAVLVVTSLFTIFRVHEYDPETYARYHGIKESDNKEGGGWIELLKKAPKVFWQVSLVQFFSWISFQYLSTYATGAIAQNVWHTTSASSSGYQIAGNWFGVLTAVQSIAAVIWSYVLAKVPNNHHKLGYGVSLFLGAIGYTSIFLVHSQMMLIVSFILIGISWAGMNTYPLTMVSNALSGKHMGTYLGLFNCSICLPQIVASLLSFIIFPLVGNSMPAMMLITGISGFLAALSVISIKETYVK

SEQ ID NO: 40769 - protein, 199 aa, ASPERGILLUS NIDULANS FGSC A4
MATGPATQSLKCVVTGDGAVGKTCLLISYTTNAFPGEYIPTVFDNYTASVMVDGRPISLGLWDTAGQEDYDRLRPLSYPQTDVFLICFSIVSPPSFDNVKSKWFPEIEHHAPNVPIILVGTKLDLRDDPAQLESLRMRKQEPVTYEQALAVAKEIRAHKYLECSALTQRNLKSVFDEAIRAVLNPRPATKQRNKKCTIL

SEQ ID NO: 40770 - protein, 258 aa, Streptococcus mutans UA159
MKISLLQLDIKDGQSHVNQANVQNLLQEALLEEPDVIVLPELWNSGYALDKLEKIADEDGKVSRPWLSQFAEKHGVTLVAGSVATKRKGQFYNTAYSFSSKGQLINTYDKVHLFGLMAEDKFLTAGQRESHFQIGTVGASHVICYDIRFPEWIRHLMSQDAALLFVSAQWPSSRIEQWRILLQARAIENQAFVIAVNRVGQGLKDQFNGHSLIIDPLGKILLEANDCEGVFSAQIDLNQVKKVRGQIPVFKDRRLELY

SEQ ID NO: 40771 - protein, 415 aa, Candida glabrata CBS138
MAENRSGSNRDASMLDVSDASHQDLNNKSDSLSYSFSQMNVDSPNELEPQLNTRSRSRSTLIFDDDDEIPPYSKHQEHYSGTLSDFEGENSSVASSIDSAENTSESNTVFNNATSTDNTDNTASSQSGTASQQSQSAMNQSGQFDSDSSGSRDPRASNMVPVDITWQQGGNKVYVTGSFTGWRKMIGLVPMPDQPNVLHVKLQLPPGTHRFRFIVDNELRFSDFLPTATDQMGNFVNYLEIAPVAGTDEKPPPLTPQVSGKSGDERKEPMSARSRIALEIEREPDDLGNGYSRFHDTSPLETKYEYTQDIPAVFTDPNVMEQYYLTLDQQKNNHQNMAWLTPPQLPPHLENVILNSYSNAQGESNENNSGALPIPNHVILNHLATSSIKHNTLCVASIVRYKRKYVTQILYAPLQ

SEQ ID NO: 40772 - protein, 275 aa, Pantoea agglomerans
MWNYSEKVKEHFFNPRNAKVVDDANAIGDVGSLSCGDALRLMLKVDPETEIILDAGFQTFGCGSAIASSSALTELIIGRSLTQAQQVSNQQIADYLDGLPPEKMHCSVMGQEALRAAINNFRGEAPDEDHEEGALICKCFAVDEAQIRRAVLANGLTTLEDVINYTKAGGGCTSCHEKIELCLEEILKEHPVKNPVAAKVRDENWLAVEEVVASLRPHIRADGGDMSLVRVDGQEVTVELSGSCSGCMMTDMTLAWLQQKLVERMGRYIRVVSAA

SEQ ID NO: 40773 - protein, 262 aa, Salmonella typhimurium
MERYENLFAQLNDRREGAFVPFVTLGDPGIEQSLKIIDTLIDAGADALELGVPFSDPLADGPTIQNANLRAFAAGVTPAQCFEMLALIREKHPTIPIGLLMYANLVFNNGIDAFYARCEQVGVDSVLVADVPVEESAPFRQAALRHNIAPIFICPPNADDDLLRQVASYGRGYTYLLSRSGVTGAENHHLIEKLKEYHAAPALQGFGISSPEQVSAAVRAGAAGAISGSAIVKIIEKNLASPKQMLAELRSFVSAMKAASRA

SEQ ID NO: 40774 - protein, 577 aa, Zea mays
MYRAAASLASKARQAGNSLATRQVGSRLAWSRNYAAKDIKFGVEARALMLRGVEELADAVKVTMGPKGRNVVIEQSFGAPKVTKDGVTVAKSIEFKDRVKNVGASLVKQVANATNDTAGDGTTCATVLTKAIFTEGCKSVAAGMNAMDLRRGISMAVDAVVTNLKGMARMISTSEEIAQVGTISANGEREIGELIAKAMEKVGKEGVITIADGNTLYNELEVVEGMKLDRGYISPYFITNSKTQKCELEDPLILIHDKKVTNMHAVVKVLEMALKKQKPLLIVAEDVESEALGTLIINKLRAGIKVCAVKAPGFGENRKANLQDLAILTGGEVITEELGMNLENFEPHMLGTCKKVTVSKDDTVILDGAGDKKSIEERAEQIRSAIENSTSDYDKEKLQERLAKLSGGVAVLKIGGASEAEVGEKKDRVTDALNATKAAVEEGIVPGGGVALLYASKELDKLQTANFDQKIGVQIIQNALKTPVHTIASNAGVEGAVVVGKLLEQENTDLGYDAAKGEYVDMVKTGIIDPLKVIRTALVDAASVSSLMTTTESIIVEIPKEEAPAPAMGGGMGGMDY

SEQ ID NO: 40775 - protein, 460 aa, Polaromonas sp. JS666
MSRLVVVSNRVADPRKTAAGGLAVALGDALNATGGMWFGWSGTVIEGGAPGEGELHVQQAGNVKLATVDLSAEDHAGYYLGYSNGVLWPVFHYRIDLARFDAGNIRAYRRVNQLFARKLMTQLRPDDIIWVHDYHLIPLAAELRAMGATQRIGFFLHIPLPPQQVLAAIPQHEWLMRAMFAYDLLGFQSEADLQNFSHYVQAEAGAEDLGDNRFRAFNRTVRAGAFPIGIDVDEFAALTHAKEGHDMYERMKDEYSRRKLLLGVERLDYSKGLPQRLRAFKSLLEKYPENIRSATLIQIASPSREDMGTYTDLLQELESLCGAINGDFGELDWMPVRYMHRNVARKRLPGLYRVARVALVTPLRDGMNLVAKEFIAAQDPADPGVLVLSRFAGAAEQLKEALLVNPYDTDGTADTIQHALQMSLQERQGRHQRLLKNIREQDVHWWRKTFLDTLRDAGSD

SEQ ID NO: 40776 - protein, 208 aa, Schizosaccharomyces pombe
MSAQKRVFLKVVILGDSGVGKTCLMNQFVNQKFSREYKATIGADFLTKDVVVDDKLVTLQLWDTAGQERFQSLGMAFYRGADCCVIVYNVNNSKSFDSVENWRQEFLYQTSQDECAFPFIIVGNQIDKDASKRAVSLHRALDYCKSKHGSNMIHFEASAKENTNVTDLFETVSRLALENESSRDDFVNDFSEPLLLSKPLNNTSSCNC

SEQ ID NO: 40777 - protein, 504 aa, Debaryomyces hansenii CBS767
MMRLNNDSLTSIGSNKDKKLPPIPNSQENEAKTTNIIPNEDLILESKTLKRKNFKKLSLDSPSTTSTPSASQAENTSTDMGLRYPPSSKSGRIRPAPLMNLNRNSQGKLNINQSNRNIDPDTQSSTDVIINHFSNLELSNMNKRNPSIASRKRQTVISSISPTKSSASSPNDANLNSLNLTDQQSPIATTSSIKLNNNDLLTLKNLGSGNSGTVSKILHIPTQKTMAKKIIHIDLKSVIQTQIIRELRILHECQSPFIIEFYGAFINNNNTIVICMEYCNCGSLDKILPLCQNNQFPLFVLKKLSYAILSGLTYLYSTHKIIHRDIKPSNVLMNHKGEFKLCDFGVLRELTNSLAMADTFVGTSTYMSPERIQGLTYGVKSDVWSMGLMLIELARGIPVWVDDGEEEGPQGPEGILDLLQRIVNEAPPSLANKTNTTTNQPFDDILCKFIDSCLIKDDNLRKSPWDLLNEPQGFISGVEKGLYDKDVKVWAKGIRKLHKEKNES

SEQ ID NO: 40778 - protein, 357 aa, Triticum aestivum
MERYELLKDIGAGNFGVARLMRNKETKELVAMKYIPRGLKIDENVAREIINHRSLRHPNIIRFKEVVVTPTHLAIVMEYAAGGELFDRICNAGRFSEDEARYFFQQLICGVSYCHFMQICHRDLKLENTLLDGSPAPRLKICDFGYSKSSLLHSKPKSTVGTPAYIAPEVLSRREYDGKTADVWSCGVTLYVMLVGGYPFEDPDDPKNFRKTIGRIMSIQYKIPEYVHVSQDCKQLLASIFVANPAKRITMREIRNHPWFLKNLPRELTEAAQAMYYKRDNSAPTYSVQSVEGIMKIVEEAQKPPPSTTPVAGFGWAEEDEQEDGKKPEEEAEEEDEENEYEKQLNEVRASGEFHIS

SEQ ID NO: 40779 - protein, 452 aa, Bartonella vinsonii subsp. arupensis
EDRFENMGAQMLREVASKTNDIAGDGTTTATVLGQAIVQEGVKAVAAGMNPMDLKRGIDAAVDEVVANLFKKAKKIQTSAEIAQVGTISANGAAEIGKMIADAMEKVGNEGVITVEEAKTAETELEVVEGMQFDRGYLSPYFVTNAEKMVADLDDPYILIHEKKLSNLQSLLPVLEAVVQSGKPLLIIAEDVEGEALATLVVNKLRGGLKIAAVKAPGFGDRRKAMLEDIAILTSGQVISEDVGIKLENVTLDMLGRAKKVNISKENTTIIDGAGQKAEINARVNQIKAQIEETTSDYDREKLQERLAKLAGGVAVIRVGGATEVEVKEKKDRVDDALNATRAAVEEGIVAGGGTALLRAANALTVKGSNPDQEAGINIVRRALQAPARQIATNAGEEAAIIVGKVLENNADTYGYNTATGQFGDLIALGIVDPVKVVRSALQNAASIARLL

SEQ ID NO: 40780 - protein, 165 aa, Triticum aestivum
MAVLVARQGRELQRYSASTGGRIVVGCIPYRMRDGGDSDGEGELEVLVISSQKGHGMMFPKGGWELDESMDDAARREALEEAGVRGEMGKVLGCWHYQSRRYQTTYEGIMYPLRVTDELQQWPEMASRKRTWATVQQVMEGCQHCWMREALEELVARHAKPQSAL

SEQ ID NO: 40781 - protein, 454 aa, Bartonella taylorii
EDRFENMGAQMLREVASKTNDIAGDGTTTATVLGQAIVQEGVKAVAAGMNPMDLKRGIDAAVDEVVANLFKKAKKIQTSAEIAQVGTISANGAAEIGKMIADAMEKVGNEGVITVEEAKTAETELEVVEGMQFDRGYLSPYFVTNAEKMVADLDDPYILIHEKKLSNLQSLLPVLEAVVQSGKPLLIIAEDVEGEALATLVVNKLRGGLKIAAVKAPGFGDRRKAMLEDIAILTSGQVISEDVGIKLENVTLDMLGRAKKVNISKENTTIIDGAGQKSEITARVNQIKAQIEETTSDYDREKLQERLAKLAGGVAVIRVGGATEVEVKEKKDRVDDALNATRAAVEEGIVAGGGTALLRAANALTVKGSNPDQEAGINIVRRALQAPARQIATNAGEEAAIIVGKVLENNADTYGYNTATGQFGDLIALGIVDPVKVVRSALQNAAFNCQASHD

SEQ ID NO: 40782 - protein, 937 aa, Zea mays
  misc_feature (522)..(522): Xaa can be any naturally occurring amino acid
  misc_feature (542)..(542): Xaa can be any naturally occurring amino acid
  unsure (1)..(937): unsure at all Xaa locations
EYDALLVDRFLNILQDLHGPSLREFVQECYEVSADYEGKGDTTKLGELGAKLTGLAPADAILVASSILHMLNLANLAEEVQIAHRRRNSKLKKGGFADEGSATTESDIEETLKRLVSEVGKSPEEVFEALKNQTVDLVFTAHPTQSARRSLLQKNARIRNCLTQLNAKDITDDDKQELDEALQREIQAAFRTDEIRRAQPTPQDEMRYGMSYIHETVWKGVPKFLRRVDTALKNIGINERLPYNVSLIRFSSWMGGDRDGNPRVTPEVTRDVCLLARMMAANLYIDQIEELMFELSMWRCNDDVRVRAEELHSSSGSKVTKYYIEFWKQIPPNEPYRVILGHVRDKLYNTRERARHLLASGVSEISAESSFTSIEEFLEPLELCYKSLCDCGDKAIADGSLLDLLRQVFTFGLSLVKLDIRQESERHTDVIDAITTHLGIGSYREWSEDKRQEWLLSELRGKRPLLPPDLPQTDEIADVIGAFHVLAELPPDSFGPYIISMATAPSDVLAVELLQRECGVRXQPLPVVPLFERLADLQSAPXASVERLFSVDWYMDRIKGKQQVMVGYSDSGKDAGRLSAAWQLYRAQEEMAQVAKRYGVKLTLFHGRGGTVGRGGGPTHLAILSQPPDTINGSIRVTVQGEVIEFCFGEEHLCFQTLQRFTAATLEHGMHPPVSPKPEWRKLMDEMAVVATEEYRSVVVKEPRFVEYFRSATPETEYGRMNIGSRPAKRRPGGGITTLRAIPWIFSWTQTRFHLPVWLGVGAAFKFAIDKDVRNFQVLKEMYNEWPFFRVTLDLLEMVFAKGDPGIAGLYDELLVAEELKPFGKQLRDKYVETQQLLLQIAGHKDILEGDPFLKQGLVLRNPYITTLNVFQAYTLKRIRDPNFKVTPQPPLSKEFADENKPAGLVKLNPASEYPPGLEDTLILTMKGIAAGMQNTG

SEQ ID NO: 40783 - protein, 366 aa, Cupriavidus necator
MTAMMKAAVFVEPGRIELADKPIPDIGPNDALVRITTTTICGTDVHILKGEYPVAKGLTVGHEPVGIIEKLGSAVTGYREGQRVIAGAICPNFNSYAAQDGVASQDGSYLMASGQCGCHGYKATAGWRFGNMIDGTQAEYVLVPDAQANLTPIPDGLTDEQVLMCPDIMSTGFKGAENANIRIGHTVAVFAQGPIGLCATAGARLCGATTIIAIDGNDHRLEIARKMGADVVLNFRNCDVVDEVMKLTGGRGVDASIEALGTQATFEQSLRVLKPGGTLSSLGVYSSDLTIPLSAFAAGLGDHKINTALCPGGKERMRRLINVIESGRVDLGALVTHQYRLDDIVAAYDLFANQRDGVLKIAIKPH

SEQ ID NO: 40784 - protein, 423 aa, Bartonella tribocorum
MAGDGTTTATVLGQAIVQEGVKAVAAGMNPMDLKRGIDAAVDEVVANLFKKAKKIQTSAEIAQVGTISANGAAEIGKMIADAMEKVGNEGVITVEEAKTAETELEVVEGMQFDRGYLSPYFVTNAEKMVADLDDPYILIHEKKLSNLQSLLPVLEAVVQSGKPLLIIAEDVEGEAFGNARGQQIARWFENCLLVKAPGFGDRRKAMLEDIAILTSGQVISEDVGIKLENVTLDMLGRAKKVNISKENTTIIDGAGQKAEITARVNQIKAQIEETTSDYDREKLQERLAKLAGGVAVIRVGGATEVEVKEKKDRVDDALNATRAAVEEGIVAGGGTALLRAASALTVKGGNPDQEAGINIVRRALQAPARQIATNAGEEAAIIVGKVLENNADTYGYNTATGEFGDLIALGIVDPVKVVRSAAS

SEQ ID NO: 40785 - protein, 467 aa, Methanococcoides burtonii DSM 6242
MTSRLNRSLFVFRRDMRVDDNSALLAALDMSDVVIPCFILDPRLCDPKGKAFNSNALQFLLESLYDLKGQLEKVNGRLYLFSGLPEGVIGQLLENLEIDAVFVNHDYTPFSIKRDMQIASICTDKGVDMLQFHDCLLHEPGSIRTKKGTPYKVFTQFFREASKRDVAVPSMFSGGSFFTGDCGVDEVDEGSFLKRSLPERNEQIFVHGGRANGLSVLQSLSQFVNYDTERDLPSVKGTTGLSAHNKLGTISIREFYYSVIDELGRGHTLINELYWRDFFTQISFEFPDVFKHAFKKKFDHLSWDNDRIFFDAWCLGKTGFPIVDAGMRELNTTGYMHNRVRMIVASFLVKDLHIDWKRGERYFASKLVDYDPCVNNGNWQWAASTGADSQPYFRIFNPWLQQKKFDKDCKYIKKWIPELEDIEPQRIHKLEKGDMDIPGYPAPIVDHSKEREVALFMFKAASQIMDV

SEQ ID NO: 40786 - protein, 410 aa, Arabidopsis thaliana
MAMSNLPRDLLEEVLSRVPVKSIAAVRSTCKNWNSLTYGQSFTKKLYGKTMATKEKEFLVVMTMDLEVYLMRVNLHGIHKDDNNVKSSIMQKAKLIRLNDDRVRVDDICKVFHCDGLLLCITIGIRLVVCNPYCGQTRCIKTRRDYHITDNYALGHEKMKNSPLRNYKILVFHDKSFLQNSWFEIYNFNSDSWKVLYFTCDWKLPFSQLVVSLKGNTYWFAREMYIHGPRIDLPDFLICFDFTTERFGPRLHLPFHSRCVDTVTLASVREEQLAVLFQDSKTLILEVWITTKIEPNAVSWSSKVFLEVNMSPLTGFQFNRSFGSFFIVEEKNVVVVPIKGGHFKRNLAYIIGKDEYFKEVDLGVPSSYIYFSPHVCSYVPSLVQIKKDAQVMLQHHNVSAEKHHEFCASL

SEQ ID NO: 40787 - protein, 420 aa, Shewanella oneidensis MR-1
MSNVRYISNLTRETYALILAGGRGSRLHELTDWRAKPALYFGGKFRIIDFPLSNCINSGIRRVGVVTQYKSHSLIRHVMRGWGHFKKELGESVEILPASQRYSENWYQGTADAVFQNIDIIRHELPKYVMVLSGDHVYRMDYAGLLAAHAESGADMTVSCLEVPVAEAAGAFGVMEVDDDMRILGFEEKPQLPKHCPGNPEKCLASMGNYVFNTEFLFEQLKKDAQNAESDRDFGKDIIPSIIEKHKVFAYPFKSAFPNEQAYWRDVGTLDSFWLANMELLSPTPALNLYDAKWPIWTYQEQLPPAKFVFDDDDRRGMAVDSIISGGCIISGATVRRSVLFNEVRVCSYSVVEDSVVLPDVVVLRHCKIKNAIIDRGCIIPEGTVIGYNHDHDRAKGFRVSEKGITLVTRDMLGLPVGYE

SEQ ID NO: 40788 - protein, 868 aa, Abies grandis
MAMPSSSLSSQIPTAAHHLTANAQSIPHFSTTLNAGSSASKRRSLYLRWGKGSNKIIACVGEGGATSVPYQSAEKNDSLSSSTLVKREFPPGFWKDDLIDSLTSSHKVAASDEKRIETLISEIKNMFRCMGYGETNPSAYDTAWVARIPAVDGSDNPHFPETVEWILQNQLKDGSWGEGFYFLAYDRILATLACIITLTLWRTGETQVQKGIEFFRTQAGKMEDEADSHRPSGFEIVFPAMLKEAKILGLDLPYDLPFLKQIIEKREAKLKRIPTDVLYALPTTLLYSLEGLQEIVDWQKIMKLQSKDGSFLSSPASTAAVFMRTGNKKCLDFLNFVLKKFGNHVPCHYPLDLFERLWAVDTVERLGIDRHFKEEIKEALDYVYSHWDERGIGWARENPVPDIDDTAMGLRILRLHGYNVSSDVLKTFRDENGEFFCFLGQTQRGVTDMLNVNRCSHVSFPGETIMEEAKLCTERYLRNALENVDAFDKWAFKKNIRGEVEYALKYPWHKSMPRLEARSYIENYGPDDVWLGKTVYMMPYISNEKYLELAKLDFNKVQSIHQTELQDLRRWWKSSGFTDLNFTRERVTEIYFSPASFIFEPEFSKCREVYTKTSNFTVILDDLYDAHGSLDDLKLFTESVKRWDLSLVDQMPQQMKICFVGFYNTFNDIAKEGRERQGRDVLGYIQNVWKVQLEAYTKEAEWSEAKYVPSFNEYIENASVSIALGTVVLISALFTGEVLTDEVLSKIDRESRFLQLMGLTGRLVNDTKTYQAERGQGEVASAIQCYMKDHPKISEEEALQHVYSVMENALEELNREFVNNKIPDIYKRLVFETARIMQLFYMQGDGLTLSHDMEIKEHVKNCLFQPVA

SEQ ID NO: 40789 - protein, 391 aa, Listeria monocytogenes str. 4b F2365
MNQKIKQAVLNNEEAMIAFRRDLHMHPELQWQEFRTTDKVAKELDKLGIPYRRTEPTGLIAELKGGKSGKTVALRADMDALPVQELNQDLPYKSTEDGKMHACGHDAHTAMLITAAKALVEIKDELPGTVRFIFQPSEEIAEGAKAMIAQGAMEGVDHVFGIHIWSQTPSGKISCVVGSTFASADIIQIDFKGQGGHGAMPHDTIDAAVIASSFVMNLQSIVSRETDPLDPVVVTIGKMDVGTRYNVIAENARLEGTLRCFNNITRAKVAKSIEHYAKQTAAIYGGKAEMIYKQGTQPVINDEKSALLVQETITESFGEEMLYFERPTTGGEDFSYFQDEAPGSFALVGCGNPEKDTEWAHHHGRFNIDESVMKNGAELYAQFAYNFLNQN

SEQ ID NO: 40790 - protein, 365 aa, Shewanella oneidensis MR-1
MIVKAIPTNIITGFLGVGKTSLIKQLLKTKPEGETWAVLVNEFGEVGIDACLLAANNSGVQIREVAGGCMCCAAGVPTQVAINQLIARAKPDRLLIEPTGLGHPNEIIKVLSAPHYQHVIRLQSTLCLIDARKLMDERYRGHDNFIQQLQVADVIITTKTDLYPEFEALHDQQLDLELAQYLNALQLVDTPVVEHSASQGLSTRLLEYLKQPRRDIPRAPSYKAASVVSQPQSLLLNSAETLGLQGVFAKSVSEDGDYIEPQERVRKQNQGEGCFSCGWVFNPLQEFDFDKLMQFISEQTQVNPTLLRVKAVMITSDGIAGINWSDGDMAVTELDDSLDSRLEMIATQDLDWDRIEQALVECLVG

SEQ ID NO: 40791 - protein, 208 aa, Triticum aestivum
  misc_feature (70)..(70): Xaa can be any naturally occurring amino acid
  misc_feature (129)..(129): Xaa can be any naturally occurring amino acid
  misc_feature (159)..(159): Xaa can be any naturally occurring amino acid
  unsure (1)..(208): unsure at all Xaa locations
MGHQHQMFEDPFASSISSLEADIFSVAAGHHHPQWPGLDHDVPLAPAANNGTSSGGYGSPGGGDGSGSHXRKISHNAYERDRRKQLNELYSDLRSLLPDTDHTKKLSIPITVSRVLKYIPELQKQVERXLRRRRRSLTRASCKPGVLTMKGDTAPIVSXATCLDDREIMVQVNLVSTMGGVCHVKCSGAETKARLIVVTPVQTDSIFI

SEQ ID NO: 40792 - protein, 235 aa, GIBBERELLA ZEAE PH-1
MGSTQDMTPVKPVLFFDIDNCLYPRSSKVHDLMADLIDEYFSKHLELPWDEAVKLHKEYYTSYGLAIEGLVRHHQIDPLDYNAKVDDALPLEGIIKPNPELRELLEDIDKSKVTVWLFTNAYVNHGKRVVRLLGIEDIFDGLTYCNYAEQPMLCKPDPRMYEKAMREAGIERVEDCYFVDDSGLNCEKAKEFGWTAAHLVEEGVPAPKTPVSQYQIQHLRELRNIYPQFFKSTSN

SEQ ID NO: 40793 - protein, 278 aa, Methanothermobacter thermautotrophicus str. Delta H
MMRVVSVGTCNMDFIFRVQEFVEPDSEMYIDDIHILPGGSALNFAVWISALGFSSDIVAATGGDMYGEIIRSRLESEGVSTGCLSVVEKPTGMAFISVDGSGRRSIYSYMGANAELEIGTPEGRCIRAADAVHLSGCYVEVAQRVAEIREVYFSPGRLLAGYGLDVLEPVLRKTEVLFLNDDELEILTGSRKSGISRLLGVGVDYVVVTHGPGGASFFSADHSLEMKVEDAGAIDTTGAGDAFAAGFMSEWLRGYEPLECLRGGHRAALKVISRFGAF

SEQ ID NO: 40794 - protein, 495 aa, Burkholderia pseudomallei K96243
MSLLMAGSLLAGGIGAAMADDASSAPAAASAATASDTSAGAAASAPAASAAPAAPAAPAASAPAAASAAAPASAAAAPAAPTAPFSVDSSKINSGDTAWMLTSTALVLFMTIPGLALFYGGMVRKKNVLATVMQSFAITALITVLWTVVGYSLAFTPGNGFIGGFSRVFLSGMNYIHGDKATTLTVSHLASTIPESVYFVYQMTFAIITPALICGAFADRMKFSAMLVFMTLWSLIVYVPIAHMVWEPTGWLSADGVLDFAGGTVVHINAGIAGLVSCLMLGKRVGYGREAMAPHNLVLTLIGGSMLWVGWFGFNAGSAVAADGRAGFAMLTTQVATACAALGWMFAEWIAKGKPSVLGIVSGAVAGLVAITPAAGFVGVAGALVIGIAAGVVCFWSATWLKHKLGYDDSLDAFGVHGVGGILGALLTGVFAVKDIGGADGSLLLQAKGVAITLVYSGIVSFVLLKVIDIVIGLRVTEEEEREGLDVILHGEHVE

SEQ ID NO: 40795 - protein, 451 aa, Glycine max
MASPSELSLDCKPQSYSLLLKSFGDQTDHSYKLEEFLNRLEEERLKIDAFKRELPLCMQLLTNAMEASRQQLQAFKVNHGAKPVLEEFIPMKHLASESSEKATNMSDKANWMTSAQLWSQASSEGTKQQPPITTLKESDIGFSISPKLALDNKQRNGGGAFLPFSKERNSCQGSTLRPLPELVLASAEKEMEDKKRPEVEIKGVSCQSKKENSGSDGTVVDQGKGGSPVASSHATTTTTTSSAQTHRKARRCWSPDLHRRFVNALQMLGGSQVATPKQIRELMKVDGLTNDEVKSHLQKYRLHTRRPSPSPQAVGAAPQLVVLGGIWVPPEYATAAHTATPTLYGAHPTSHAPPPHYCAATPMPQDFYTTAPPQPLLPPPPPHHNALHHLHMYKAAPHGQGSPESDVPSNGERSESIEDGKSESSSWKGENEGERKGISKGSNGSEITLKF

SEQ ID NO: 40796 - protein, 542 aa, Candidatus Tremblaya princeps
MPAKDVIFGDCARLRLMEGVNTLTDAVKVTLGPKGRNVVLERSYGSPAVTKDGVTVAKDIELRDRLQNMGAQMVKEVAAKTSDNAGDGTTTATVLAQSIVREGMRYVASGVNPMDIKRGIDQAVSSAVMELKKISRPCTTGKEIAQVGSVSANNDRTVGEMIAEAMNKVGKEGVITVEDGKSLADELEVVEGMQFDRGYLSPYFINNPDRQVAVLDSPFVLLCEKKVASIRDLLPIMERVAKAGRPLLIVAEDVEGEALATLVVNNARGILKAAAVKAPGFGDRRKAMLQDIAILTGGHVVSEETGLSLEKVSLPELGQAKRAEVAKDTTTIIDGAGDAKAINARIKHIRLQIEEAASDYDKEKLQERVAKLAGGVAVIRVGAATEVEMKEKKARVEDALHATRAAVEEGIVPGGGVALIRARNAISNLRCDNPDQDAGIRIVLRAMEEPLRQIVANGGEEASVVASSVASGKSISYGYNAAMRVYGDLMDAGVVDPTKVTRSALQNAASVAGLMLTTDVAVCDSPKREEAAPTQPVHGGVG

SEQ ID NO: 40797 - protein, 538 aa, Ehrlichia canis str. Jake
MSNQTSSRFIFVTGGVVSSLGKGLAAASIGALLQARGFKICLRKLDPYLNIDPGTMSPIQHGEVFVTDDGAETDLDLGHYERFTGVKTTKNDNITTGKVYHNLLKKERRGDYLGQTVQIIPHVTDLINSFILHNTEGLDFVICEIGGTVGDIESQPFLESIRQIGYKLSKNNTIFVHLTLVPYIDAAMELKTKPTQHSVKELSAVGIQPDIILYRSKIPLSKEQRDKIANLCNVSPTNIIPALDVKNIYELPISYHNYNLDTQILKHFNVNSPDPNLSKWENILNISHTLTKTVTVAIIGKYIKLLDAYKSLIEALEHASIHNRVKLSIRWIDSRSLDSNGINAFDNVDSILIPGGFGDDGVKGKITAITHARLNKIPFLGICMGMQLAIVEFANNVAHLEDANSTEFNLYCKNPVIHQLPELQQNFLGGSMKLGSCPCYLDANSKIFSIYQQSVINERRRHRYTFNLQYKDLLEQHGLTFTGKANNTDDSLIEVIELNNHPWFIGVQFHPEFKSSPFHSHPLFISFIKASLSYQEAK

SEQ ID NO: 40798 - protein, 328 aa, Candidatus Tremblaya princeps
MRVLYERDGDVSIIRERVVAVVGYGSQGRAHAMNLRDSGVEVVIGLRPGPSFDAAMSDGFMPRSVQEAVSIADVAMLLTPDECMADVYAKAVRDYLRPGASVAFAHGFNVCYNQIPIGNGVGAFMAAPKAPGHMVRETYIAGWGTPHLVAAKPQCEHLRALAVSYAIANGGGAAGIIETTFVDETETDLFGEQAVLCGGLVELIRAGFDTLVSSGYEPELAYFECMHEMKLIVDVMNRGGVAALNESISNNAEYGEYVSGPRVIGAAVRSAMRRVLNDIRTGRYAKDFIMEGRSNSPTLTACRRAVGEHPIEAVGARLRSRMTCAHGT

SEQ ID NO: 40799 - protein, 378 aa, Clostridium acetobutylicum ATCC 824
MKNKTEVKNGGEKKNSKKVSKEESAKEKNEKMKIVKNLIDKGKKSGSLTYKEIMDELQEVDLGPEQIEKIYEVLESVGVDVVGDMHEIEVEEEDLDLTIPEGIAIDDPVRMYLKEIGKVPLLSPEEEIDLAQRIKNGDRSARKKLAEANLRLVVSIAKRYVGRGMLFLDLIQEGNLGLIKAVEKFDFKKGFKFSTYATWWIRQAITRAIADQARTIRIPVHMVETINKLIRVSRQLLQELGREPQPEEIAKIMDMPVDKVREIMKIAQEPVSLETPIGEEEDSHLGDFIPDDEAPAPADAAAFRMLKEQLLKILNTLTPREEKVLRLRFGLDDGRARTLEEVGKEFNVTRERIRQIEAKALRKLRHPSRSKKLKDYLD

SEQ ID NO: 40800 - protein, 266 aa, uncultured bacterium 442
MAWYTGNALYDTLLLVGFAYALLVFAASFVGTAAYGGRFGLKGKKQGIKLGSRMGWIIMELPGLMVFPVVYFMGTNAYEAVPLFFLAVWMMHYSNRALITPMLMRVQPGTPASFSFNVIIAGWITLFLHGYFNAAYLTEYGDQYTLDWFSDPRFVLGLIVYATGFGLNIHSDHILRNLRSKTPAPNEPRYKIPFGGAFRWVTCPQYLGEILSFTGFAIMTWNLGAVFVLAMTAGNLIPRALYTHRWFRKNFDEYPPERKAIFPKLL

SEQ ID NO: 40801 - protein, 442 aa, Pseudomonas aeruginosa UCBPP-PA14
MNNEPQSSSLDNFWMPFTANRQFKARPRLLESAEGIHYIAQGGRRILDGTAGLWCCNAGHGRREISEAVARQIATLDYAPPFQMGHPLPFELAARLAEIAPPGLNKVFFTNSGSESADTALKIALAYQRAIGQGTRTRLIGRELGYHGVGFGGLSVGGMVNNRKAFSANLLPGVDHLPHTLDVARNAFTVGLPEHGAEKAEELERLVTLHGAENIAAVIVEPMSGSAGVVLPPKGYLQRLREITRKHGILLIFDEVITGFGRVGEAFAAQRWGVVPDLLTCAKGLTNGSIPMGAVFVDEKIHAAFMQGPQGAIEFFHGYTYSGHPVACAAALATLDIYRRDDLFQRAVELEGYWQDALFSLRDLPNVVDIRAVGLVGGVQLAPHADGPGKRGYDVFERCFWEHDLMVRVTGDIIAMSPPLIIDKPHIDQIVERLAQAIRASV

SEQ ID NO: 40802 - protein, 569 aa, Arabidopsis thaliana
MEQLRPFFLLLAIFVASLVNAEVHFHEFVIQETPVKRLCRVHNSITVNGQFPGPTLEVRNGDSLVITAINKARYNISLHWHGIRQMRNPWADGPEYITQCPIQPGGSYTYRFTMEDQEGTLWWHAHSRWLRATVYGALIIRPPLSSPHYPFPVIPKREITLLLGEWWDRNPMDVLNLAQFTGAAPNISDAFTINGQPGDLYRCSSQETLRFLVGSGEIVLLRVINSALNQELFFGVANHKLTVVAADASYTKPFSTNVIMLGPGQTTDVLLTADQPPAHYYMAAHAYNSANAAFDNTTTTAILKYKDASCVTLQAKSQARAIPAQLPGFNDTATAAAFTAQMKSPSKVKVPLEIDENLFFTVGLGLFNCPTPNTQRCQGPNGTRFTASINNVSFVFPKQNSIMQAYYQGTPTGVFTTDFPPTPPVTFDYTGNVSRGLWQPTRGTKAYKLKFNSQVQIILQDTSIVTTENHPMHLHGYEFYVVGTGVGNFNPNTDTSSFNLIDPPRRNTIGTPPGGWVAIRFVANNPGAWLMHCHIDSHIFWGLAMVFLVENGEGHLQSVQSPPLDLPQC

SEQ ID NO: 40803 - protein, 231 aa, Glycine max
  misc_feature (182)..(182): Xaa can be any naturally occurring amino acid
  misc_feature (189)..(189): Xaa can be any naturally occurring amino acid
  misc_feature (191)..(191): Xaa can be any naturally occurring amino acid
  unsure (1)..(231): unsure at all Xaa locations
MSRTGSSAYYWVADATPPLRNSKTTMFMLSTPPTTTFFVTPTPRVPFLSSSKPSSVSLLRSSTASYSPCCSSSSSITPKVKSNDNNNCYLVSAKHSPANTSASVSSRTFLNAKNEQELLAGIRKEVEAGSLPANVAAGMEEVYNNYKNAVIRSGDPKAKEIVLSNMIALLDRVFLDVTDPFXVFQPHHXAXREPFDYYVFGQNYIRPLVDFKFGTMPITSEVGLSVVLPEV

SEQ ID NO: 40804 - protein, 434 aa, Bartonella henselae
IAGDGTTTATVLGQAIVQEGVKAVAAGMNPMDLKRGIDAAVDEVVANLFKKAKKIQTSAEIAQVGTISANGAAEIGKMIADAMEKVGNEGVITVEEAKTAETELEVVEGMQFDRGYLSPYFVTNAEKMVADLDDPYILIHEKKLSNLQSLLPVLEAVVQSGKPLLIIAEDVEGEALATLVVNKLRGGLKIAAVKAPGFGDRRKAMLEDIAILTSGQVISEDVGIKLENVTLDMLGRAKKVNISKENTTIIDGAGQKSEINARVNQIKVQIEETTSDYDREKLQERLAKLAGGVAVIRVGGATEVEVKEKKDRVDDALNATRAAVEEGIVAGGGTALLRAANALTVKGSNPDQEAGINIVRRALQAPARQIATNAGEEAAIIVGKVLENNADTFGYNTATGEFGDLIALGIVDPVKVVRSALQNAASIASLLITT

SEQ ID NO: 40805 - protein, 458 aa, Bartonella henselae
MTLLVIGTTTATVLGQAIVQEGVKAVAAGMNPMDLKRGIDAAVDEVVANLFKKAKKIQTSAEIAQVGTISANGAAEIGKMIADAMEKVGNEGVITVEEAKTAETELEVVEGMQFDRGYLSPYFVTNAEKMVADLDDPYILIHEKKLSNLQSLLPVLEAVVQSGKPLLIIAEDVEGEALATLVVNKLRGGLKIAAVKAPGFGDRRKAMLEDIAILTSGQVISEDVGIKLENVTLDMLGRAKKVNISKENTTIIDGAGQKSEINARVNQIKVQIEETTSDYDREKLQERLAKLAGGVAVIRVGGATEVEVKEKKDRVDDALNATRAAVEEGIVAGGGTALLRAANALTVKGSNPDQEAGINIVRRALQAPARQIATNAGEEAAIIVGKVLENNADTFGYNTATGEFGDLIALGIVDPVKVVRSALQNAASIASLLITTEAMVAEVPKKDTPVPPSAWWRN

SEQ ID NO: 40806 - protein, 74 aa, Oryza sativa
MSCSCGSSCSCGSNCSCGKKYPDLEEKSSSTKATVVLGVAPEKKAQQFEAAAESGETAHGCSCGSSCRCNPCNC

SEQ ID NO: 40807 - protein, 445 aa, Bartonella henselae
LGQAIVQEGVKAVAAGMNPMDLKRGIDAAVDEVVANLFKKAKKIQTSAEIAQVGTISANGAAEIGKMIADAMEKVGNEGVITVEEAKTAETELEVVEGMQFDRGYLSPYFVTNAEKMVADLDDPYILIHEKKLSNLQSLLPVLEAVVQSGKPLLIIAEDVEGEALATLVVNKLRGGLKIAAVKAPGFGDRRKAMLEDIAILTSGQVISEDVGIKLENVTLDMLGRAKKVNISKENTTIIDGAGQKSEINARVNQIKVQIEETTSDYDREKLQERLAKLAGGVAVIRVGGATEVEVKEKKDRVDDALNATRAAVEEGIVAGGGTALLRAANALTVKGSNPDQEAGINIVRRALQAPARQIATNAGEEAAIIVGKVLENNADTFGYNTATGEFGDLIALGIVDPVKVVRSALQNAASIASLLITTEAMIAEVPKKDTPVPPSAWWRN

SEQ ID NO: 40808 - protein, 467 aa, Bartonella henselae
LREVASKTNDIAGDGTTTATVLGQAIVQEGVKAVAAGMNPMDLKRGIDAAVDEVVANLFKKAKKIQTSAEIAQVGTISANGAAEIGKMIADAMEKVGNEGVITVEEAKTAETELEVVEGMQFDRGYLSPYFVTNAEKMVADLDDPYILIHEKKLSNLQSLLPVLEAVVQSGKPLLIIAEDVEGEALATLVVNKLRGGLKIAAVKAPGFGDRRIAMLEDIAILTSGQVISEDVGIKLENVTLDMLGRAKKVNISKENTTIIDGAGQKSEINARVNQIKVQIEETTSDYDREKLQERLAKLAGGVAVIRVGGATEVEVKEKKDRVDDALNATRAAVEEGIVAGGGTALLRAANALTVKGSNPDQEAGINNVRRALQAPARQNATNAGEEAAVIVGKVLEKNTDIFGYNTATGEFGDLIALGIVDPVKVVRSALQNAASIASLFITTEAMVAEVPKKDTPVPHTCTVAEW

SEQ ID NO: 40809 - protein, 467 aa, Bartonella henselae
LREVASKTNDIAGDGTTTATVLGQAIVQEGVKAVAAGMNPMDLKRGIDAAVDEVVANLFKKAKKIQTSAEIAQVGTISANGAAEIGKMIADAMEKVGNEGVITVEEAKTAETELEVVEGMQFDRGYLSPYFVTNAEKMVADLDDPYILIHEKKLSNLQSLLPVLEAVVQSGKPLLIIAEDVEGEALATLVVNKLRGGLKIAAVKAPGFGDRRKAMLEDIAILTSGQVISEDVGIKLENVTLDMLGRAKKVNISKENTTVIDGAGQKSEINARVNQIKVQIEETTSDYDREKLQERLAKLAGGVAVIRVGGATEVEVKEKKDRVDDALNATRAAVEEGIVAGGGTALLRAANALTVKGSNPDQEAGINIVRRALQAPARQIATNAGEEAAIIVGKVLENNADTFGYNTATGEFGDLIALGIVDPVKVVRSALQNAASIASLLITTEAMVAEVPKKDTPVPHTCRVAEW

SEQ ID NO: 40810 - protein, 313 aa, Photobacterium profundum SS9
MSTFQKQTIAVIGATGQVGSPTVRTLLKLGHNVIAITRNLQSDLSGKLKEFKDNGAHIAEVTDMRDKTQIMAAIKGADTLICCAPGDQTVITELEPIWLEAAIASGVKRFVPTEFGCHTRGVDYGDGILFDYKKNLHEKIFKSGIGWTFIYTGGIFDYFLPNLRFFNKITTFGNMELPIYAHEIKDIGQIIAMAITDDRTMNRCVQMDYNVLTQIEMLDLLKEHHPNHVFEYEHFSSEYITEQRLIANDEVTAKKGAETDRERWGINYVIYVIGKLANFTDETIKASELFPDYHVSKTPEQAIANPEFIFDTE

SEQ ID NO: 40811 - protein, 268 aa, Salmonella typhimurium
MERYENLFAQLNDRREGAFVPFVTLGDPGIEQSLKIIDTLIDAGADALELGVPFSDPLANGPTIQNANLRAFAAGVTPAQCFEMLALIREKHPTIPIGLLMYANLVFNNGIDAFYARCEQVGVDSVLVADVPVEESAPFRQAALRHNIAPIFICPPNADDDLLRQVASYGRGYTYLLSRSGVTGAENRGALPLHHLIEKLKEYHAAPALQGFGISSPEQVSAAVRAGAAGAISGSAIVKIIEKNLASPKQMLAELRSFVSAMKAASRA

SEQ ID NO: 40812 - protein, 365 aa, Arabidopsis thaliana
MAYSKACYKLTTITILLLSFTLPSLAGDAENADVSECKAESGDLSCHNNKEAQKLKIIAIPSILVASMIGVSLPLFSRSIPALGPDREMSVIVKTLASGVILATGFMHVLPDSFDDLTSKCLPEDPWQKFPFATFITMISALLVLMIESFAMCAYARRTSKREGEVVPLENGSNSVDTQNDIQTLENGSSYVEKQEKVNEDKTSELLRNKVIAQILELGIVVHSVVIGLAMGASDNKCTVQSLIAALCFHQLFEGMGLGGSILQAQFKSKTNWTMVFFFSVTTPFGIVLGMAIQKIYDETSPTALIVVGVLNACSAGLLIYMALVNLLAHEFFGPKIQGNIKLHVLGYVATFTGAAGMSLMAKWA

SEQ ID NO: 40813 - protein, 54 aa, Zea mays
RIAIIDKNARIGENVKIINVDNIQEASRETDGYFIKSGIVTVIKDALIPSGTVI

SEQ ID NO: 40814 - protein, 294 aa, Escherichia vulneris
IVFRAAQKRSDIEIVAINDLLDAEYMAYMLKYDSTHGRFDGTVEVKDGHLVVNGKKIRVTAERDPANLKWDEVGVDVVAEATGIFLTDETARKHITAGAKKVVLTGPSKDNTPMFVRGANFDTYAGQDIVSNASCTTNCLAPLAKVINDNFGIVEGLMTTVHATTATQKTVDGPSHKDWRGGRGAAQNIIPSSTGAAKAVGKVLPELNGKLTGMAFRVPTPNVSVVDLTVRLEKAASYEEIKKAIKAASEGAMKGVLGYTEDDVVSTDFNGEVCTSVFDAKAGIALNDNFVKLV

SEQ ID NO: 40815 - protein, 417 aa, Photobacterium profundum SS9
MMQVLQGAQMLFVAFGALVLVPLLTGLDPNVALFGAGIGTLLFQVVTKRSVPIFLASSFAFIAPIMYGVQTWGIASTMGGLMTAGVVYVLMGVLIKVRGVGFIHKILPPVVVGPVIMVIGLGLAPAAVNMAVGKSGDGGIQLINGDTAIWISAASLITTIAFSVFAKGFFKLMPIMAGVVVGYCVSLGFGVVDFTPVVQASWLAMPNFTFPEFNINAILFMIPVAIAPAVEHVGDILAISNVTGKDYLKKPGLHRTIAGDGIATIAASMFGAPPNTTYSEVTGAVMLTKAFNPIIMTWAAITAIVLAFVGKLGAILQTIPVPVMGGIMILLFGSIATVGLNTLIKNQVDLHKARNLVIVAVTLVFGIGGMAFGIGEFSLQGISLCGIVAIVLNLILPDDLGESHVVDNAQMEDTQNN

SEQ ID NO: 40816 - protein, 565 aa, Methanothermobacter thermautotrophicus str. Delta H
MINVNHERTMTVARKRGFLWSSFEIYSGVAGFVDYGPLGATLKNKIMNRWREFYVVREGFYEIESPTIMPEEALKASGHVDHFNDPMTQCKECMDVYRADHIIEDATGRDVEGLENQELTEIISDEGIRCPRCGGHLTHVWSYNLMFQTLIGARGKKTGYLRPETAQGIFIPFKRLLRFFRNRLPFGVVQLGKSYRNEISPRQGVIRLREFTQAEAEIFVDPEHKTHPDFEEVKEDILRLYPAGRQMEESGTVDMTAAEALEAGVISSEVLTYHLCLAKRFLMDIGIPEDALRFRQHLPSEMAHYAIDCWDVEAFTDSYGWIEIIGIADRTDYDLRSHSQHSGEDLRVFIEYDEPRRIRKRAVKPDMGKLGPKFRKDAARIASALSEVDVEEIEKALDEEGRFILEGEFEILPDDVSFEDVEEVVTGRKVYPHVIEPSFGIDRIIYTLLLHSLVDDGERTYFRLPPHVAPVEVTVLPLVNREEMVMTALEIERNLRRSGFIAEFDSSGTIGRRYARADEIGVPFAVTVDHETLEDGTVTLRNRDDCSQVRVKIEELVPTLEKLRG

SEQ ID NO: 40817 - protein, 469 aa, Pseudomonas aeruginosa PAO1
MDGQHLHQGELKRGLKNRHIQLIALGGAIGTGLFLGSAGVIKTAGPSMILGYAIGGFIAFLIMRQLGEMIVEEPVAGSFSHFAHKYWGGFAGFLSGWNYWVLYILVGMSELTAVGKYIQYWWPDVPTWATAAAFFVLINAINLANVKAFGETEFWFAIIKVAAIVGMILLGIYLLVGGGGGPQASVSNLWDRGGFFPNGLSGLVMTLAIIMFSFGGLELVGITAAEASEPRKVIPKAINQVIYRILIFYIGALAVLLSLYPWDQLVETINASGDDYSGSPFVQIFSLIGSGTAANILNFVVLTAALSVYNSGVYCNSRMLYGLAAQGDAPKVLMSVDRRGVPVLSILVSALITFLCVIVNYVLPHKALELLMSLVVAALVINWAMISLSHLKFRAAMKRQGVDTFFKALWSPFSNYLCLAFVLFILGIMLMIPGINISVYAIPFWLLLMWLCYRVKLSLAERRGLGQQA

SEQ ID NO: 40818 - protein, 729 aa, Oryza sativa
MVGIDLNTVEEEEDEEEGGATGTVTAPAEARAGGAVCLELWHACAGPVAPLPRKGSAVVYLPQGHLEHLGAAPGSGPGAAVPPHVFCRVVDVSLHADAATDEVYAQVSLVADNEEVERRMREGEDGAACDGEGEDAVKRPARIPHMFCKTLTASDTSTHGGFSVPRRAAEDCFPPLDYSLQRPFQELVAKDLHGTEWRFRHIYRGQPRRHLLTTGWSGFINKKKLVSGDAVLFLRGEDGELRLGVRRAAQLKNASPFPALHNQISNTSSLSEVAHAVAVKSIFHIYYNPRLSQSEFIIPYWKFMRSFSQPFSVGMRFKLRYESEDASERRRTGIIIGSREADPMWHGSKWKCLVVKWDDDVECRRPNGVSPWEIELSGSVSGSHLSTPHSKRLKSCFPQVNPDIVLPNGSVSSDFAESARFHKVLQGQELLGLKTRDGTVNTASQATEARNFQYTDERSCSINMSNNILGVPRLGVKTPSGNPGFSYHCSGFGESQRFQEVLQGQEVFRPYRGGTLSDACIRGSGFRQPDGNHAPGAAFKWLAPQGCDHHGITTSVLPQASSPSSVLMFPQTSSKMPGLEYIYGCLDRNENSRHFKIGPTQDMTRTDQTLRLWPHLISGKVLDECTRNEKLHSPVSGAEHESNNKCLNTNGCKIFGISLTEKAQAGDEVDCGNASYHSRLQSLKPQMPKSLGSSCATHFHRLCYRIQDDDRGNADDTRRMLVKFVVMHF

SEQ ID NO: 40819 - protein, 221 aa, Bacillus thuringiensis serovar konkukian str. 97-27
MMKAIIFDFDGLIVDTETIWFHSFRDAVREYGGDLPLEEFAKCIGTTDDVLYEYLNEQLKEKFDKYALKEKVKNLHKEKMKIPEARDGVKEYLEEAKEMGLKIALASSSSREWVIPFLEELQIRDYFEVIKTREDVEKVKPDPALYRVAIEDLGIDSSEAVVFEDSLNGLKAAIAAGLTCVVVPNDVTRNLPFENHHLRIESMKDKSLKEVMQNIKKDRIS

SEQ ID NO: 40820 - protein, 165 aa, Synechocystis sp. PCC 6803
MKHLLALLLAFTLWFNFAPSASADDFANLTPCSENPAYLAKSKNFLNTTNDPNSGKIRAERYASALCGPEGYPHLIVDGRFTHAGDFLIPSILFLYIAGWIGWVGRSYLIEIRESKNPEMQEVVINVPLAIKKMLGGFLWPLAAVGEYTSGKLVMKDSEIPTSPR

SEQ ID NO: 40821 - protein, 308 aa, Brucella melitensis 16M
MILCCGEALIDMLPRETTGGETAFQPFAGGSVFNTAIALGRLGVPTGFFSGISSDFFGDVLRDTLARSNVDYSFAAISNRPTTLAFVRLVDGQARYAFYDENTAGRMLSRNDMPYVDETISAMLFGCISLISEPCGSVYETLLAREAPNRVMFLDPNIRANLITVRETHLTRVKRMIALADIVKLSDEDLDWFGEKGSHDEIAAEWLKLGPKLVVITKGAHGAVAYTNHATVPVPGVKVDVVDTVGAGDTVNAGILASLHSQGLLTKDALANLSEDQIHSAVALGVRAATVTVSRAGANPPWAHEMRD

SEQ ID NO: 40822 - protein, 311 aa, Candidatus Tremblaya princeps
MVSSALQFLSQHSELSMDSARFLEALRFRPTHATTNPSLILSACQNNEYNSLVNETIRLHRNEGYRNIADHIRLRFCTELLDRIPGMVSVEIDACCAFNVDASIAHARRIVQLCRPTDARDRILVKIPATWQGVQAAAALRAEGVQCNMTLVFSMLQALVCARNGAYLISPFVGRLSDRMPAMQGSSATQDQGVALALRIYSRLRQEGHATRVMAASFRGEQQVIMASACGMVTVGEHIMRRLAAMRASAMPKPCQQFSEAMQHCPTPRDLHAFERALAQNRTAWLELKHGIEAFACNETQLELLIARRLP

SEQ ID NO: 40823 - protein, 371 aa, Synechocystis sp. PCC 6803
MTKSPNLTVAVIGTGFGQAVHIPALQYHQQTQAIAIYHRDLAKAQEVAKSNDLAYSYNNLEELLANPEVQAVTIASPPFLHYEMAKQAILAGKHVLLEKPMTLRVEETIELYHLARQREVQVIPDFEFRFVPAWQYVAELLGQGILGQLKLIKVDWLVGSRANPNRAWNWYAQREKGGGALGALASHTFDYLHWLFGPAQSLAANLSVAIAERPDPLDNNRLKPVTAEDTALISLTLANDVPCQINITSVAHGGRGHWLEIYGEKGSLVLGSDNLKDYVHGFRIFHHPVGQPMQELTVPTRLDFPKVFADGRLAPVVRVVDEWVQSINQKRTPTPSLRHGVYSQLLMDLTKQAHQEKHWVAVPDLDRLLAQ

SEQ ID NO: 40824 - protein, 822 aa, Solibacter usitatus Ellin6076
MLTSRARAAKIGWSLAILLVSASAGILVDWQMSGVSRYSRDWLMRLRGPLPVPEDIAIVAIDEASIARFGRFPWSRQVIARTIDALAAAHPKVIAVDVLFADPTTQEDDDNLAHSIGRAGNVVVAAQLSDSPVHGGPSRWLAPLPVIEHAAKAVGHVNVQTELEGVARQIAERLADDSGRSYRALAMEAVRVADGTSEEGVTDAPHALLLGSRTIPLDTTAPSTVIEPTESTRVLRGGRMSIDYIGPAGSFNPVTYSLADVVAGRVPPEKFRGKFVLIGATAASLGDRITSPFVRYTDARADQHGALMPGVEVLANSINVILSGRYYSVTSDMTAFLLAALVAALTLMLLEAAQGGHELLKQLGVLIGMAGLIVAVGYLAFLKLLVFPPIVPCLVAFMCAGVLGLLQRSMTASARLDQNIAELALSGDLLAPAGPGIPGPYHWAEGGPVSLSRGWLPKGLEWKARMLSELNGRLLDRAKFVNFALRSIEDGLVIADPDGRITFANRSAGAILGATARGLVGQSLAQRLNGSVNAEVLARLVAERGHIEHEITIRGSRMRQYTLRLATVSADDSGDGPVLGIVGSLSDVTRQHELQQTKNDVISLVSHEMRTPLTAIQGMTELLAAYDVEPSRRREMNLAINDEVKRLARMITEYLDITRLESGATQMRMAAVRVESILERILILIEPIAAQRQIQLVRQIPADLPAVLADPDLFSRAVENLVTNAVKYSPNGTTVTVSARAEEDCLWIDVADQGYGIPETDLSRIFEKFYRVPRVQDAGVPGTGLGLSLVREIAELHHGSVAVRSEVGKGSTFTLRIPRSEA

SEQ ID NO: 40825 - protein, 371 aa, Listeria innocua Clip11262
MLNEFIAIRRDLHQIPETGYKELKTQAYLLDYISKLPNEFLEIKKWRTGILVLVKGTNPGKTIGYRTDIDALPITEETGLPFESKHAGNMHACGHDLHMSIALGVLTHFASKPAKDNLLFVFQPAEEGPGGAKPIMESAEFSEWRPDTIYGLHIAPEYKVGQIAIKPGLLFANTSELFISFKGKGGHAAYPHLANDMVVAASAFVGQMQTIISRNIDPMDSAVITIGRIHGGEIQNVIAETAFLDGTIRTLSPETMEIVWTRLKQLAKGWEEAYQCEVEFHPGSDYYQVDNDPVETEEFIHFLEEQYPESYVPARSAMTGEDFGYFLSEIKGFMFWLGVDSEYSLHHAKLSPKEEAIPFAIDVLVNFLESK

SEQ ID NO: 40826 - protein, 139 aa, Azoarcus sp. EbN1
MSNLIRRDPFDDLLRGFFVRPVDMTAGIQGEAPQMRVDVKEDESAYQVHAELPGIKKEDIHVHIDGPVVSISAERKQEKEVKEGERVLRTERYFGKVSRSFQLGQEIDEGKSSAKFNDGVLELSLPKKAPEQAKRLTID

SEQ ID NO: 40827 - protein, 198 aa, Arabidopsis thaliana
MAAARQLRTLQSQPENKVCVDCAQKNPQWASVSYGIFMCLECSGKHRGLGVHISFVRSVTMDSWSAIQVKKMEAGGNERLNKFFAQYGIAKETDIISKYNSNAASVYRDRIQALAEGRPWNDPPVVKEANKKPPLAQGGYGNNNNNNNNNNNNNNNNNNNNNNNNNGGWDSWDNDDSYKSDMRRNQSVINTIKLELEG

SEQ ID NO: 40828 - protein, 541 aa, Glycine max
  misc_feature (194)..(194): Xaa can be any naturally occurring amino acid
  misc_feature (202)..(202): Xaa can be any naturally occurring amino acid
  unsure (1)..(541): unsure at all Xaa locations
MRKYAADRFRHLFNRSLLLLRHRHHHNHHPFPYSSSVSSLSPFSRSRFLSSTPFSMASDSPFPVTAQNINPKVLKCEYAVRGEVVTLAQNLQKDLQANPGSHPFDEILYCNIGNPQSLGQQPITFFREVLALCDHPAILDKSETQGLFSTDAIQRAWQIVDQIPGRATGAYSHSQGVKGLRDTIAAGIEERDGXPANPDDIXMTDGASPAVHNMMQLLIRSENDGILCPIPQYPLYSASIALHGGCLVPYYLDEATGWGLEIPELKKQLEAAKSKGINVRALVVINPGNPTGQVLGEANQRDIVEFCKQEGLVLLADEVYQENVYVPEKKFHSFKKVSRSMGYGENDITLVSFQSVSKGYHGECGKRGGYMEVTGFSAEVREQIYKVASVNLCSNISGQILASLVMSPPKVGDESYDSFMAEKENILASLARRAKTLEDAFNKLEGVTCNKAEGAMYLFPQIRLSEKAIKAAEAANATPDNFYCKRLLNATGVVVVPGSGFGQVPGTWHFRCTILPPEEKIPAIVTRLTEFHEKFMDEFRD

SEQ ID NO: 40829 - protein, 539 aa, Clostridium perfringens str. 13
MAKTLLFGEEARRSMQAGVDKLANTVKVTLGPKGRNVILDKKFGSPLITNDGVTIAREIELEDAYENMGAQLVKEVATKTNDVAGDGTTTATLLAQAIIREGLKNVTAGANPILIRNGIKTAVEKAVEEIQKISKPVNGKEDIARVAAISAADEKIGKLIADAMEKVGNEGVITVEESKSMGTELDVVEGMQFDRGYVSAYMVTDTEKMEAVLDNPLVLITDKKISNIQDLLPLLEQIVQAGKKLLIIADDIEGEAMTTLVVNKLRGTFTCVGVKAPGFGDRRKEMLQDIATLTGGVVISDEVGGDLKEATLDMLGEAESVKVTKESTTIVNGRGNSEEIKNRVNQIKLQLEATTSEFDKEKLQERLAKLAGGVAVVKVGAATETELKESKLRIEDALAATKAAVEEGIVPGGGTAYVNVINEVAKLTSDIQDEQVGINIIVRSLEEPMRQIAHNAGLEGSVIIEKVKNSDAGVGFDALRGEYKDMIKAGIVDPTKVTRSALQNAASVASTFLTTEAAVADIPEKEMPQGAGMGMDGMY

SEQ ID NO: 40830 - protein, 277 aa, Thermobifida fusca YX
MCRGGGAHTDDDTTPLRKDATMRRFEGRIAAIVGGGSGMGRAISHRLASEGATVYVADLSEESAKKVAEEITAQGGKAVPVQVDATNNDSLRALFDRIRSDHGVLHVLHAQVGMPGPGGIETSDEEWQKNIDVNIKSAYYTCTLGYDLLKSANGKGSITMTSSTSALVGSPFSPIYSLTKGSLVPFARALALKGAPDGIRVNVICPGTVQTPMLAQFFGREPGADVSELTKDFIKNIPLGRGAQPEEIASVIAFLASDDASYVTGVTIPVDGGLTAK

SEQ ID NO: 40831 - protein, 404 aa, Thermus thermophilus HB27
MNLGRSFVGFLVLSLMAGAVLWWGVSNGQAPSPQAAKAADEGLLEYERNTVEIVERYGDGVVYVSVVTRPQSVQLPPGLEFFAPFLQVPPQRGTGSGFVIDKEGYILTNYHVVEGADRITVKFHNDPKEYQARLVGAAPPLDVALLKVDAPKERLVPLVLGDSDTIRVGQKAIAMGNPFGLEFTVTQGIVSAIRENPGAIGDESGLVPQVIQTDAAINPGNSGGPLLNSRGEVIGINTAIFTPTGQFGAAQFAGVGFALPINLVKQYLPEMRAGKTLTAEEIVRSRPRLGVSIIPLSFYPERLRQQYGLPDTGLMVQEVERNSPAQKAGLKPPTRFAYIQLPTAEALQVGVDGDVLLEADGVPLTSVAQLRQVLYAKKPGEAVTLKVWRQGRTLTLRVVPQVLR

SEQ ID NO: 40832 - protein, 233 aa, Clostridium acetobutylicum ATCC 824
MTIFFAELVGTLLLILLGDGVVANVVLKNSKGHASGWIVITMGWAFAVAIPALIFGSYSNQFNPALTIALAVIGKVAWAKVPIYLAGQFIGAFLGAVLVFVVYYDQFKCSENKTDKLGVFCTVPAVRNSLINFLCEVIGTFVLVFGILGVGAQNLKNGMGAVFVGFLILVIGLSLGGPTGYAINPARDLAPRIAHLVLPIPNKGDSNWSYAWIPIIAPVVGGIIGAVCYMLLL

SEQ ID NO: 40833 - protein, 162 aa, Chlamydomonas reinhardtii
MANPEFYGLSTTTLSGQPFPFKDLEGKAVLIVNVASKCGFTPQYKGLEELYQQYKDRGLVILGFPCNQFGGQEPGDASAIGEFCQRNFGVTFPIMEKSDVNGNDANPVFKYLKSQKKQFMMEMIKWNFEKFLVDKSGQVVARFSSMATPASLAPEIEKVLNA

SEQ ID NO: 40834 - protein, 480 aa, Pseudomonas fluorescens Pf-5
MSDNNKRDDDMQSQDSGLRRGLTARHIRFMALGSAIGTGLFYGSASAIQMAGPAVLLAYLIGGAAVFMVMRALGEMAVHNPVSGSFGHYASQYLGPLPGFILGWTYAFEMLIVCLADVTAFGIYMGFWFPEVARWIWVLGIVLFIGGLNLCNVKVFGEMEFWLSLLKVGAIVAMILGGLGIMLFGISSAAQDQATGAANLWAHGGFMPNGISGVIASFAVVMFAFGGIEIIGVTAGEAQDPKRVIPKAINAVPLRILLFYVLTLFVLMSIFPWPQIGTQGSPFVQIFDSLGISSAATILNIVVISAAVSAINSDIFGAGRMMYGLARQGQAPKGFAQVSKHGVPWMTVVVMAVTLLIGVVLNYLIPENIFLLIASLATFATVWVWLMILLTHVAMRRSMTAEQVAQLQFKVPFWPWAPAAAIAFMLFIFGVLGYFPKTQGALIVGVVWIALLVVAYMLWVKPMAGQAQAIMSDAPLPTDH

SEQ ID NO: 40835 - protein, 389 aa, Nocardioides sp. JS614
MRRVKGSRRVRERDTLSNVGRMTPPARIHERHLFGPGPSNAYPEATLALAAPLLGHLDPAFLAVMDETCEMLREVWGTGNARTLPLSATGSAGMEAAFVNTVHPGDVVVVAVNGLFGQRMCDVAARCGAEVVAVEHEWGQPIDVERVLAAHPAPAIIAAVHAETSTGVRSDIAALGAGKGDALLLVDAVTSIGGIELRADDWGVDIGYAGTQKCLGVAPGLAPFTINDRAFGRRVEKPRSWYLDLGLLGGYVGEASGSGGRTYHHTAPVAMVASLHAGLARILDEGLETVWARHEAAGRQLQAGLEELGLELFAAEGHRLPELTTVKVPDGVDSAAVRRYLLDTHDVEIGAGAGAYASTVWRIGLMGHNARPDAVLLVLAALRDALAHA

SEQ ID NO: 40836 - protein, 284 aa, Debaryomyces hansenii CBS767
MDKLLQWSIAQQSGDQEAIEKIGKPDPKMLEQLFGGPDEPALMKQAIMVIDNEEATLENREIAFDNFEMLIENMDNANNIENIKLWQSVIDKMSAETPTSLRVYAASCAGIAVQNNPKSQEDFLKYDGLALLISICNEEDVPTELRLKALFAISSLIRNFEVGYAKFDELDGWSVVKFNENEDHKVKLRILSLVSAILSTPLDKKKEEHVHREKLVANIISILKKDGHIGCIDKALNIISQLASSEFEFSSSEIGDIAQGLEEIEKLKDSISEDDYNSVKQVVN

SEQ ID NO: 40837 - protein, 712 aa, Nodulisporium sp. ATCC74245
MEALKQTFRRCKAENRAALVTYVTAGYPKPEDTPGILLGLQKGGADVLELGVPFTDPIADGPTIQTANTVALANGVTIKSTLDMVREARSKGLTAPVLLMGYYNPLLSYGEDELLRDCKAAGVNGFIVCDLPPEEAVSFRKLCSKGSLSYVPLIAPATSDTRMRLLCALADSFIYVVSRMGVTGALGTLNANLPDLLERVKKYSGDKPAAVGFGVSTREHFQSVASIADGVVIGSQLITILQKAEPGKGAQAVEEYCAYVSGRTTQETTREVGVVEAISAAKEPSGEDVTVNGVISEHDDAALVAQLAALHGKIPERFGEFGGQYVPESLMDCLSQLEEGFNAIKDDPKFWEEYRSYYPWMGRPGQLHLAERLTEYAGGANIWLKREDLNHTGSHKINNALGQLLLARRLGKTKIIAETGAGQHGVATATVCAKFGMECTVFMGAEDVRRQALNVFRMRLLGAKVIAVEAGSRTLRDAVNEALRYWVVHLDDTHYIIGSAIGPHPFPTIVRTFQSVIGNETKAQMQEKRGKLPDAVVACVGGGSNAVGMFYPFSNDPSVKLLGVEAGGDGVNTTRHSATLTGGTKGVLHGVRTYVLQNEFGQISDTHSVSAGLDYPGVGPELSNWKDSQRAKFIAATDAEAFIGFRLMSQLEGIIPALESAHGIYGAIELAKTMKKDEDIVICLSGRGDKDVQSVADELPKLGPQIGWDLRF

SEQ ID NO: 40838 - protein, 463 aa, Chlamydomonas reinhardtii
MTQSRVEQNLQRVNELKAEATTLERMRKASDLDIKERERIAISTVAAKGPASSSSSAAAVSAPATSATLTVERPAATTVTQEVPSTSYGTPVDRAPRRSKAAIRRSRGLESSMEIEEGLRNFWYPAEFSARLPKDTLVPFELFGEPWVMFRDEKGQPSYIRDECAHRGCPLSLGKVVEGQVMCPYHGWEFNGDGACTKMPSTPFCRNVGVAALPCAEKDGFIWVWPGDGLPAETLPDFAQPPEGFLIHAEIMVDVPVEHGLLIENLLDLAHAPFTHTSTFARGWPVPDFVKFHANKALSGFWDPYPIDMAFQPPCMTLSTIGLAQPGKIMRGVTASQCKNHLHQLHVCMPSKKGHTRLLYRMSLDFLPWMRHVPFIDRIWKQVAAQVLGEDLVLVLGQQDRMLRGGSNWSNPAPYDKLAVRYRRWRNGVNAEVARVRAGEPPSNPVAMSAGEMFSVDEDDMDN

SEQ ID NO: 40839 - protein, 543 aa, Lactobacillus sakei subsp. sakei 23K
MKAQQILNDPFLNKGTAFTAEERAQFGLTGMLPPHVQTIDEQVKQAYAQYQSKANMLEQRIFLMSIFNENRVLFFKLFSQHVAEFMPVVYDPTIADTIENYSALYVNPQHAAFLSIDDPDSMKTTLANAADGREIKLIVVTDGEGILGIGDWGTQGVDISVGKLMVYTAAAGIDPSQVLPVVLDAGTNRESLLNDELYLGNWHERVRGDRYYDFVDQFVQTAEELFPNMYLHFEDFGRSNAANILNKYKDQIVTFNDDIQGTGIITLAGIMGALNISGGKMTDQVYMSFGAGTAGAGITHRIFEEMLQEGLTEEQARSRFYMVDKQGLLFDDDPELTPEQKPFARKRSEFANADELTTLEAAMKAIHPTILVGTSTQPGTFTESIVKEMAAHTERPIIFPLSNPTKLAEATAEDLIKWTDGKALVATGIPAAPVEYNGVTYEIGQANNALVYPGLGLGTIASTAKVLNDEMISKAAHSLGGIVDPTEPGAAVLPPVTKLDVFSQTVANAVAQSAVDQGLNKEEIADVQKAVADMKWEPEYKAL

SEQ ID NO: 40840 - protein, 328 aa, Triticum aestivum
RHWFYCINNKERSCLETGEVLIRVAASGICGTDLHICKGETPQATKNVVVGHEFCGYVEEIHPETMAVVKVGDLVAIDPNMPCNQCTFCRNKKYHLCLNLFCIGVTVDGGMSQYVAVPARAAITVPAHVPPEVACLSEPLSCVVHAVDKGHVKSGDSVLVIGAGPIGLMTTALVNASGGKVTVIEPNEFRRKEALEIFGAAAAYGPGELGPVNGALGEGYDVVFECVGRPNTADDAVKFAKAGGTVVWVGVAKVEDRVSISPYDVYRRELTITSTFTNPYGIDRAVKILAEGRVNWRALVSHSFKLSEFDKAWEVFTAGTGLKVVVKP

SEQ ID NO: 40841 - protein, 351 aa, Staphylococcus aureus subsp. aureus Mu50
MKALVKTREGHGNLELLDKEVATPLDDKVKIKVHYAGICGTDIHTYEGHYKVNFPVTLGHEFSGEIVEVGADVKDFKVGDRVTSETTFYVCNECEYCKSKDYNLCNHRKGIGTQVDGVFTNYVIAREESLHHIPDEVSYQSAAMTEPLACAHHGVSKIQVNSGDVAVVMGPGPIGLLVAQVLKSKGATVVVTGLDNDKVRLDKAEALHMDYVVNLQQTDLKTYINGITDGYGADVVVECSGAVPAARQGLDIIRKKGFYSQIGIFKDAEIPFDMEKVIQKEITVVGSRSQKPADWEPSLQLMADGLVNAEALVTKIYDISKWDEAYQHLKSGEGIKALLKPLDLDENEGEN

SEQ ID NO: 40842 - protein, 306 aa, Glycine max
SQLRRPPPPDSVTKLHCDMSDAVNVLTHIAEVKLKPDHLIVIEELKQKHFEQDKRELLGDDQNRETSVDMLNNTSSTNALDKQNSVQVMEHKGGLCDGKEVYQFHQPSGGNAVAIANEDGLSCRSELKEVDKVKLKQESDMLSAGDGSEGALWDIFRRQDVPKLQEYLRKHFREFRHIHCCPLKQVIHPIHDQTFYLTVEHKRKLKEEYGIEPWTFIQKLGDAVFIPVGCPHQVRNLKSCIKVAMDFVSPENVGECFRLTEEFRTLPINHRSTEDKLEVKKMTIYAMEDVIGKLEKARSGLTKGPE

SEQ ID NO: 40843 - protein, 445 aa, Porphyromonas gingivalis W83
MKTQEIMTMLEAKHPGESEFLQAVKEVLLSVEEVYNQHPEFEKNGIIERIVEPDRVFTFRVPWVDDQGKVQVNIGYRVQFNNAIGPYKGGIRFHPSVNLSILKFLGFEQMFKNALTTLPMGGGKGGADFSPKGKSEAEIMRFCQSFMTELWRNIGPDTDIPAGDIGVGGREVGYMFGMYKKLAREHTGTLTGKGFEFGGSRLRPESTGFGAVYFVQNMCKQNGVDYKGKTLAISGFGNVAWGVAQKATELGIKVVTISGPDGYVYDPDGINTPEKFRCMLDLRDSGNDVVSDYVKRFPNAQFFPGKKPWEQKVDFAMPCATQNEMNLEDAKTLHKNGVTLVAETSNMGCTAEASEYYVANKMLFAPGKAVNAGGVSCSGLEMTQNAMHLVWTNEEVDKWLHQIMQDIHEQCVTYGKDGNYIDYVKGANIAGFMKVAKAMVAQGVC

SEQ ID NO: 40844 - protein, 254 aa, Glycine max
MLAIFHKAFAHPPEELNSPASYKGSKKPKVPEETLKDFLSHHPHNTCSMSFGDAAVLAYVRPDQSFSRHQRLFCGIDDIYCLFLGSLNNLSLLNKQYGLSKSTDEAMFVIEAYKTLRDRGPYPADQVVKELDGSFAFVVYDSKVGSVFAALGSDGGVKLYWGIAADGSVVISDDLEVIKEGCAKSFAPFPTGCMFHSEGGLMSFEHPMNKLKAMPRVDSEGAMCGANFKVDKFARVNSIPRVGSQSNWMEWDQH

SEQ ID NO: 40845 - protein, 613 aa, Zea mays
MADSPNPSSGDLPAGAGCSPEKPVLADRRVSALAGAGARYKAMSPARLPISREPCLTIPTGFSPGALLESPVLLNNFKVEPSPTTGTLSMAANMNKSTHPDILPSPRDNSADSGQEDGGSREFEFKPHLNSQSSATAVNNQNHHDIPMQNHGSNHASPSSNLMTENKPLCSRESSHTANVSSAPNQPVSIVCPSDNMPAEVGTSEMHLINSSENAAQETQTENVAEKSAEDGYNWRKYGQKHVKGSENPRSYYKCTHPNCEVKKLLERSLDGQITEVVYKGHHNHPKPQPNRRLAAGAVPSSQAEERYDGVAPIEDKPSNIYSNLCNQAHSAGMVDNVPGPASDDDVDAGGGRPYPGDDSNDDDDLDSKRRKMESAGIDAALMGKPNREPRVVVQTVSEVDILDDGYRWRKYGQKVVKGNPNPRSYYKCTHTGCPVRKHVERASHDPKSVITTYEGKHNHEVPASRNASHEMSAAPMKPVVHPINSSMPGFGGMMRACDARAFNNQYSQAAESDTISLDLGVGISPNHSDATNQMQPSVPEPMQYQMRHMAPVYGSMGLPGMPVPAIPGNVVASSIYGSREEKGNEGFTFKAAPLDRSANLCYSSAGNLVMGP

SEQ ID NO: 40846 - protein, 247 aa, Nicotiana tabacum
MAENGAAQENQVTKHQEVGHKSLLQSDALYQYILETSVYPREPEPMKELRELTAKHPWNLMTTSADEGQFLSMLLKLIIAKNTMEIGVYTGYSLLATALALPDDGKILAMDINKENYELGLPVIQKAGVAHKIDFREGPALPVLDLMIEDKNNHGTYDFIFVDADKDNYINYHKRIIELVKVGGVIGYDNTLWNGSVVAPPDAPMRKYVRYYRDFVLELNKALAADPRIEICMLPVGDGITLCRRIS

SEQ ID NO: 40847 - protein, 458 aa, Mesorhizobium loti MAFF303099
MRHQILSNRSGEDLRASDLAHHLHPFTDHTVLAAEGGPRVIKDGDGIYVWETEGRRLLDGMAGLWCVNVGYGRKELGEVARQQMDRLAFYNTFFKTSHEPVINLAERLAAVTPEGIDNFFFGNSGSEANDTAIRLVRSYWAAVERPERQVVISREYAYHGSTLAGASLCGLPGMHGVAGLPIPGIAHAAAPYAWAAGKDQDDPAYGRASADALEAKILEIGPKNVAAFIGEPVMGAGGVITPPPRYWARVQEICRKYDILLVCDEVICGFGRTGEWFGAQSFGIAPDIMCMAKGLSSGYIPISAVGVGTRVAEILRTRPGVLSHGFTSSGHPVAAAVALKNIELIEAEGLVNHVRDVAGPALARRLGALAMHPLVGQVRGIGAMWALELTSDKATRAPFAPLGSVATRVRNLCFERGLATRAVREGLVFAPPLIITEAQVDEMADILTSCLDTAVAEL

SEQ ID NO: 40848 - protein, 261 aa, Frankia sp. EAN1pec
MPDETLVNETPAKEHAGKVALITGGGRGFGKAFGAALTERGAHVVLADIDGDVASAAAAELTALGGSATGVTCDVTDEARVGEVVADIVRAHGGLDILVNNAGLHSAAFNKPTAELGAGQIRRLFEVNVMGVVICTLAAKDAMSGRAGAAVVNISSSAAYANRTAYGVSKLAVRGFTAQFARELAAVGVRVNAIAPGLILTDTVRAELPATEVARVLAQQVLAREGEERDVVNALLYLVSDAAAFITGETLRVTGGFALSV

SEQ ID NO: 40849 - protein, 482 aa, Deinococcus radiodurans R1
MKHFDRATKIVATVGPASRSTEVLGRMIDVGLNVVRLNFSHGDLEDHRQTVQMVRDLAVSKGVTIGILQDLQGPKIRVGRFAEGSVTLNPGQKFVITMDEVEGNAERVGSTYKGLAGDVTPGMTLLLDDGNMSLRVDHVRGNDIQTTVLIGGTLKNNKGINVPEADLTVPALSEKDVQDMEFGASLGVDWVALSFVRSRDDLLLARHYLARFGSRAKLMAKIEKPQAVDRFADILKEVDGVMVARGDLGVEMRPEQVPTIQKRIIRMCREAGKPVITATQMLESMINLPRPTRAEASDVANAIYDGTDAVMLSAESAAGQYPVESVAMMDRIAREAEASELYQLMQRQVVMDTEQAQDAIALAACNIGAKLEAPAIVTFTSTGGAATRISKNRPPLAIVALTPNEITRNQLALSWGVYPMLSEDPEDTDDMVRIANDELKKSGLADVGDRYVITAGVPFGVRGTTNMLRVEKLKAEDLSDRV

SEQ ID NO: 40850 - protein, 345 aa, Methanosarcina acetivorans C2A
MLRTANIRVGNGEKTMKYKSVIVTRRGGTEVLKIIENDLHAPSSGEVRIKILATPVCQDDIAARVGNRPFLPRIPFVPGYSILGIADAIGEGVTNVAVGDRVAALTRLGGHAEYILLPEEKLVHVPETLDPAEAVILILNYTVAYQVLHRYARVKPDDKVLIIGASGGVGTAFLQLGKLANLKMYGLASSGKHGTLTELGAIPIDYHTQDFVEVIRQMEPDGVDFVFNGMREEYIARGLAVLRRGGAMVQYGGPQSFSRFLLLLAKFALFNLLPNGKAIKGYGTHRVDINLPKEDWLVLFKLLEKGKIKPVIAERFPILEAPKANKLLESGKVTGNIVLLAPELL

SEQ ID NO: 40851 - protein, 225 aa, Sphingobium chlorophenolicum
MLKLYYNPGSCSLASHAALEEAGLPYETELVDLTQNVQFSEDYRRKNPWGRVPALLIGQDVLTENVAILNYIAGLVPERELLPKAGLAHARAIEWLSLLSSTVHVAFRPIFRPNRIAETESGQKDVAATGLNSLKSVLSLLDQRLGEGPYALGDRFSLCDLYLFVFVLWSRRPMLDGKLGALPNLDAFAERLAAALRSALPGSGGACMAEGAQNGLSCIARPKPR

SEQ ID NO: 40852 - protein, 440 aa, Mesorhizobium loti MAFF303099
MSHVFHRSALSVPPMAVAADGHYIIDINGRRYLDASGGAAVSCIGHGDPRVVAAVAEQIARLDYAHSGAFTSPSAEELAAHICAEAGQGMARVYFVGSGSEAVEAAIKMARQCQIERRQPSRHVVISRRLSYHGNTLGALGRSGSETRRAPYAPMLQKRTQIAPCFPYHYAEPGETPEAYGLRAAEALEAEILRLGSENVAAFLAETVVGATSGAVVPATGYFRHIREICDRYGVLLICDEVMCGAHRTGPFLACSDEGVSPDIVTLAKGLGGGYLPIGAVVCRADVHDSFAQGSGAFTHGHTYMAHPVACAAALEVQRVIVDDRLAERVVRQGALLDAALRDRLSQHTYVGDIRGRGLLYAVELVADRETRVSFDPEMRLAARIGAQAKGRGLLVYPGSGTIDGLRGDHVLLAPAYSIDAQRVGEIADILTEAIDAALG

SEQ ID NO: 40853 - protein, 213 aa, Burkholderia sp. 383
MPSANIVRLYGAAWSVYVRIARLALEEKGVPYTLVEVDVFDSAGVPNEHLKRHPFGRIPAFQHEDFCLYETSAIVRYIDDAFDGPKLQPTDAKARARVNQIAGLMDAYAYRTLVWDIYVERVVAVKEGRPTDEEKIAIALPLASTCLAELDRLCDGNGYMVADQVSIADIYAAPMFACFTQAAEAGLLMDRCKKLKDWWHRFSARESMVRTQP

SEQ ID NO: 40854 - protein, 309 aa, Methanosarcina acetivorans C2A
MKAIRIHEFGGKEVMKYEDIPQPQPGTGEIRIRIIAAGVNPMDWKIRSGMIGEMPLPMTMGIDVAGVVDAQGPGEVSFQPGEEVFAKVSIGQGSYAEYTVVNSAQVARKPKSIGFVESAAIPTAGLAAWQSLFDIAGLEKGQSVLIHGAAGGVGSFAVQFARWKGAYVIGTASEKNKQFLKSIGTDEFIDYKKQRFEDAAGKVDVVLDTIGGDTFDRSWGVLKPGGFLVSTVARIPEGVPEKYGVHAQTLMTRADGEELAQIAAIIDEQPVKPVVTTILPLSEAQKAHEMSETHHTRGKIVLRVAEDPQ

SEQ ID NO: 40855 - protein, 725 aa, Symbiobacterium thermophilum IAM 14863
MREEDIRSTAGHGTSNKDWWPNQLNLRILHQHSEKANPMGPDFNYREEFKKLDYWALKEDLRKLMTESQDWWPADFGHYGPLIIRMAWHSAGTYRIQDGRGGAESGAQRFAPLNSWPDNINLDKARRLLWPIKQKYGRRISWADLMILAGNVALESMGLKTIGFAGGRADVWEPEEDIYWGSEQQWLGRDRFGEEGKLEDPLAASEMGLIYVNPEGPGREPDPLKAAQQIRETFKRMGMNDEETVALIAGGHTFGKTHGAASPSHLGPEPEAAPIEEMGLGWKNSYGTGKGGDTITSGLEVTWTSSPTKWTSNFLWNLFGYEWELTKSPAGAWQWRPKNGAGEGTVPDAHDPNKRHAPGMLTTDIALRVDPVYEKIARRFLENPDEFAKAFARAWFKLTHRDLGPRSRYLGPEVPEEEFIWQDPLPKRDYDLIDEGDIAELKKRIQASGMSIREMVMTAWASASTFRGSDKRGGANGARIRLAPQIGWEVNEPEQLRPVLETLEGIQQEFNRSQTGRKRVSLADLIVLAGCVGIEQAARNAGFEITVPFTPGRVDATQEQTDVESFSYLEPVHDGFRNYLKRKFSVPAEHLLIDRANLLTLTAPEMTVLIGGLRVLDCNWGRTKHGVLTDRPGALTNDFFVNLLDMRWKWNATDDENVFEGRDRATGELKWTATRVDLIFGSNAQLRAIAEVYASNDGQEKFVQDFVKAWTKVMNLDRFDLLVKK

SEQ ID NO: 40856 - protein, 566 aa, Clostridium perfringens str. 13
MLKRFIRYYKPYKKLFILDLLAAFLVSACDLFYPMITRNIINDVIPNKQIKLLFVFAIVLTLIFLIKAGLNYFMQYWGHVVGVRMQADMRRDLFDKLQDMPNKYFDNNKTGVIMSRIINDLLDISELAHHGPEDLFISLVMLVGSFIILCTINVPLTIITFAIIPFLLFYTIHKRNKMKKAFKETRVKTGEVNATIENSISGVRVTKSFGNKAYEMEKFDKSNGIFKKAREHAYKAMAEYFSGMFFLVDMLELIVLIAAGYFTYLGKINVGDFAAYLLYIKMFLQPIRKLINFNEMFQNGMSGFERYEEIMNEENEKEIPNAKDLKDVKGKITIKDVTFRYDNKESILENFNLDIEAGKMVALVGPSGGGKTTICNLIPRFYDYESGQIFIDDVDISTVTLKSLRENIGIVQQDVFLFTGTIKENIMYGNPNATDEEVIEAAKNACLHDFIMGLEDGYDTFIGERGVKLSGGQKQRISIARVFLKNPAILILDEATSALDNVTEYEIQKALEELSKDRTTLVVAHRLSTVKNSDEIVVLTDKGIEERGTHEELIKLGGVYSNLHNL

SEQ ID NO: 40857 - protein, 271 aa, Glycine max
MDTTLFRVVSSFQHQHQPDHDQSLNNSTTSSSSRSSRQQQNYPYPQEDEECFNFFMDEEDLSSSSSKHYCPYQPHPPSTTTIHHSFSPTPCDFEFSGKWAQDILLETARAVADKNTTRLQQLMWMLNELSSPYGDTDQKLASYFLQAFFSRISQAGDRTYRTLASASEKTCSFESTRKTVLKFQEVSPWTTFGHVASNGAILEALEGEPKLHIIDISNTYCTQWPTLFEALATRNDDTPHLRLTSVVTADATAQKLMKEIGARMEKFARLM

SEQ ID NO: 40858 - protein, 86 aa, Oryza sativa
GLTPRRLVSSHPLSPFASPSPVFGVDRPAMADRTATFVDLVIAIILPPLGVFLKVGCEIKFWICLLLSFFGYLPGIIYAVWVIVNH

SEQ ID NO: 40859 - protein, 446 aa, Thermus thermophilus HB27
MGYTKAEILKALKGENVKFLRLQITDILGVVKNVEVPESQFEKALDGEIMFDGSSIEGFTRIEESDMLLRPDYNTFVILPDLVEDPKRGRVARLICDVYYPDGRPFEGDPRYVLKRQIERLKKLGFDNLYAGPEPEFFLFLRTPEGLPTTETHDRAGYFDLAPIDKGEEARRDMVNALVAMGFEIEAAHHEVAPGQHEIDFKYADALTTADNIATFKWVVKRIALNHGLHATFLPKPIRGINGSGMHTHLSLFKDGENAFYDPNAEYQLSQTALHFIAGLLEHAAGMVAVTNPLVNSYKRLTPGYEAPTNIAWSASNRSAMIRIPARRGVGTRAELRMPDPSCNPYLALAVMAAAGADGIERKLLPPPPIQRNIYQMTVRERRKHKIRELPGTLREALEALRKDPVIREALGEHVYTHFLQAKQMEWDDYRVTVHQWELDRYLATY

SEQ ID NO: 40860 - protein, 139 aa, Cytophaga hutchinsonii
MGGNRTFSMIKPDAVKDGHSGSILKMIEGAGFRIVAIKLTYLSAERAGEFYAVHTGKPFYDSLKSIMSESPIIALILEKENAVEDFRKLIGATNPANADAGTIRKLFAKSLERNAVHGSDSDENAQIEGSFFFSALEKF

SEQ ID NO: 40861 - protein, 380 aa, Ehrlichia sp. ERm58
VDITCLYKDTGILTYDPGFMSTAACESRITFIDGNKGILRYRGYNIADLVNSNKSFIEIVYLLFYGVLPDANDLQNFVLQVSQEYMPIKIVNDIIKSFPRNSHPMAILISCFSGLASYYNNQRHNEDELKYARLAVSQIAGIVAMIYRHITDQDFIQANTELSYSENFIHMMFDISSYEFTKVVSKALDVIFILHADHEQNASTATVRLTGSTGANLFACLAAGAATLWGPAHGGANEAVINMLMEIEKPSNVKQFVQKVKDKNNGIRLMGFGHRVYKNYDPRAKIICEICKEVLNDLKTSHPLLEVALELESIALQDSYFIERSLYPNVDFYSGIVLKAIGIPVSMFTTLFALARTSGWSAQWYEMIKGRDYKICRPRQ

SEQ ID NO: 40862 - protein, 396 aa, Ehrlichia sp. EHt224
KVKLPVLCDTNGNKVVDITSLYKSTGILTYDPGFMSTAACESKITFIDGSKGILCYRGYNIADLVNSNKSFIEIVYLLFYGSFPSVDDFKDFMLQISQEYMPPKMICDVIKSFSQDAHPMTILMACFSGLASYYNNQQHCENELKYARLAVSQIAGIIAMIYRHITDQDFIQANTELSYSENFIHMMFDISSYEFTKIVSKALDIIFILHADHEQNASTATVRLTGSTGANLFACLAAGAATLWGPAHGGANEAVINMLMEIEQPSNVKQFVQKVKDKNNGIRLMGFGHRVYKNYDPRAKIICEICKEVLKDLKVSHPLLEIALELENIALQDSYFIERNLYPNVDFYSGIVLKAIGIPVSMFTTLFALARTSGWSAQWYEMIKDKNYKICRPRQL

SEQ ID NO: 40863 - protein, 534 aa, Pseudomonas fluorescens Pf-5
MKLLAVRRLLRIQRVVIRYRLDDLLFDLPLPWFLLALRFALPWRWFPRKPLDLSRGARLRLALQDLGPIFIKFGQILSTRRDLLPEDIADELMLLQDRVPPFDSQKSVALIEAQLGKKISDVFSRFDIEPLASASVAQVHAAKLKTGEEVVVKVIRPGLKPIIAQDLAWLFILARAAEKLSADARLLHPVDVVSDYEKTIYDELDLLREAANASQLKRNFEGSPLLYVPQVYWDWCRPKVLVMERIYGIQVTDLATLADQRTDMKMLAERGVEIFFTQVFRDSFFHADMHPGNIFVSTVQPWSPQYIAIDCGIVGSLTPEDQDYLARNLFAFFKRDYRRVAQLHIDSGWVPAETKLNEFEAAIRTVCEPIFEKPLKDISFGQVLMRLFQTARRFNMEVQPQLVLLQKTLLNIEGLGRQLYPDLDLWNTAQPFLERWMRERVSPKAVLGNIHSQIEQLPHLANMTRDLLERMSQPHAADPPAPWHKRKDDWFLRLLGTAHLGGGAVLAAGGPLHELGHWPAGIMIAVGLYLIVRR

SEQ ID NO: 40864 - protein, 259 aa, Glycine max
KEEMAGESYEEAITSLTKLLSEKAELGGVAAAKIKELTAELDAAGSKPFNPEERIRTGFIHFKNEKFEKNPYLYGELAKGQSPKFMVFACSDSRVCPSHILDFQPGEAFMVRNIANMVPPYDKTKYSGAGAAIEYAVLHLKVENIVVIGHSCCGGIKGLMSIPDDGTPASEFIEPWVQICTPAKSKVKAGPSDLSFSEQCTNCEKEAVNVSLGNLLTYPFVRDGVVNQTLALKGAHYDFVNGTFELWDLNFKLFPTVSV

SEQ ID NO: 40865 - protein, 374 aa, Ustilago maydis 521
MTPNKRSRASSIASNDGATAIATAAAAAVPSSSHAASTLPASGPLVHASQDLDDFQASFWRYQMDLVEQGGDADGNIVDFKSGLPTQGQLPLARIKKVMKSDDQVKMISAEAPILFARACEIFISDLTCRAFLIAEEHKRRTIQRSDVTGAIGRSDLFDFLIDIVPRHESVPSSRLPGGGAARREKTGEGRGLGRSNADASASTKQQQNQAVSYDNHLLHSMAGAYDDAEASSSTTAALTEEGGAGSSSQSYNIPHTSNANVNVGHTPMSHWIHDNSADQHSSQPDDHHATHSHHHAASSIHASHPGGASAAHDHQQPHHHAHHHHLAQHAGSHHSHHHSPLDYVTSSSNAGTPNSIGAGSATGGAWPHTFSGF

SEQ ID NO: 40866 - protein, 527 aa, Arabidopsis thaliana
MENQEEDEVVLAKVTSEVEDNFEDEGLVSNSTLEKVAAAKKYIENHYNRRMRHIQQRKERRWVLEQKIASLDVSEKEQLELLEDLQRKETEYTRLMRNRLCVDDFDLLSIIGRGAFGEVRLCREKKTGNIYAMKKLKKSEMLSRGQVEHVRAERNLLAEVASDCIVKLYYSFQDPEYLYLIMEYLSGGDVMTLLMREETLTETVARFYIAQSVLAIESIHKHNYVHRDIKPDNLLLDKYGHMKLSDFGLCKPLDCRNISAMNVNEPLNDENINESIDGDENCSIGRRGRRWKSPLEQLQHWQINRRKLAYSTVGTPDYIAPEVLLKKGYGVECDWWSLGAIMYEMLVGYPPFYSDDPVTTCRKIVSWRTHLVFPEGARLTPEARDLICRLLCDSEHRLGSHGAGAEQIKAHTWFKDVEWEKLYEMDAAFKPVVNGELDTQNFMKFDEVECPKPARTGSGPSWKVSITPQNINFVGYTYRNFDAVRGSRHSLDIKGSVSPPRSSTDSTRSDSAIDYTKLSTGGDGSQQ

SEQ ID NO: 40867 - protein, 185 aa, Zea mays
MAEQYQLIRRRDADQPEPFEARVLPELLARLKQAGHSNDALARQLAKLDIQLVLTAHPTEVARRTLIQKYDAIAGQLATQDHRDLTPAEREQVRERLRRLIAEAWHTEEIRRTRPTPVDEAKWGFAVIEHSLWHAIPSHLRKVDKALLEATGLRLPLEAAPIRFASWMGGDRDGNPNVTAAVTRE

SEQ ID NO: 40868 - protein, 337 aa, Antirrhinum majus
MAPIKIGINGFGRIGRLVARVALQRDDVELVAVNDPFISTDYMTYMFKYDSVHGAWKHHELKVKDEKTLLFGEKPVVVFGRRNPEEIPRASTGAEYIVESTGVFTDKDKAAAHLKGGAKKVIISAPSKDAPMFVVGVNEKEYKSDLHIVSNASCTTNCLAPLAKVINDRFGIVEGLMTTVHSITATQKTVDGPSAKDWRGGRAASFNIIPSSTGAAKAVGKVLPQLNGKLTGMSFRVPTVDVSVVDLTVRLEKKATYEQIKAAIKEESEGKLKGILGYTEDDVVSTDFVGDSRSSIFDAKAGIALNDNFVKLVSWYDNEWGYSTRVVDLIVHMASVQ

SEQ ID NO: 40869 - protein, 491 aa, Ehrlichia canis str. Jake
MLHLQILLHSTIIIRFVSINKSMTKHEFLIIGSGPGGYIAAIRAAQLGYDVAIVEKENSLGGVCLNWGCIPTKSLLQSASVYHNIKKADIFGITVKDVKFDFNKIIERSRNVVEKLANGISGLMKKNNIKVYHGTAKLLGNATVEITDHSNKRISITSTHIVLATGSQAKNIPGIDFDNNIVWNAKNAMTPNKFPESILIIGSGAIGIEFASFYNTFGTQVTMVELKDNILPLEDHEVSKCMHNILSNKGIKIHTSSSITKLEKCNNYAKVQISDTIDLQVDNVILAVGIIPNSSNIGLENTKIKTDNAGFIITDKHCCTDEPGIYAIGDVAGFPCLAHKASHEAILCIENIAATENKIPQHKIHTINKNNIPSCIFSIPQIASIGLTEHQAKHQGYNFKVGKFNANCSGKAVAIDEVEGFVKVIIDKSTGELLGAHMIGAEVTEMINGYIIGKQVEITDQDITSAIFPHPTLSEMLHEAVLSSNNESLNS

SEQ ID NO: 40870 - protein, 439 aa, Oryza sativa (japonica cultivar-group)
MESRGKILMERYELGRLLGKGTFGKVHYARNLESNQSVAIKMMDKQQVLKVGLSEQIRREITTMRLVAHKNIVQLHEVMATRNKIYFVMEYVKGGELFEKVAKRGKLTEVVAHKYFQQLISAVDYCHSRGVYHRDLKPENLLLDENENLKVSDFGLSALSESKRQDGLLHTTCGTPAYVAPEVISKIGYDGAKSDIWSCGVILFVLVAGYLPFQGPNLMEMYRKIQHGEFRCPGWFSRKLQKLLYKIMDPNPSTRISIQKIKESTWFRKGPEENRILKERTLNENTTKNVALVLGVRRKKNAHEDVKPMSVTNLNAFEIISFSKGFDLSGMFIVKEWRNEARFTSDKSASTIISKLEDVAKALNLRVRKKDNGVVKMQGRKEGRNGVLQFDIEIFEVTTSYHIIEMKQTSGDSLEYRQLLEEGIRPALKDIVLAWHGDE

SEQ ID NO: 40871 - protein, 412 aa, Arabidopsis thaliana
MTSIPLGPPQPPSLAPQPPHLHGGDSLKRRPDIDNDKEMSAAVIEGNDAVTGHIISTTIGGKNGEPKQTISYMAERVVGTGSFGIVFQAKCLETGESVAIKKVLQDRRYKNRELQLMRLMDHPNVVSLKHCFFSTTTRDELFLNLVMEYVPETLYRVLKHYTSSNQRMPIFYVKLYTYQIFRGLAYIHTAPGVCHRDVKPQNLLVDPLTHQCKLCDFGSAKVLVKGEANISYICSRYYRAPELIFGATEYTSSIDIWSAGCVLAELLLGQPLFPGENSVDQLVEIIKVLGTPTREEIRCMNPNYTDFRFPQIKAHPWHKVFHKRMPPEAIDLASRLLQYSPSLRCTALEACAHPFFNELREPNARLPNGRPLPPLFNFKQELSGASPELINRLIPEHVRRQMNGGFPFQAGP

SEQ ID NO: 40872 - protein, 423 aa, GIBBERELLA ZEAE PH-1
MSCFSSLPPQPTDEIFDLLGAYRKDSNPDRVNLGVGVYCTDEGKSWPLDVVTRVEKDLFEEASLTRHDYLPIEGDQQFLKLARDLVFAHQDELSVASVQTVSGTGANHIGARFVADYLRPQNIWVSDPTWANHHMIWESVGLKPKLYPYYKKSDCSLDFEGMIKTLEEEAQPRDAVLLHACAHNPTGLDPTKEQWKIIAEVCQRKQLFPFFDAAYQGFASGSPAEDAWAIRYFYQQQPRPDMIVAQSFSKNFGLYGHRTGAIHLVLAEPSKEIRDNAYSTLSYLLRSEISMAPKYGSTIVKTVLDSEELTAAWMADLQVMSSRIKSMRQALYDELVRLETPGTWNHIIDQIGMFSYTGLTPFEVKVLRERFHIYLLKSGRISISGLNKRNVNYVAKAIHDVRVNGHELNGTNGTNGTNGVNGH

SEQ ID NO: 40873 - protein, 274 aa, Deinococcus radiodurans R1
MKPLRAAALTLLLFGAAAGAYLVGRVSAQQALVTPDEINTVEVVQAALPAVVRIDVRLRKEALQPGDDPVEVGSGFFYKRDLIVTNYHVVEDQEAITVTLSNGRQATARIEATDPGIDIALLRVQGVTAPGTLAFGDSARLVPGQKLLVIGTPLRFPNFVSTGIFSVLASARDVPRTDTIAQEVGQYLATTASIQQGNSGGPVLDSRGAVVGVAAANAAPNLAVAGLIGLALPSDLVAQSVDDLEKTGAPQRGTLGATLVDLDTLDPGCASSRA

SEQ ID NO: 40874 - protein, 580 aa, Enterococcus faecalis
MKSFYKKKFALTDQGAEALTKASISSFFVYCINMVPAFILMMLIDELVLENAKPHWLYFAVSFVTLLFMYWLLDREYENLYNSTYKESAHLRVQIADDLSNLPLSYFSKHNLSDLSQTIMSDVEGIEHAMSHAIPKSGGMALFFPFISVMLLVGNVKMGLAVILPTLFSFVLILLSKKSQTKANTKYYDTLRENSEEFQETIELQQEINSFNLSKKVQDRLFKKMEESERIHLKVELSTFSVMALSSIFSYVSLAVVILVGVHLLLTGEVTILYVVGYLLAAIKIKDSFDSMKEGVLEIFYLAPKIQRIRAMKETSIQEGSDSSLKSFDIELRDVSFSYDNNTPILDHISFTAKQGEVTTLVGASGSGKTSILKLVSRLYDYDEGCILIDGYDIKRVSPASLFSKIAIVFQEVTLFNTSILENIRIGNSQASDEEVKKAARLANCEDFIEKLPDGYHTLVGENGSSLSGGERQRLSIARAFLKNAPILILDEITASLDVENEKRIQESLNRLIQDKTVLIISHRLKSIEKVNKIVVMDQGKVVDQGTHSELYRRSEIYKNLIKKTKLSEKFVYEKEAQSR

SEQ ID NO: 40875 - protein, 519 aa, Caulobacter crescentus CB15
MVVRTTACALIPVTLMSPATKGPTRTSRASTGRYGPMGRTPVASVSNAGPSAGMSADGGKVNMTFVAAIVAVATIGGFMFGYDSGVINGTQEGLESAFNLSKLGTGLNVGAILIGCAIGAFAAGRLADVWGRRTVMIISALLFVISAIGTGAAESSIVFIIFRLIGGLGVGAASVLCPVYISEVTPANIRGRLSSVQQIMIITGLTGAFVANYALAHTAGSSTAEFWLGLPAWRWMFWMQIIPAGVFFLCLLGIPESPRYLVAKGKDAQAEAILSRLFGAGQGAKKVEEIRASLSADHKPTFSDLLDPTTKKLRVILWAGLVLAVFQQLVGINIVFYYGSVLWQSVGFTEDDSLKINILSGTLSILACLLAIGLIDKIGRKPLLLIGSAGMAVTLGVLTWCFSTATTVNGALTLGDQIGLTALIAANLYVIFFNLSWGPVMWVMLGEMFPNQMRGSALAVCGFAQWIANFAISVSFPALAAASLPMTYGFYALSAVVSFFLVQKLVHETRGKELEAMQG

SEQ ID NO: 40876 - protein, 127 aa, Thermotoga sp. RQ2
FLPGAEEFLERLKKKDLRMAAVTNGVRFVQEKRSRKLKLDRFFEFVLTSEEAGVEKPDPHIFWMALERMKLKKEEVLYVGDDLSSDLKGARNTGIDFVLFSPDGDSSGDFPVARNFEELEKIVEELL

SEQ ID NO: 40877 - protein, 384 aa, Xylella fastidiosa Ann-1
MTGIPPPSRFPEQPIPPWRHAVLKVGSSLLAADGGGLSPRFALDLAHFVSANITAGRQLVIVSSGAVAAGRALIPPLPESGGALAARQALAALGQAQLIALWQRFFDRPVAQVLLTHDDLRNRRRYLNARATLRELLHLGTLPVVNENDTVSVDELKLGDNDNLAAIVAALIDAQALFIATDIDGLYTTDPRHHPDAQPLHEVRTLTPEHLAMAGDSSSTVGTGGMRTKLEAALKAGAAGIDTYLFNGRSSDVVRGLAQHRLRGTRIHPTCTPIAARKYWLRHAPVEPGAILIDAGAAAALAQQGASLLPGGVLSAEGDFRRGDMIQIATRSPDHPSHPLARGLVQYSAADVRRIAGCHSRDIQTLLGYTYGDTIVHRDDLVLL

SEQ ID NO: 40878 - protein, 418 aa, Xylella fastidiosa Ann-1
MSHIRHLAQQCRDAARILATLSTDAKRRLLETMATALNTDAATILAANAADLDAARTQQVGTAMLDRLALDPQRLAAMADALRDIAALPDPVGQVTRDDRRPNGIHIQKIRVPLGVIAMIYEARPNVTADAAALCIKAGNGIILRGGSEAIRSNIAIATALQRALRLASLPETALILVQDMARHTMLELLQLSDLIDLVIPRGGEGLIRFVAEHARIPVIKHYKGVCHQFVDASADIKMAIRLLIDGKTTRPAACNALETLLVHTDIAPRFLPAAAAALRPYGVQLRGDHATCTLLPDVLLATDADYAAEYLDLILAIRIVPNLDAALEHIRRYGSDHTEVIVTADPAHADTFVQQLHSAVVMVNASSRFSDGGALGLGAEIGISTTRLHAYGPMGLDALTVERFVVRGQGQVRHCPP

SEQ ID NO: 40879 - protein, 495 aa, Oryza sativa
MATCADTLGPLLGTAAANATDYLCNQFADTTSAVDSTYLLFSAYLVFAMQLGFAMLCAGSVRAKNTMNIMLTNVLDAAAGALFYYLFGFAFAFGAPSNGFIGKHFFGLKQVPQVGFDYSFFLFQWAFAIAAAGITSGSIAERTQFVAYLIYSAFLTGFVYPVVSHWIWSADGWASASRTSGSLLFGSGVIDFAGSGVVHMVAACRTLGRPHRGPPHWRFDHAGRSVALRGHSASLVVLGSFLLWFGWYGFNPGSFLTILKSYGPPGSIHGQWSAVGRTAVTTTLAGSTAALTTLFGKRLQTGHWNVIDVCNGLLGGFAAITAGCSVVDPWAAIICGFVSAWVLIGLNALAARLKFDDPLEAAQLHGGCGAWGVIFTALFARKEYVDQIFGQPGRPYGLFMGGGGRLLGAHIVVILVIAAWVSFTMAPLFLVLNKLGLLRISAEDEMAGMDQTRHGGFAYAYHDDDASGKPDRSFGGFMLKSAHGTQVAAEMGGHV

SEQ ID NO: 40880 - protein, 662 aa, Xylella fastidiosa 9a5c
MLLSDLGVSLALMLAIVMHPQISHVRRCIGIIADYTSLTVLMLLMGEAGSPLYVLCLWVTIGNGLRYGCAYLLVTTTLSALSFLMVILVSAYWKSNPFLAWGLLIGLIAIPWYFQSLLKALIQALKDARHANEAKSRFLANMSHEFRTPLNGLSGITEVLATTRLDAEQRECLKAIQASVHSVLSLIEEVLDISRIEAGKIRILHDTFSLQEVIGSVGLILQPQIRNKVLEYRVDVGLDVPEWLFGDAGYVRQVLLNIVGNAVKFTERGGITLCVSVLNRSRERSVVLRFEVADTGIGVPLGMRARLFDMFEQADVGLDRRYQGSGLGTAIAKGLIELMGGSIGFEENVPCGSLFWFELPFELGKEPVVAQELPEASQCTEASNVIAFSNPFLRHRARVKSLRVLVADDHETNRMVLSRILDKAGHKLLCVDGAEAVLDCLISMEFDVVIIDLHMPGMSGLEMLKQLRVMQSAGLPYTPVLVLSADAASDSIRCCKEAGARAFLSKPVLATKLLDVLAEIAEGDGGALPYAALSQSSVQQHQVFDPTGLDDLAELDMDDGFEERFIVQSLRDAEHCQQTMLSAAETNQWQEVREQAHALRGVLGHLGLMRASSLAAELMRIPDWQLQSEWCARVQVLYEELRSGRDALEARRQERRRSGILQ

SEQ ID NO: 40881 - protein, 457 aa, Pisum sativum
MTDSFAHCASHINYRHKMKTMFIFSTPCCSPSTAFFSPFRASNSKPLRSTLSLRSSISSSSITSTSHCSLAFNIVKHKEKNVVSANMTSSVSSRTFLNAQNEQDVLSGIKKEVEAGTLPASIAAGMEEVYLNYKSAVIKSGDPKANEIVLSNMTALLDRIFLDVKEPFVFEAHHKAKREPFDYYMFGQNYIRPLVDFETSYVGNMPLFIQMEEQLKQGHNIILMSNHQSEADPAIIALLLEMRLPHIAENLIYVAGDRVITVPLCKPFSIGRNLICVYSKKHMLDNPELVDMKRKANTRSRKEMAMLLRSGSQIIWIAPSGGRDRPVANSGEWAPAPFDSSSVDNMRRLVDHSGPPGHIYPLAILCHDIMPPPLKVEKEIGEKRIISYHGTGISTAPEISFSNTTAACENPEKAKDAYTKALYDSVTEQYDVLKSAIHGKKGLQASTPVVSLSQPWK

SEQ ID NO: 40882 - protein, 337 aa, Mesembryanthemum crystallinum
MAKVKVGINGFGRIGRLVARVILQRDDCELVAVNDPFISTDYMTYMFKYDSVHGQCKSHEIKLKDEKTLLFGETPVAVFGCRNPEEIPWGQAGADFVVESTGVFTDKDKAAAHLKGGAKKVVISAPSKDAPMFVVGVNEHEYKSDLNIVSNASCTTNCLAPLAKVINDRFGIVEGLMTTVHAMTATQKTVDGPSMKDWRGGRAASFNIIPSSTGAAKAVGKVLPALNGKLTGMAFRVPTCDVSVVDLTVRIEKAASYEQIKAAIKEESEGKLKGILGYTEDDLVSTDFIGDNRSSIFDAKAGISLNDNFVKLVSWYDNEWGYSTRVVDLIMHISKCQ

SEQ ID NO: 40883 - protein, 304 aa, Staphylococcus aureus subsp. aureus Mu50
MTNKVVILGSTNVDQFLTVERYAQPGETLHVEEAQKAFGGGKGANQAIATARMQADTTFITKIGTDGVADFILEDFKAAHIDTSYIIKTTEAKTGQAFITVNAEGQNTIYVYGGANMTMTPEDVINAKDAIINADFVVAQLEVPIPAIISAFEIAKAHGVTTVLNPAPAKALPNELLSLIDIIVPNETEAELLSGIKVTNEQSMKDNANYFLSLGIKTVLITLGKQGTYFATKNQSQHIEAYKVNAIDTTAAGDTFIGAFVSRLNKSQDNLADAIDFGNKASSLTVQKHGAQASIPLLEEVNQV

SEQ ID NO: 40884 - protein, 395 aa, Alkaliphilus metalliredigenes QYMF
MNIDKEVMLLKDELIALRRDFHQHPELGFQEHRSAEVIREYLNSCGIEVKTVAKTGVVGLLKGKHPGSTVMLRADMDALPIEEENDVPYKSINKGKMHACAHDGHMAMLLVAAKILAQGKEEIRGNIKFVFQPNEEEAGARIMIEEGVLENPQVDAALGIHLWTPLESGKMGIAPGPVMGAHDNFKIVIKGKGGHTSAPHTSVDPIITAANIIQTVQIIQTREINALTPTVLMFGKINGGTTPNVIPESVTLEGTIRYLYEGNDDGEEQPRKRLERIVKSVCEGHRAEYELEVRPSNTTLMNDPQLTALVEIEAGKIVKERQRDVIPYICMAGEDFSEFSMEVPSTFIFIGTGNKNEKSHYPHHHPRFNIDENTLLMGVQMHIRGALAYLSSSKF

SEQ ID NO: 40885 - protein, 574 aa, ASPERGILLUS NIDULANS FGSC A4
MANTPHGGVLKDLIARDAPRHDQLEAEAATLPSIVLTERQLCDLELIMNGGFSPLEGFMNQKDYDGVVAESRLADGNLFSMPITLDASKAVIEQAGLKPGSRVTLRDFRDDRNLAILTIDDIYRPDKEKEAKLVFGGDPEHPAIKYLNTKVEEYYIGGKLEAVNKLNHYDYVGLRYTPAELRIHFDKLGWTRVVAFQTRNPMHRAHRELTVRAARARQANVLIHPVVGLTKPGDIDHFTRVRAYQALLPRYPNGMAALALLPLAMRMGGPREAVWHAIIRKNHGATHFIVGRDHAGPGKNSKGQEFYGPYDAQHAVEKYRAELGIEVVEFQQVTYLPDTDEYMPKDEVPAGTKTLDISGTELRNRLRTGAHIPEWFSYPEVVKILRESSPPRALQGFTIFLTGYMNSGKDAIARALQVTLNQQGGRSVTLLLGDTVRHELSSELGFSREDRHTNVQRIAFVAGELTRAGAAVIAAPIAPYEHSRKAAREAVQSTGGSFFLVHVNTPLEYCEATDKRGIYAKARRGEIKGFTGVDDPYEAPTNANLVVDVSKQSVRSIVHEIILMLESEGYFERL

SEQ ID NO: 40886 - protein, 556 aa, Zymobacter palmae
MYTVGMYLAERLAQIGLKHHFAVAGDYNLVLLDQLLLNKDMEQVYCCNELNCGFSAEGYARARGAAAAIVTFSVGAISAMNAIGGAYAENLPVILISGSPNTNDYGTGHILHHTIGTTDYNYQLEMVKHVTCARESIVSAEEAPAKIDHVIRTALRERKPAYLEIACNVAGAECVRPGPINSLLRELEVDQTSVTAAVDAAVEWLQDRQNVVMLVGSKLRAAAAEKQAVALADRLGCAVTIMAAEKGFFPEDHPNFRGLYWGEVSSEGAQELVENADAILCLAPVFNDYATVGWNSWPKGDNVMVMDTDRVTFAGQSFEGLSLSTFAAALAEKAPSRPATTQGTQAPVLGIEAAEPNAPLTNDEMTRQIQSLITSDTTLTAETGDSWFNASRMPIPGGARVELEMQWGHIGWSVPSAFGNAVGSPERRHIMMVGDGSFQLTAQEVAQMIRYEIPVIIFLINNRGYVIEIAIHDGPYNYIKNWNYAGLIDVFNDEDGHGLGLKASTGAELEGAIKKALDNRRGPTLIECNIAQDDCTETLIAWGKRVAATNSRKPQA

SEQ ID NO: 40887 - protein, 410 aa, Alkaliphilus metalliredigenes QYMF
MSNPFQTALSTLKAASEVAGLEPNVVKMLSQPKRIFEFTIPMKMDNGDLEIFTAYRVHYNDALGQTKNGIRFVPNLDLDTVKALGFWMTVKHAVSGIPAGGGKGGIRVDPKKLSEGELERLTRSYIRKLPMKGAWVDIPGADIGTSAKTQGWMLDEYEEIMGFHSPAAINDKPAELNGTVGSMEATGTGAFFVTMEAVKDLSIPKGSTVVIQGFGNVGRIAGRLLHQEGYVVIAVSDISGGIYNPQGLDVEKLEAYVDETGSIKDFPGTTVVSNEALLQLECDILMPSAVQSVITEQNAHNIKTKLIMECANGPTTPAGEAILEKRGIIIVPDVLTNSGSAIVCSFERTQGLTDTYWDIETVNSKLKERIVKAYKETTTTAKDKNTSLRNAAWVNGLTKVAKAMKARGWV

SEQ ID NO: 40888 - protein, 594 aa, Neisseria meningitidis
MALVELKVPDIGGHENVDIIAVEVNVGDTIAVDDTLITLETDKATMDVPAEVAGVVKEVKVKVGDKISEGGLIVVVEAEGTAAAPKAEAAAAPAQEAPKAAAPAPQAAQFGGSADAEYDVVVLGGGPGGYSAAFAAADEGLKVAIVERYKTLGGVCLNVGCIPSKALLHNAAVIDEVRHLAANGIKYPEPELDIDMLRAYKDGVVSRLTGGLAGMAKSRKVDVIQGDGQFLDPHHLEVSLTAGDAYEQAAPTGEKKIVAFKNCIIAAGSRVTKLPFIPEDPRIIDSSGALALKEVPGKLLIIGGGIIGLEMGTVYSTLGSRLDVVEMMDGLMQGADRDLVKVWQKQNEYRFDNIMVNTKTVAVEPKEDGVYVTFEGANAPKEPQRYDAVLVAAGRAPNGKLISAEKAGVAVTDRGFIEVDKQMRTNVPHIYAIGDIVGQPMLAHKAVHEGHVAAENCAGHKAYFDARVIPGVAYTSPEVAWVGETELSAKASGRKITKANFPWAASGRAIANGCDKPFTKLIFDAETGRIIGGGIVGPNGGDMIGEVCLAIEMGCDAADIGKTIHPHPTLGESIGMAAEVALGTCTDLPPQKKK

SEQ ID NO: 40889 - protein, 480 aa, Saccharomyces cerevisiae
MSAILSTTSKSFLSRGSTRQCQNMQKALFALLNARHYSSASEQTLKERFAEIIPAKAQEIKKFKKEHGKTVIGEVLLEEQAYGGMRGIKGLVWEGSVLDPEEGIRFRGRTIPEIQRELPKAEGSTEPLPEALFWLLLTGEIPTDAQVKALSADLAARSEIPEHVIQLLDSLPKDLHPMAQFSIAVTALESESKFAKAYAQGVSKKEYWSYTFEDSLDLLGKLPVIASKIYRNVFKDGKITSTDPNADYGKNLAQLLGYENKDFIDLMRLYLTIHSDHEGGNVSAHTTHLVGSALSSPYLSLAAGLNGLAGPLHGRANQEVLEWLFKLREEVKGDYSKETIEKYLWDTLNAGRVVPGYGHAVLRKTDPRYTAQREFALKHFPDYELFKLVSTIYEVAPGVLTKHGKTKNPWPNVDSHSGVLLQYYGLTEASFYTVLFGVARAIGVLPQLIIDRAVGAPIERPKSFSTEKYKELVKKIESKN

SEQ ID NO: 40890 - protein, 326 aa, Nicotiana tabacum
GRIGRLVARVALQRDDVELVAVNDPFISTDYMTYMFKYDSVHGQWKHHELKVKDEKTLLFGEKSVRVFGIRNPEEIPWAEAGADFVVESTGVFTDKDKAAAHLKGGAKKVVISAPSKDAPMFVVGVNEKEYKPEYDIVSNASCTTNCLAPLAKVINDRFGIVEGLMTTVHSLTATQKTVDGPSMKDWRGGRATSFNIIPSSTGAAKAVGKVLPALNGKLTGMAFRVPTVDVSVVDLTVRLEKEASYDDIKAAIKEESEGKLKGILGFTEDDVVSTDFVGDSRSSIFDAKAGIALSKNFVKLVSWYDNEWGYSSRVIDLICHMASVA

SEQ ID NO: 40891 - protein, 562 aa, Saccharomyces cerevisiae
MNVFGKKEEKQEKVYSLQNGFPYSHHPYASQYSRPDGPILLQDFHLLENIASFDRERVPERVVHAKGGGCRLEFELTDSLSDITYAAPYQNVGYKCPGLVRFSTVGGESGTPDTARDPRGVSFKFYTEWGNHDWVFNNTPVFFLRDAIKFPVFIHSQKRDPQSHLNQFQDTTIYWDYLTLNPESIHQITYMFGDRGTPASWASMNAYSGHSFIMVNKEGKDTYVQFHVLSDTGFETLTGDKAAELSGSHPDYNQAKLFTQLQNGEKPKFNCYVQTMTPEQATKFRYSVNDLTKIWPHKEFPLRKFGTITLTENVDNYFQEIEQVAFSPTNTCIPGIKPSNDSVLQARLFSYPDTQRHRLGANYQQLPVNRPRNLGCPYSKGDSQYTAEQCPFKAVNFQRDGPMSYYNFGPEPNYISSLPNQTLKFKNEVNDEVSDKFKGIVLDEVTEVSVRKQEQDQIRNEHIVDAKINQYYYVYGISPLDFEQPRALYEKVYNDEQKKLFVHNVVCHACKIKDPKVKKRVTQYFGLLNEDLGKVIAEGLGVPWEPVDLEGYAKTWSIASAN

SEQ ID NO: 40892 - protein, 360 aa, Deinococcus radiodurans R1
MQVYLAGQNIEVQDLDEDEDELEGDDADTEDAVPGTAQAQQDDDEEKYFDDMPRAVSNDPVRQYLHEIGRVSLLTLEEEIALARRIEEGEEARKQLEEDESLDDRSRRRLMRQMEDGAAARQGLIEANLRLVVSIAKKYTGRGLGFLDLIQEGNQGLIRAVEKFEYRRRYKFSTYATWWIRQAINRAIADQARTIRIPVHMVETINKLTRTARQLQQELSREATHEEIAEAMGPGWDAAKVEEVQKVSQEPVSLETPIGDEKDSFYGDFIPDENLDSPVDNAAKTLLSEELEKALGKLTEREAMVLKFRKGLVDGREHTLEEVGQRFSVTRERIRQIENKALRKLKYHESRTRKLRDFLD

SEQ ID NO: 40893 - protein, 139 aa, Deinococcus radiodurans R1
MSEGIVSATSRQIPIGFSTGGEGITQRAIQTDAAINPGNSGGPLLGSDGRVIGINTQIYSPSGQAGAAQSAGVGFAIPINTARNLLPRLQAASGGLVSAPRVGLQPGILVQGRSGVLALGLGMLDPQANGRRGCPTPAC

SEQ ID NO: 40894 - protein, 198 aa, Pseudomonas aeruginosa PAO1
MKLHDLALSGNAYKVRLFLSLIGREATLRPVDFLNREHKTQAFLRMNPRGQIPVLEDGELQLGDSHAILVYLARRHADPVWYPLDPVSQGRIAYWLSYSANEVQNGPASARLITRFNLPLDREQTHQRGLEVLRLVDRHLAEHRWLAQGEQPSIADVALYPYLALAPEGGLALDHYPALNAWIARIRALPGYIPMPGL

SEQ ID NO: 40895 - protein, 202 aa, Bacteroides fragilis NCTC 9343
MEENNNIYPIFDRMLTRQDKEELLKQRGVMIWFTGLSGSGKSTIAIALERELHKRGLLCRILDGDNIRTGINNNLGFSETDRVENIRRIAEVSKLFIDTGIITIAAFISPNNDIREMAARIVGPDDFLEIFVSTPLAECEKRDVKGLYAKARRGEIKNFTGISAPFEAPEHPALSLDTSVLSLEESVNRLLEIVLPRVSRHE

SEQ ID NO: 40896 - protein, 586 aa, Chlamydomonas reinhardtii
MAELEKTFALIKPDAVRAGKAQEIMQLIELNGFTIIAKQKLQLTRARAEEFYGEHKGKEFFPKLVNFMTSGPIWALVLAKPGAILAWRALMGPTNVFKARAEQPKCLRALYGTDGTQNATHGSDSPISAAREIKFFFPTLSGDPTIYAEPTAAAEYITKRIQPALAKALAALAREKPSADKFEAITFVAGYLLQNNPNKPKVLMPDEWDPALMGDDEDDEADFINARLAAPTGNDGATKAEFDAMVEAAKADTGGAAPAQEFVYPDSKPTTPVVPAPPAPGSKPPSASGARPQSARPTSARPPSASAAPPAPLAPVPPPASSSRPASGSGRPPSATARPPSATPPPPPPAVELEEADDPAQLDEAATKVQAAFRGYQARKEVAVMRSEAQPGEAAAEPEQEAELQPEAEPEPQPEGEQEPQPQASASSSFLPDGVTEEMAAEAATRVQAHMRGHLARKQVAAIKAQQAAPAVAESSEALAEPEPQPEAEAEPQPQASVSSSFLPDGVTEEMAAEAATLVQAHMRGHLARKQVAAIKAQQAAPAVAESSEAQAEAEQTEAEAEPQPDAEAEAGAAEGEAEPEPEAAE

SEQ ID NO: 40897 - protein, 378 aa, GIBBERELLA ZEAE PH-1
MAPIKVGLVGYGNSAKSFHLPFITAIPDFEIVAILQRAEAPSDPSSAAKGSHCTVDFPRVKHYREADKFFADSEIQFVVVVTHHDTHGKFAEQALLAGKHVIVDKPFTVTSEEADKVIKISEEKGLILTCFQNRRWDADFKTLSHLIKNGAFGDIKEAELHYDFESPSWMSKMGTKFTPGSGMSYGLGTHSLDQALVLFGQPKSVTGFFRVQRDGESEVEDSFTIILQYDGAQKDLLVTVKTAVVTPMAQQLKQLVRGTKGSFIKFQQRSTCITEDNIAAGLKPLDKGFGIEYESMQGTLTTYEEFDGKVQKWNPETKKYTGRYPTLPSRWMGLYENVADAINGKAELVVKPTQCRDVLRVIELARESHEKGATVAWS

SEQ ID NO: 40898 - protein, 403 aa, Pseudomonas sp. Y2
MTDALIIDAVRTPIGRYAGALSGVRADDLGAVPLRALMQRHPQVDWSQVDDVVYGCANQAGEDNRNVARMSALLAGLPTSVPGVTLNRLCASGLEAVGTAARAIRCGEAGLVLAGGVESMSRAPLVMGKAEQAFSRQADIFDTTIGWRFVNPLMQQQYGIDSMPETAENVAEQFNISRADQDAFALRSQQRAGAAQASGRLAEEIVPVCIPQRKGPDKVIEQDEHPRADTTLEQLQRLGTPFRAGGSVTAGNASGVNDGACALLLASTEAARRYGLKARGRVVAMASAGVEPRIMGIGPVPATRKVLEIANLALADMDVIELNEAFAAQGLAVLRELGVADDDPRVNPNGGAIALGHPLGMSGARLVTTALRELEHRNGRYALCTLCIGVGQGLAMIIERLDD

SEQ ID NO: 40899 - protein, 377 aa, Thermus thermophilus HB27
MEVARGLEGVLFTESRMCYIDGQQGKLYYYGIPIQELAEKSSFEETTFLLLHGRLPRRQELEEFSAALARRRALPAHLLESFKRYPVSAHPMSFLRTAVSELGMLDPTEGDISREALYEKGLDLIAKFATIVAANKRLKEGKEPIPPREDLSHAANFLYMANGVEPSPEQARLMDAALILHAEHGFNASTFTAIAAFSTETDLYSAITAAVASLKGPRHGGANEAVMRMIQEIGTPERAREWVREKLAKKERIMGMGHRVYKAFDPRAGVLEKLARLVAEKHGHSKEYQILKIVEEEAGKVLNPRGIYPNVDFYSGVVYSDLGFSLEFFTPIFAVARISGWVGHILEYQELDNRLLRPGAKYIGELDVPYVPLEARE

SEQ ID NO: 40900 - protein, 469 aa, Clostridium acetobutylicum ATCC 824
MGENNSHKHSLLFIVLISCAAGLGGLLYGYDTAVISGAIGFLKKLYNLSPAMQGFVISSIMVGGVLGVGFSGFLGDAIGRRKVLMLAAALFAISAVISSISTSAFMLIFARIVGGLGIGMASALSVTYITECAPPSIRGRLSSLYQLFTILGISITFFVNLGIVNMGSETWRVSTGWRYMLACGTVPAIVFLITLFFVPESPRFLVKSGNIKKAAAVLTKINGAEIAKQELDSISKSLATENDSSLGQLLQPGLRRALLIGIFLAIFNQAIGMNSITYYGPEIFQMIGFKNNSSFLATSVIGVVEVFSTILAMFLIDKLGRKKLMEIGSAAMAVFMLLIGTSFYIKLSNGFVILIFIICFVVSFCISMGPIPWIMIPEIFPNHLRARATGIATIFLWGANWAIGQFTPMLLNGIGGAYTFWIFCGINVICFLVVTTKVPETKNKSLEEIEKFWIPKSKQNAKGSSVGAK

SEQ ID NO: 40901 - protein, 283 aa, Caulobacter crescentus CB15
MSPPAPLRVGLIQTRTPATHAAALGHVAPLVREAIAGGAKVVLTPECTNVVQKDRSLLLPALKTLDEDPVVLGLREIAAQTGTWIAIGSALVRRETGDKAANRQVVIDPTGAIVATYDKLHMFDVDLPPRDGKAGETARESSAYEPGDAAVVVDTPWAKLGLTICYDMRFPALHRALALAGATVLTVPAAFTRPTGEAHWEILLRARAIETGSFVLAAAQGGFHEDGRGTWGRSIVVGPWGEIIATLDHDEPGVLLADLDLPAADKARAAIPALKNARAFTGP

SEQ ID NO: 40902 - protein, 548 aa, Kineococcus radiotolerans SRS30216
MIDPPVPWWRTAAVYQVLPRSFADGDGDGLGDLAGLRARLPHLAGLGVDAVWVNPWYPSPLADNGYDVDDYRDVDPALGGLEEAEAFLREAHELGLKVLLDIVPNHTSSTHAWFRAALAGDARARARYLFRPGRGADGELPPNDWESCFGGPSWTRAPGPDGRPGEWYLHSFAPEQPDLDWRNPEVRAEFVDVLRFWFDRGVDGFRVDVAHGLLKQDGLPDALGRDRRTEEHPGWDQDEVHEVYREWRAVADAYDPPRVFVAEAWVARRERLPLYLRPDELHMAFEFDPLHVAWREGPWRRVVERGLAVAELTGAPSAWALTNHDVVRQVTRYARSQPPEHGSNVTERARWGEEVPDLALGRARARAAFLLTAALPGLVYVFNGEELGLEEVEDLPDALRRDPIHTRSGGADPGREGSRVPLPWSGDRPPFGFSPPGSPAPALPQPAGWAALSAQAQDRDPASTLNLYRRVLHLRRELVAAADPLRWDEAPEGVLAYARGTTRVWVNFGPGDVELPAGVEVLVRSGPGPGGVLPVDTAAWFVPARPPR

SEQ ID NO: 40903 - protein, 313 aa, Helianthus annuus
MTCTGMAFFSSNFMLQSSQEDDHHAPTSLSPILPPCSTTTQDFSGAAFLGKRSMSSYSGLNNNNMDGCDQEGNMNGEDELSDDGSQLLAGEKKRRLNMEQVKTLQRNFELGNKLEPERKMQLARALGLQPRQIAIWFQNRRARWKTKQLEKDYDALKRQFEAVKAENDSLQSQNHKLHAEIMALKNREPAELINLNIKETEGSCSNRSENSSEIKLDISRTPATDSPLSSHHQHQHQPIPNLFPSSNIDRPNSNNIVAHQLFHNSSSRPADHQLHCHKLDQSNAIKEECFSTMFVGMDDQSGFWPWLEQPQFN

SEQ ID NO: 40904 - protein, 372 aa, Coxiella burnetii RSA 493
MTKTAKGLRGQSAGETSIATVGKEGHGLTYRGYRIEDLAANATFEEVAYLLLKNKLPTKSELDAYTKKLVNLRSLPPALKDTLERIPASSHPMDVMRTGCSMLGNLEPENGFENEQNIADRLVAIFPAIQCYWYHYSHHGKRIDTELDDLTLAGYFLHLLLGKKAAQMAIDCMNASLILYAEHEFNASTFAARVCSATLSDIYSAVTAAIATLRGPLHGGANEAAMDLIMLYKTPSEAIAGIKRKLANKELIMGFGHAVYRERDPRNAIIKSWAQKLAPNAADGYLFDISDAIENTMQDEKKLFPNLDFYSATAYHFLNIPTKLFTPIFVMSRVTGWCAHIFEQRKDNRIIRPNADYIGPEEQGWVPIEKRR

SEQ ID NO: 40905 - protein, 455 aa, Clostridium acetobutylicum ATCC 824
MNKKISPALIYFFGAFGGFMFGYDIGIINGALPGINATWHVSSWLEGFITSGLFVGAMIGASLMASLADRFGRRRMIMWSAIVFALGALGSAVSTSTNLLIGARVILGVAVGGASALVPMYMGEISPAETRGKLSGLNQLMITVGMLFSYGVNFAFAGAFEGWRWMLGGAMVPAMVLLIGTFILPESPRFLARIGKTELAKQVLQTLRSKEEAETEYQEIINSKHTETGSFGDLFAKQALPAVIAGCGLTLLQQIQGANTIFYYSSQILSNVFGSANGGTISTVGIGVVLVLATIVTLLVVDKFKRRTLFMTGSIGMGASLLLVGLIYPYSEAKHAWATWLVFFFICLYVVFYAYSWAATTWIVVGELFPSNVRGLATGIASAVNWFGNILVALFFPVLLETVGLSVIFFGFAAICIIGFLFAKYVLYETKGKSLEEIETYLYNRSIGKVRGLNE

SEQ ID NO: 40906 - protein, 408 aa, Propionibacterium acnes KPA171202
MAKTRPKVLSIVLAGGEGKRLMPLTMDRAKPAVPFGGTYRLIDFVLSNLANSGLTQIAVLTQYKSHSLDRHISITWRMSTMLGSYVTPVPAQQRLGPRWYQGSADAIYQSLNLINDQSPDYVVVFGADNIYRMDVDAMLQYHIDSGLGCTVAGIRVPRKDASAFGIIDADQNHKITEFLEKPADPPGLPDASDESFASMGNYIFSREALVQALHDDAHSADSRHDMGGDVIPRFVNAADAQVYDFRDNEVPGNTEKDADYWRDVGTIDAYHDAHMDLVSVEPEFNLYNPDWPIWTMQEQAPGAKFVMRGSCDDTLVSAGCIISGTDIYRTVLGPRARIERWARVDESIVMNNVAIGSNATVHRAILDKNVIVPDGAQVGVDHDHDRARGFTVSPGGVTVVGKGITVPY

SEQ ID NO: 40907 - protein, 609 aa, Bdellovibrio bacteriovorus HD100
MKPNLPNKQEKEPVKVLSLQEQETLIKEEIQRFLKLAKEKGALTIEEINELLPPEIVAPSVLDSFMQGLEAGGVVISDLSESSKEEEGEGAFLENVDSEDEEIDDEEKAESEDVKGNDPVRLYLRKMGSVSLLTREGEVEIARRIEKGEREIVRAILLSPLGTYEIIQLGKRLDEGRIKVKSIFRGLEDEDTQYDEKEYIDKIHELIGRVTEYQKAAEKLFMTLRKEETNTPARQAAMKELVAMNDKLMANFESVNFNRKTINRVVIKFKNLVNRIGTLRRRIKDGVERTFSKDVTAMAERMKLIDANEKELTRMTRDTGLNYQKFKSYVLQAQEAEKRISRLDSETEMNHNWVKETYTAIWKGEREADAAKSELVEANLRLVVSIAKKYTNRGLQFLDLIQEGNIGLMKAVDKFEYRRGYKFSTYATWWIRQAITRAIADQARTIRIPVHMIETINKLVRTSRYLIQELGREPTPEEIADKMDMPVDKVRKVLKIAKEPISLETPVGEEEDSHLGDFIEDKKVINPAEAIVNLNLAEQTRRVLSTLTPREEKVLRMRFGIGEESDHTLEEVGQDFNVTRERIRQIEAKALRKLRHPSRSNKLKAFVDS

SEQ ID NO: 40908 - protein, 360 aa, Oryza sativa
MSASAAVSSTCAAASSTTSRRSSSSPASRVQATPRRSLPSRLVASRTSPRSPVVPPVYATASPGGAGGTTAAAARKKLLIFDAEEYLAESLAKYTARLSGEAVAERGAFTVALSGGSLIKALRKLTESPYLEAVEWSKWHVFWVDERVVPKDHADSNYKLAMDGLLSKVACQNVIIVNYSLRFTMCEMEILYAVLHILLDLVPIPASQIYAINDTLSAEGAADEYETCLKQLVNDGVVAISEVTGFPKLDLMLLGMGPDGHVASLFPGHPVVNENLKWVSYIKDSPKPPPERITFTFPLVNSSAHIALVVTGAGKAGAVHKAFSDKQSSSDLLPVEMVSQQEGVLTWFTDKPAVSMLSSI

SEQ ID NO: 40909 - protein, 270 aa, Brassica napus
  misc_feature (145)..(145): Xaa can be any naturally occurring amino acid
  unsure (1)..(270): unsure at all Xaa locations
MEPSLKPNPFLSFSSFLHTHCNRFASDLSARFEDTKRFAESLTTRRFSPPPFASVSQYPKPSSAGTSTATLNPSHVAKALAGTSVFTVSNTNPRVDPRVWDPTGEKSIGLLCFRQEDAEAFLAQARLRRRELKANAKVVPINLDXVYLLKVEGISFRFLPDPIQIKNAMELKSSSSKNGFDGVPVFQSELLVVRKKNKRYCPVYFSKEDIEKELSKYTRASRADQQIMVGSLEDVLRKMERSEKNSGWEDVIFIPPGRSYAQHMQEVIKE

SEQ ID NO: 40910 - protein, 336 aa, Emericella nidulans
MAPKVGINGFGRIGRIVFRNAIEAGTVDVVAVNDPFIETHYAAYMLKYDSQHGQFKGTIETYDEGLIVNGKKIRFHTERDPANIPWGQDGAEYIVESTGVFTTQEKASAHLKGGAKKVVISAPSADAPMFVMGVNNETYKKDIQVLSNASCTTNCLAPLAKVINDNFGIIEGLMTTVHSYTATQKVVDGPSAKDWRGGRTAATNIIPSSTGAAKAVGKVIPSLNGKLTGMAMRVPTSNVSVVDLTVRTEKAVTYDQIKDAVKKASENELKGILGYTEDDIVSTDLNGDTRSSIFDAKAGIALNSNFIKLVSWYDNEWGYSRRVVDLISYISKVDAQ

SEQ ID NO: 40911 - protein, 334 aa, Burkholderia sp. 383
MRFLYSVAPDARPAPRTTTETFMTIDILLTQPLPDAIDAELSARYAVHRLYAADQPDALLDRVATRIRGVVTGGANGLSAALMNRLPALEIVAISGIGTDAVDLDRARARGIHVTTTPDVLTDDVADMAMGLILMTLRDLGAGERIVRAGRWGKTAQPLATQVTGKRLGIVGLGRVGRAIAQRAQAFRMPVSYFGPREHRDSGYRFVPDLAALARDSDVLVIAASADHGNVLVTADVLAALGPEGFLINVARGKLVDEAALIRALADGTIAGAGLDVFANEPHVPAELLEFDRVVVQPHRASATRETREEMGRIVLANLAACFAGQRPPTSVTR

SEQ ID NO: 40912 - protein, 477 aa, Oryza sativa
MVKGGREALLGGYEMGRTLGEGNFGKVKYARHLATGGHFAVKILDRGRVVSLRAGDQIRREIATLKLLRHPHVVRLHEVAASKTKIYMVLEFVNGGELFERIVSPCFNDLLRYFLAAKIFMPATMAVKGKLSEKEGRRLFQQLIDGVSYCHDRGVYHRDLKPENVLVDQKGNIKISDFGLSALPQHLGNDGLLHTTCGSPNYIAPEVLQNKGYDGSLSDIWSCGVILYVMLIGYLPFDDRNIVVLYQKIFKGDTQIPKWLSHSAQNLLRRILEPNPMKRIDMAGIKSHEWFQKDYIPVLPYDDDDEDVQFGARLPAKEQINDEPGDKNSHQINAFQLIGMASSLDLSGFFEDEEVSQRRIRFTSTHPPKDAFDKIESSATELGFQVQRGHSKLKLMRNCKGSKNPESFMVSAEVFELGPSVNVVELRKSNGDPALYRQLCERISSDMGARNTEQIFATASLEDDLQNSNAGTPLFAL

SEQ ID NO: 40913 - protein, 294 aa, Citrobacter freundii
IVFRAAQERSDIEIVAINDLLDADYMAYMLKYDSTHGRFNGTVEVKDGHLIVNGKKIRVTAERDPANLKWDEVGVDVVAEATGLFLTDETARKHITAGAKKVVLTGPSKDNTPMFVKGANFDKYEGQDIVSNASCTTNCLAPLAKVINDNFGIIEGLMTTVHATTATQKTVDGPSHKDWRGGRGASQNIIPSSTGAAKAVGKVLPELNGKLTGMAFRVPTPNVSVVDLTVRLEKAASYEEIKKAIKAASEGPMKGVLGYTEDDVVSTDFNGEVCTSVFDAKAGIALNDNFVKLV

SEQ ID NO: 40914 - protein, 540 aa, Yarrowia lipolytica CLIB122
MYLGLDLSTQQLKGIILDTKTLDTVTQVHVDFEDDLPQFNTEKGVFHSSTVAGEINAPVAMWGAAVDLLIERLSKEIDLSTIKFVSGSCQQHGSVYLNSSYKEGLGSLDKHKDLSTGVSSLLALEVSPNWQDASTEKECAQFEAAVGGPEQLAEITGSRAHTRFTGPQILKVKERNPKVFKATSRVQLISNFLASLFAGKACPFDLADACGMNLWDIQNGQWCKKLTDLITDDTHSVESLLGDVETDPKALLGKISPYFVSKGFSPSCQVAQFTGDNPGTMLALPLQANDVIVSLGTSTTALVVTNKYMPDPGYHVFNHPMEGYMGMLCYCNGGLAREKIRDELGGWDEFNEAAETTNTVSADDVHVGIYFPLREILPRAGPFERRFIYNRQSEQLTEMASPEDSLATEHKPQAQNLKDTWPPQMDATAIIQSQALSIKMRLQRMMHGDIGKVYFVGGASVNTAICSVMSAILKPTKGAWRCGLEMANACAIGSAHHAWLCDPNKTGQVQVHEEEVKYKNVDTDVLLKAFKLAENACLEK

SEQ ID NO: 40915 - protein, 372 aa, Synechocystis sp. PCC 6803
MSTKSKIFLVLLVFCPLSFAAHWLGWGETTVFILAGLAIVPLAAFMGTATEEIAVVIGPNAGGLLNATFGNATELILAYIALKEGLIEVVKATLTGSIIGNLLLVMGFAVFLGGLRYKEQNFQPLAARLNASTMNLGVVAILLPTALQYTSTGVEETVLQNLSVAVAVVLIGVYLLSLVFSMGTHAYLYDVGVAENMEMPELGEDVSEPEPPTEEEKPNLWLWTGVLLVVTLGVAVESELLVGSLEVATESLGLTALFTGVIVLPIIGNAAEHATAVTVAMKDKMDLSMSVVMGSSLQIAFFVAPVLVIVGWAIGQPMDLNFNPFELVAVLVAVLIVNSISSDGTSNWLEGILLLATYAIVALAFFFHPTLV

SEQ ID NO: 40916 - protein, 134 aa, Medicago sativa
VHFRNVDEKSWAPLAEQVSLVLNDYPKLKLTQGRKVLEIRPTIKWDKGRALEFLLESLGFANSKNVFPIYIGDDRTDEDAFKVLRNRSQGCGILVSKISKETNASYTLQDPSEVGQFLRHLVDWKRTSSRSHKL

SEQ ID NO: 40917 - protein, 414 aa, Xanthomonas oryzae pv. oryzae
MTIKTLALQCRDAAQVVSQLSSQAKCALLQAMAAALEADAGTILAANARDLEAARAKGTASAMLDRLALDDKRLAGIAAALREVALLPDPVGRITREDVRPNGIRVQKVRVPLGVIAMIYEARPNVTADAAALCIKAGNGVILRGGSEAIHSNTAIARALQRALREANVPEAALTLVEDLRRETMLELLQLNDIVDLAIPRGGEGLIRFVAEHARVPVIKHYKGVCHLFVDASAEMELALRLLIDGKATRPSACNSLETLLVHADIAERFLPLAAQALRERKVELRGDAATRAVLPEIAPASDDDYAAEFLDLILAMRVVADLDTALAHIRQYGSDHTEVIATQDPDNAERFVQSLRSAVVMVNASSRFSDGGELGLGAEIGISTTRLHSYGPMGLEALTVERFVVRGEGQVRH

SEQ ID NO: 40918 - protein, 133 aa, Brassica napus
MESEGKIVFTEEQEALVLKSWSVMKKNSADLGLKLFIKIFEIAPTAKKLFSFLRDSPIPAEQNPKLKPHAMSVFVMCCESAAQLRKTGKVTVKETTLKRLGASHSKYGVVDEHFEVTKYALLETIKEAVPEMW

SEQ ID NO: 40919 - protein, 190 aa, Medicago sativa
YSRGGSGGRSLSGSGGNKREFSDGEGYDQRNSSRVSDEDDNCGVGNGNTRKKLRLSKDQSAFLEESFKEHHTLNPKQKLALAKQLNLRPRQVEVWFQNRRARTKLKQTEVDCEYLKRCCETLTEENRRLHKELQELRALKTSNPFNMQLPATTLTMCPSCERVATNSTATSSVTNTSATINGNNNNKINQ

SEQ ID NO: 40920 - protein, 409 aa, Porphyromonas gingivalis W83
MVLSEKAKYYVDLEHRYGAHNYHPLEVVLSRGQGAYVWDVDGKRYFDFLSAYSAVNQGHCHPKIIAALKEQAEKICLTSRAFYNDCLGEYEEFMHHYFGYDKMLPMNSGAEAVETALKLSRRWGYRVKGIPEEKAVIIVCDGNFHGRTISIVSMSSDPDSYTDYGPYTPGFVNIPYNNIEALEKALEEHKDHVAAFVVEPIQGEAGVFVPDDGYIRRAAELCRKYHALFVADEVQTGIARTGRMLCCDHDDVRPDIVVLGKAISGGVLPVSCVLADDEVMLTIKPGEHGSTFGGFPLACKVAMAALTVVKEERLPERAEELGQYFRGELLKIKSPLLKLVRGRGMLNAIVIEPHNRHEAWDVCEAMAERGLLAKPTHRHIIRLAPPLCITREELAQAVEIIKESIKVLE

SEQ ID NO: 40921 - protein, 302 aa, GIBBERELLA ZEAE PH-1
MSDKAQDRINAIGNQLLPPINKVAPGSSKLRVEGKVVIITGTNSPLGIGRATAHQYAESGARALYLCDFDDTHLETHKKEINAAFPSVEIHTRCFDAADEDKVKEVVDDAMKRYGRLDVFFANAGIVGRTTLFSDFSKDEFMSILNTNTSSVFLAAKYGAPAMMETSPDKPHSGGSIIGTASVAGIRSNAGSTPYSASKAAVVSLAQTISYQLAGTGVRVNAICPGLIETGMTAPVYEAARARGSEKKIGQLNPMKRGGRADEIARVALFLGSDESSYVNGQAWAVDGGLSAGHPFVPGRLG

SEQ ID NO: 40922 - protein, 216 aa, Glycine max
MSKLQSDALREAISGIMADSKEKNRKFVETIELQIGLKNYDPQKDKRFSGSVKLPHIPRPKMKICMLGDAQHVEEAEKIGLDWMDVEALKKLNKNKKLVKKLAKKYHAFLASEAVIKQIPRLLGPGLNKAGKFPTLVTHQETLESKVNESKAMVKFQLKKVLCMGVAVGNVSMEEKQIFQNVQLSVNFLVSLLKKNWQNVRCLYLKSTMGKCYRVF

SEQ ID NO: 40923 - protein, 381 aa, Thermosynechococcus elongatus BP-1
MKAMILAAGKGTRVRPITYTIPKPMIPILQKPVMEFLVELLRQHGFNQIMVNVSHLAHEIESYFQDGQRFGVEIAYSFEGYIKDGELVGKALGSAGGIKRIQDFNPFFDDTFVVLCGDALIDLDLTAAVAWHRQKGAIATVVMKTVPREDVSSYGVVVTDKSDRIVAFQEKPSVEEALSNHINTGIYIFEPEVIDYIPSNQEYDIGSQLFPKLVEMGAPFYGLAMDFEWIDIGKVPDYWQAVRGVLNGTIKNVSIPGHEQFPGIYTGLNVAVNWDKVTIQGPVYIGGMTKIEDGATIIGPTMIGPNCHICSGAVVDNCVIFEYSRLGSDVRLVDKLVFGRYCVDKTGTTIDLKAAALDWLITDSRQTDIQLSPLELKEMMS

SEQ ID NO: 40924 - protein, 215 aa, Clostridium acetobutylicum ATCC 824
MKLFIDTANVEEIKEVNDMGVICGVTTNPSLVAKEGRDFNEVIREITSIVDGPISGEVIALDAEGMIKEGREIAKIHKNMVVKIPMTEEGLKAVKVLSSEGIKTNVTLIFSAGQALLAARAGATFVSPFLGRLDDIGADSIGLIESIVNIFDIHDIRTEIIAASIRSPKHVIDSAEAGAHIGTVPYKVLKQLIKHPLTDIGIERFMKDWKEAFNK

SEQ ID NO: 40925 - protein, 663 aa, Clostridium acetobutylicum ATCC 824
MNIDNLAINTIRILSAEAIQKAKSGHPGLPMGCAPMAYTLWSRHLKHNPNNSKWKDRDRFVLSAGHGSMLLYSLLNIFGYDVSVEEIKNFRQFKSKTPGHPEYRWTDGVETTTGPLGQGICNAVGMAIAETYLANKFNKESYNIVDHYTYALVGDGCLMEGISGEASSLAGTLGLGKLIVLYDSNNISIEGSTDIAFRENVALRYEAYGWQVIKVDDGTNLEKIDLAIKEAKVEKNKPTIIIVKNVIGYGCPSKQGKAAAHGEPLGEENLKLTKENLNWNYEPFTVPEEVRAYTKEFKVRAQRQEDKWNSMFEEYKKEYPKLYKEWEVWFSEKTPMKLLDNGEFWKFDKNMATRQSSGVLINRLAKLIPNLIGGSADLAPSNKTHMDDRGDFSAENRSGSNMHFGVREHAMAAIANGMYLHGGLKVFVATFFVFSDYMKGAMRLSSIMKLPIVYVLTHDSIGVGEDGPTHEPIEQLAALRSMPNMTVFRPADSNETAAAWYSALNTKNGPTALVLTRQALPLYDSSGKNALKGGYILKDSKNKENPDVILMASGSEVELILNAAKELQNENIDARVVSMPSFEVFEEQSEDYKNSILPRNIRARVAVEAASPFGWHKYVGLDGEVIAMESFGASGKSDILFKEFGFTVENVVEKVKNVLKNLK

SEQ ID NO: 40926 - protein, 267 aa, Triticum aestivum
  misc_feature (161)..(161): Xaa can be any naturally occurring amino acid
  misc_feature (186)..(188): Xaa can be any naturally occurring amino acid
  misc_feature (196)..(196): Xaa can be any naturally occurring amino acid
  misc_feature (208)..(208): Xaa can be any naturally occurring amino acid
  unsure (1)..(267): unsure at all Xaa locations
LYRTSLYKKAGWYRSGIPGISSTHASGKCILIILQLFFAGIIVICLDELLQKGYGLGSGISLFIATNICENIIWKAFSPTTINSGRGAEFEGAVIALFHLLITRSDKVRALREAFYRQNLPNVTNLLATVLVFLIVIYFQGFRVVLPVRSKNARGQQGSYXIKLVLIRNASLTCRFNPFFFPFLDXXXNFLFSLLXTRKTSRFWKESXYSGHLSLWGACLHVQRPPTGSIVGILAGPFHALFYVVAMLPAGFPSFLKTWMDLLVPQP

SEQ ID NO: 40927 - protein, 418 aa, Thermosynechococcus elongatus BP-1
MADDSSVTEGNGCRQYTDNTHLGRLYEDNGMTQANVLDVYDPATAPLEDEVALLSDYGLDAVEIEEEESEDFEEVSDDLDGKPTKGRASRRRTQVKKKHYTEDSIRLYLQEIGRIRLLRADEEIELARKIADLLEMERVRDRLCQELGCTAEELERNPEPWAKELGMTVPAFRHRLFVGRKAKEKMVQSNLRLVVSIAKKYMNRGLSFQDLIQEGSLGLIRAAEKFDHEKGYKFSTYATWWIRQAITRAIADQSRTIRLPVHLYETISRIKKTTKLLSQEMGRKPTEEEIADRMEMTIEKLRFIAKSAQLPISLETPIGKEEDSRLGDFIESDGETPEDQVSKHLLREDLETVLCTLSPRERDVLKLRYGLDDGRMKTLEEIGQLFNVTRERIRQIEAKALRKLRHPNRNSVLKEYIR

SEQ ID NO: 40928 - protein, 189 aa, Arabidopsis thaliana
MAYQGFASGDPARDAKSIRIFLEDGHHIGISQSYAKNMGLYGQRVGCLSVLCEDPKQAVAVKSQLQQLARPMYSNPPLHGAQLVSTILEDPELKSLWLKEVKVMADRIIGMRTTLRESLEKLGSPLSWEHVTKQIGMFCYSGLTPEQVDRLTSEYHIYMTRNGRISMAGVTTGNVGYLANAIHEVTKSS

SEQ ID NO: 40929 - protein, 656 aa, Arabidopsis thaliana
MTKMSNLPNDLAEEVLSRVSLTSLRNVRLTCKDWNTLSKGESFAKNHLGYQAIVAAKEKEFMMVLMMDFRVYLIRVNVHNDIESCIKPEGELISLGDEVDVSQVFHCDGLLLCITEDNEDNAKVVLWNPYWGQTRWIESTNNFHKLDMYTYALGYKKSSKSSRSYKILRFIDFSPTCSEFKIYNINSDSWKVLDVSPDWKIDSYIRGVSLKGNTYWIARERHGYGHTFLVCFDFTRERFRSRLPLPSQPCVLDTVSLSSVREEQLAVLFQCSSTLEMQIWVTTKIEPNAVLWNSKVFLAVDMHSLKFQFQVRASSFFIDEEKRVVVVFDKEKRYLASSRNKAYIVGVDGTWEQVDLGMSLMMVMISLHFSTPPLAFLKSDSNSRFLKNPNPNFIQFTPKSQLLFPQRLNFNTGTNLNRRTLSCYGIKDSSETTKSAPSLDSGDGGGGDGGDDDKGEVEEKNRLFPEWLDFTSDDAQTVFVAIAVSLAFRYFIAEPRYIPSLSMYPTFDVGDRLVAEKITMSKVSYYFRKPCANDIVIFKSPPVLQEVGYTDADVFIKRIVAKEGDLVEVHNGKLMVNGVARNEKFILEPPGYEMTPIRVPENSVFVMGDNRNNSYDSHVWGPLPLKNIIGRSVFRYWPPNRVSGTVLEGGCAVDKQ

SEQ ID NO: 40930 - protein, 447 aa, Bacteroides thetaiotaomicron VPI-5482
MNFDIAIIGGGPAGYTAAERAGANGLRAVLFEKKAIGGVCLNEGCIPTKTLLYSAKILDSIKSASKYGISAESPSFDLTKIMSRKEKTVKMLTGGVKMTVNSYGVTIVEKEAFIEGEENGLIRIICDGERYEVKYLLVCTGSDTVIPPIPGLSEVSYWTSKEALEIKELPETLVVIGGGVIGMEFASFFNSMGVKVHVVEMMPEILGVMDKETSSMLRMEYAKRGVTFYLNTKVIEVKPDGVVIEKDGKASTIKTEKILLSVGRKANITNVGLDKLNIELHRNGVKVDEYLQTSHPGVYACGDITGYSLLAHTAIREAEVAINHILGVEDRMNYNSVPGVVYTNPEVAGVGKTEEELTKQGIPYRVTKLPMAYSGRFVAENEQVNGICKLILDEADHIIGCHMLGNPASELIVIAGIAIQKGYTVEEFQKNVFPHPTVGEIYHEVLS

SEQ ID NO: 40931 - protein, 678 aa, Bacteroides thetaiotaomicron VPI-5482
MKKKYDIKTTDVETLKKWYHLMTLGRALDEKAPSYQLQSLGWSYHAPYAGHDGIQLAVGQVFTLGEDFLFPYYRDMLTVLSAGMTAEEIILNGISKATDPGSGGRHMSNHFAKPEWHIENISSATGTHDLHAAGVARAMVYYGHKGVAITSHGESATSEGFVYEAINGASLERLPVIFVIQDNGYGISVPKSEQTANRKVAENFSGFKNLKIIYCNGKDVFDSMNAMTEAREYAISTRNPVIVQANCVRIGSHSNSDKHTLYRDENELEYVKEADPLMKFRRMLLRYKRLTEEELLQIEAESKKELSAANRKALAAPEPDPKSIYDFVMPEPYQPQKYKEGTHQEEGEKTFLVNAINETLKAEFRHNPDTFIWGQDVANREKGGVFNVTKGMQQEFGEARVFSAPIAEDYIVGTANGMSRFDPKIHVVIEGAEFADYFWPAVEQYVECTHEYWRSNGKFAPNITLRLASGGYIGGGLYHSQNIEGALTTLPGARIVCPSFADDAAGLLRTSMRSKGFTLFLEPKALYNSVEAAAVVPEDFEVPFGKARIRREGTDLSIITYGNTTHFCLHVAEQLEKESGWKVEVIDIRSLIPLDKEAIFESVKKTSKALVVHEDKVFSGFGAELAAMIGTDMFRYLDGPVQRVGSTFTPVGFNPILEKEILPDEAKIYEAAKKLLEY

SEQ ID NO: 40932 - protein, 644 aa, Antirrhinum majus
MATGIQNQKIVPENLRKQLAIAVRSIQWSYAIFWSNSVAQPGVLEWGDGFYNGDIKTRKTVQSVELNQDQLGLQRSDQLRELYESLSLGETNTQAKRPTAALSPEDLTDAEWFFLVCMSFIFNIGQGLPGRTLARNQAVWLCNAHRADTKVFSRSLLAKSASIQTVVCFPYSEGVVELGATELVPEDLNLIQHIKTSFLDSPATVPKIPNYVSNSITNNNDLICEALEHANIPENDLDQLLNCPDTNICSPDNSLDDFADNLLIDESNLAEGINGEVPQTQSWPFMDDAISNCLNSSMNSSDCISQTHENLESFAPLSDGKGPPETNNCMHSTQKCNQQIENTGVQGDEVHYQGVLSNLLKSSHQLVLGPYFRNGNRESSFVSWNKDGSSGTHVPRSGTSQRFLKKVLFEVARMHENSRLDAGKQKGNSDCLAKPTADEIDRNHVLSERKRREKINERFMILASLVPSGGKVDKVSILDHTIDYLRGLERKVDELESNKMVKGRGRESTTKTKLHDAIERTSDNYGATRTSNVKKPLTNKRKASDTDKIGAVNSRGRLKDSLTDNITVNITNKDVLIVVTCSSKEFVLLEVMEAVRRLSLDSETVQSSNRDGMISITIKAKCKGLKVASASVIKQALQKVTMKS

SEQ ID NO: 40933 - protein, 428 aa, Zymomonas mobilis
MTGNKIDQATPTEMMAGMAKKARLASQILAQAPTAQKAEALVLTADAIRRHSADILAANAQDVATAENNQSSSAMVDRLRLTEARLENMASALEVIAHLEDPVGQIIDKRTRPNGLELTRIRVPIGVIGIIYESRPNVTIDAAALTLMSGNAAILRGGSEAIHSNKALYQTMREGLAKAGLPEEAIQLVPTTDRALVGAMLTASGLIDLVIPRGGKSLVARVQQDARVPVLAHLDGINHSYVHKEADPEKVEKVVVNAKMRRTGICGATESLLIDRGYPVEKVKSLLQALHNAGCEIRGTAEIQKIDPEAKAVSEEDWGTEYLDAVLSVRFVDDMDDALSHIARYSSGHTDAILTENREVAEKFLASVDSAIVMWNASTQFADGGEFGLGAEIGIATGRIHARGPVALEGLTSYKWQVRGTGQIRPVA

SEQ ID NO: 40934 - protein, 294 aa, Enterobacter aerogenes
IVFRAAQKRSDIEIVGINDLLDAEYMAYMLKYDSTHGRFDGTVEVKDGHLVVNGKTIRVTAEKDPANLKWNEIGVDVVAEATGIFLTDETARKHITAGAKKVVLTGPSKDNTPMFVRGANFETYAGQDIVSNRSCTTNCLAPLAKVINDNFGIIEGLMTTVHATTATQKTVDGPSHKDWRGGRGAAQNIIPSSTGAAKAVGKVLPELNGKLTGMAFRVPTPNVSVVDLTVRLEKAASYEEIKKAIKAASEGPMKGVLGYTEDDVVSTDFNGEVCTSVFDAKAGIALNDNFVKLV

SEQ ID NO: 40935 - protein, 273 aa, Streptococcus pyogenes serotype M6
MMKRQFEDVTRIVIKIGTSSLVLPTGKINLEKIDQLAFVISSLMNKGKEVILVSSGAMGFGLDILKMEKRPTNLAKQQAVSSVGQVAMMSLYSQIFAHYQTNVSQILLTRDVVVFPESLANVTNAFESLISLGIVPIVNENDAVSVDEMDHATKFGDNDRLSAVVAGITKADLLIMLSDIDGLFDKNPTIYEDAQLRSHVAVITQEIIASAGGAGSKFGTGGMLSKVQSAQMVFENKGQMVLMNGANPRDVLRVLEGQPLGTWFKQIEEVTHD

SEQ ID NO: 40936 - protein, 294 aa, Escherichia blattae
IVFRAAQERSDIEIVAINDLLDAEYMAYMLKYDSTHGRFNGTVEVKDGHLIVNGKKIRVTAERDPANLKWNEAGVEVVAEATGLFLTDETARKHITAGAKKVVMTGPSKDSTPMFVRGANFDTYAGQDIVSNASCTTNCLAPLAKVVNDNFGIVEALMTTVHATTATQKTVDGPSHKDWRGGRGASQNIIPSSTGAAKAVGKVLPELNGKLTGMAFRVPTPNVSVVDLTVRLAKPATYEEIKKAMKAASEGAMKGVLGYTEDDVVSTDFNGETCTSVFDAKAGIALNDNFVKLV

SEQ ID NO: 40937 - protein, 294 aa, Escherichia fergusonii
IVFRAAQKRSDIEIVAINDLLDADYMAYMLKYDSTHGRFDGTVEVKDGHLIVNGKKIRVTAERDPANLKWDEVGVDVVAEATGIFLTDETARKHITAGAKKVVLTGPSKDNTPMFVKGANFDKYAGQDIVSNASCTTNCLAPLAKVINDNFGIIEGLMTTVHATTATQKTVDGPSHKDWRGGRGASQNIIPSSTGAAKAVGKVLPELNGKLTGMAFRVPTPNVSVVDLTVRLEKPATYEQIKAAVKAAAEGEMKGVLGYTEDDVVSTDFNGEVCTSVFDAKAGIALNDNFVKLV

SEQ ID NO: 40938 - protein, 409 aa, Synechococcus sp. CC9605
MGWGSVSPLGCDAESTWESVLAERSGISSLTADWSKDLPVRISGCVPVAATQSLEPLLQRRSDRCAQLGLLAARKAWAMASAAIGSIDPARVAVVLGTGIGGLHTMHEQHNQLTHGGPARVNPLTVPMLIPDAASGQVAIDLGLHGGAHTPVSACASGAEAMMLAQMLLNDKRADLVLAGGTEAPVNRLGLVGFSAMRALSCRNDAPEQASRPYGKDRDGFVLSEGAGVLAMMREEDTPRGSALGWQLACGSSSDGHHIVAPEPQGIQASRAIEDALNRAGIEPRDLCAVQAHATGTVLGDLAEARSLRRSLGHAADHLPVFAPKGQLGHLLGAAGAVEAIIGIQALHKGILPRTINSDPLDPEININVTTEKPVKLKNTSKEQFMLKNSFGFGGHNISIVLSSSSKNL

SEQ ID NO: 40939 - protein, 219 aa, Triticum aestivum
MNLWTDDMGSMMGAFMASADMPAFPWGAAATPPPPAAVPQQPAFNQDTLQQRLQAIIEGSRETWTYAIFWQSSTDAGASLLGWGDGYYKGCDDADKRRQQPTPASAAEQEHRKRVLRELNSLIAGGGAAAPDEAVEEEVTDTEWFFLVSMTQSFPNGMGLPGQALAARPAAWIATGLASAPCERARQAYTFRLRTMVCIPLGTGVLELGATEVIFQTND

SEQ ID NO: 40940 - protein, 294 aa, Escherichia hermannii
IVFRAAQTRSDIEIVAINDLLDAEYMAYMLKYDSTHGRFDGTVEVKDGHLVVNGKKIRVTAEKDPANLKWNEVGVDVVAEATGIFLTDETARKHITAGAKKVVLTGPSKDDTPMFVKGANFDKYNGQDIVSNASCTTNCLAPLAKVINDNFGIIEGLMTTVHATTATQKTVDGPSHKDWRGGRGAAQNIIPSSTGAAKAVGKVLPELNGKLTGMAFRVPTPNVSVVDLTVRLEKAASYEDIKKAIKAAAEGEMKGVLGYTEDDVVSTDFNGEVCTSVFDAKAGIALNDNFVKLV

SEQ ID NO: 40941 - protein, 486 aa, Oryza sativa
MSYNHSPSITAETINQKVRIFTYEPCGEIVRHARRLEKEIYENPGSLPFQEIIYCNLGNPQALGQRPINFFREVLSLCDNPSLIDRDEARALFSPCALKRARKIIESLPGRDSGSYTSSQGVRGLREAVADGIAARDGFPSKPDNIFLTDGASSAINMMMQILIRSHEDGILCPLPEYPLYSASIILHGGTMVPYNLTEDSIWGLEIFEVKRCLEDARASGLTIRAMVVINPGNPTGQVLSITNQEEIVEFCRKEGLVILADEVYQENVYTENKRFNSFKKVARSLGYDHHDLSIVSFHSVSMGYYGECGRRGGYMEICGFGDDVIDEMYKLASLTICPNIAGQILISLVMDPPKLGDEAFEIFMVEKEETYSSLLKRAKALQKAFNGLEGVSCNKFEGAMYLFPRLRLPQAAIKAAQLEGVSPDVFYAHRLLDATGIAVVPGSGFHPVSGTSHIRCTILPGEETITAMVPSLQAFHEAFMDEFRG

SEQ ID NO: 40942 - protein, 265 aa, Vitis vinifera
MKSLGVRKGAWTQEEDVLLRKCIEKYGEGKWHLVPLRAGLNRCLKSCRLRWLNYLKPDIKRGEFALDEVDLMIRLHNLLGNRWSLIAGRLPGRTANDVKNYWHGHHLKKKVQFQEEGRKKPQTHSKTKAIKPHPHKFSKALPRFELKTTAVDTFDTQVSTSSKPSSTSPQPNDDIIWWESLLAEHAQMDQETDFSASGEMLIASLWTEETATQKKGTHSKTKAIKPHPHKFSKALPRFELKTTAVDTFDTQVSTSSKLIHVTTTE

SEQ ID NO: 40943 - protein, 303 aa, Klebsiella pneumoniae
INGFGRIGRIVFRAAQKRSDIEIVAINDLLDAEYMAYMLKYDSTHGRFDGTVEVKDGHLVVNGKKIRVTAERDPANLKWDEVGVDVVAEATGIFLTDETARKHITAGAKKVVLTGPSKDNTPMFVRGANFDAYAGQDIVSNASCTTNCLAPLAKVINDNFGIVEGLMTTVHATTATQKTVDGPSHKDWRGGRGAAQNIIPSSTGAAKAVGKVLPELNGKLTGMAFRVPTPNVSVVDLTVRLEKAASYEEIKKAIKAASEGAMKGVLGYTEDDVVSTDFNGEVCTSVFDAKAGIALNDNFVKLV

SEQ ID NO: 40944 - protein, 158 aa, Vitis vinifera
MESLGVRKGAWTQEEDVLLRKCIEKYGEGKWHLVPLRAGLNRCRKSCRLRWLNYLKPDIKRGEFALDEVDLMIRLHNLLGNRWSLIAGRLPGRTANDVKNYWHGHHLKKKVQFQEEGRDKPQTHSKTKAIKSRKPLDRRNCNTDKGTHGWYGRTNPGR

SEQ ID NO: 40945 - protein, 499 aa, Neisseria meningitidis Z2491
MFKKYQYLALAALCAASLAGCDKAGSFFGADKKEASFVERIKHTKDDGSVSMLLPDFVQLVQSEGPAVVNIQAAPAPRTQNGSSNAETDSDPLADSDPFYEFFKRLVPNMPEIPQEEADDGGLNFGSGFIISKDGYILTNTHVVTGMGSIKVLLNDKREYTAKLIGSDVQSDVALLKIDATEELPVVKIGNPKDLKPGEWVAAIGAPFGFDNSVTAGIVSAKGRSLPNESYTPFIQTDVAINPGNSGGPLFNLKGQVVGINSQIYSRSGGFMGISFAIPIDVAMNVAEQLKNTGKVQRGQLGVIIQEVSYGLAQSFGLDKAGGALIAKILPGSPAERAGLRAGDIVLSLDGGEIRSSGDLPVMVGAITPGKEVSLGVWRKGEEITIKVKLGNAAEHIGASSKTDEAPYTEQQSGTFSVESAGITLQTHTDSSGGHLVVVRVSDAAERAGLRRGDEILAVGQVPVNDEAGFRKAMDKAGKNVPLLIMRRGNTLFIALNLQ

SEQ ID NO: 40946 - protein, 412 aa, Enterococcus faecalis V583
MKRVVITGMGAVTPLGNTVKEFWHNLVDGKLGIGKITKFDSEDTGVALAGEVKEFDPSAVLERKEQKRMDLFSQYGLVAALEAWEMSGLTEATIDPTRLGVIVGSGIGGMTTLQDQVRVMDKKGAKRVTPFFVPMVIANMAAGNISIRLGAKGPSQTIVTACASATNAIGEAFRTIKYGLADMMVTGGTEATVCEIGIAGFAALNALNTTEDATRASIPFDKERKGFVMGEGAGMLVLEELEHAQKRGATIYGEIVGYGSNCDASHMTAPLKDGSGAAAAMEMAIAEAGITPEQIGYINAHGTSTPANDAAETTAIKRVFGERASQIPISSTKSMTGHLLGAAGGIEAIACVQTLQEGKAHPTVGYQVADPDCDLDYVTEGARDITADYTISNSFGFGGHNGVICLKKWEEN

SEQ ID NO: 40947 - protein, 577 aa, GIBBERELLA ZEAE PH-1
MAVEKVTSDAPVVGEKSVVRDVDERAPEAFTATGEEYEQEDFMTRTGLNAKSFTRKHYGLGLVELDRKMKPRHLQMVAIGGSIGAGFFVGSGSALSKGGPATLFIDFFLVGVMVFNVVYAMGELAVMYPISGGFYTYAARFIDPAFGFAMAWNYCLQWAATLPLELTVCAITIQYWAPDSNPGIWIAVFLIAIIILNMFGTMGYAEEEFWAACFKLTSISIFMIIALVLVCGGGPSSGSYSTYQGFKLWEDPGAFKNGFKGFCSVFVTAAFSFAGSELVGLAAAESRNPTESVPKAIKQVFWRICLFYIVALLFVGMLVSCNDENLLSSSSYSNSAASPFVLVGKYSGLKGLDHYMNAVILSSVLSLGIASVYGGSRTLLALAQQGFAPKIFTWVDRAGRPLPSVGFIIAFGCLAFLNLDAAGPVIFDWLLALSGLAMLVCWGSICLAHIRFRAAWKYNGHTLDEIPFKAIGGVYGSWVGLIFVVVILIAQFYVAIVAPVGESGMGTVEDFFMQYLGLPIVLAFWAGGVIWKRTSWISIDKIDIDTGRREHDWDSINAWRAELATFPWWKRLMYTLF

SEQ ID NO: 40948 - protein, 654 aa, Hydrilla verticillata
MFSSYALARTGHLSCNPCTELRPKVSKGGSSCVYQRTFVRCCGNGAPSRRVATASLEARNSVVLKEPEAMEGALNGSAVVDSPSAVSGGVRDTYGEDRATEDQLLTPWTASVASGNSLLRDPRLNKGLAFTEKERDAHYLRGLLPPVFLTQEIQEKKLMTNLRQYQVPLQRYMAMMDLQERNERLFYKLLIDNVEELLPVVYTPTVGEACQKYGSIFRRPQGLYISLREKGKILEVLKNWPERNIEVIVVTDGERILGLGDLGCQGMGIPVGKLALYTALGGVRPSACLPVTIDVGTNNENLLQDEFYIGLRQKRARGKEYAELIEEFMSAVKQNYGERVLVQFEDFANHNAFELLTKYSKSHLVFNDDIQGTASVVLAGLIASLKLVGGTLAEHTFLFFGAGEAGTGIAELIALQMSKETGVPIEETRKKIWLVDTKGLIVSSRKESLQHFKQPWAHDHEPVQDLLDAVKMIKPTVLIGSSGVPNKFTQDVVEAMASFNEKPVIFALSNPTSNSECTAEQAYTWSKGRAIFASGSPFDPVEYEGQTYTSGQANNAYIFPGFGLGLVMSGAIRVHDDMLLAASEALAEQVTEENFEKGLIYPPFTNIRKISANIAAKVAAKAYELGLSGHLPRPENLVEYAESCMYSPVYRSYR

SEQ ID NO: 40949 - protein, 311 aa, Synechocystis sp. PCC 6803
MAEVSLISQTNCPAVLDPPPQVFNDTMEGWNSINGDRMQRLIEGLQKFREGYFSSHRDLFEQLSHGQHPRILFICCSDSRVDPNLITQSEVGDLFVIRNAGNIIPPYGAANGGEGAAMEYALVALEINQIIVCGHSHCGAMKGLLKLNSLQEKLPLVYDWLKHTEATRRLVLDNYSHLEGEDLIEVAVAENILTQLKNLQTYPAIHSRLHRGDLSLHGWIYRIEEGEVLAYDGVLHDFVAPQSRINALEPEDEYALHPNSPLISYDAFKVPGKERPGREKATESPAPQLSPLPGFGHLPREQAERIYRGSR

SEQ ID NO: 40950 - protein, 561 aa, Acinetobacter calcoaceticus
MTTLKITGMTCDSCAAHVKEALEKVPGVQSALVSYPKGTAQLAIEAGTSSDALTTAVAGLGYEATLADAPPTDNRAGLLDKMRGWIGAADKPSGNERPLQVVVIGSGGAAMAAALKAVEQGAHVSLIERGTIGGTCVNVGCVPSKIMIRAAHIAHLRRESPFDGGIAATVPAIDRSKLLAQQQARVEELRHAKYEGILDGNPAITVVHGEARFKDEQSLVVRLNDGGERVVAFDRCLVATGASPAVPPIPGLKESPYWTSTEALVSDTLPERLAVIGSSVVALELAQAFARLGSQVTILARNTLFFRDDPAIGEAVTAAFRAEGIKVLEHTQASQVAHVDGEFVLTTGYGEIRADQLLVATGRAPNTRSLALEAAGVAANAQGAIVIDKGMRTSTPHIYAAGDCTDQPQFVYVAAAAGTRAAINMTGGDAALDLTAMPAVVFTDPQVATVGYSEAEAHHDGIETDSRTLTLDNVPRALANFDTRGFIKLVIEEGSGRLIGVQAVAPEAGELIQTAVLAIRNRMTVQELADQLFPYLTMVEGLKLAAQTFSKDVKQLSCCAG

SEQ ID NO: 40951 - protein, 614 aa, Hydrilla verticillata
MLSHNRLRVLRKAVIPCCVGRRKGFAADRKGSAMERENEAYVDNHQVANGAAFVVDNAAALDQPITPWMSMVASGYTLLRDPHHNNGLAFTEKERDAHYLRGLLPPVSISQELQEKKLMRNLREYKVPLQRYMAMMDLQERNERLFYKLLIDNVEELLPVVYTPTVGEACQKYGSIFRRPRGLYISLREKNKVLEVLKNWPQKNIQVIVVTDGERILGLGDLGCQGMGIPVGKLALYTALGGIRPSACLPVTIDVGTNNENLLNDEFYIGLRRKRATGQEYAELLEEFMSSVKQKYGERILIQFEDFANHNAFDLLSKYRETHLVFNDDIQGTASVVLAGVVAALRLVGGTLAEHTFLFLGAGEAGTGIAELIALQMSKETRIPVEEARKKIWLVDSKGLIVRSRIQSLQHFKKPWAHEHESIKGLLDAVKSIKPTVLIGSSGAGQAFTQEVIETMALFNEKPIILALSNPTSQSECSAEQAYTWSKGRAIFASGSPFDPVEYKGRTFVPGQANNAYIFPGFGLGLVMSGAIRVHDDMLLAASKALAEQVTDENFEKGLIYPPFSNIRKISAHIAANVAAKAYELGLAGNLPRPDNLVKHAEKCMYSPIYRTYR

SEQ ID NO: 40952 - protein, 575 aa, Hydrilla verticillata
MEGNSNACGGVRDPYGEDCATEEQLVTPWTFSVASGYTLLRDPRHNKGLAFTEKERDAHYLRGLLPPVCITQERQEKKIMHNLRNYQVPLQRYMAMMDLQERNQRLFYKLLIDNVEELLPVVYTPTVGEACQKYGCIYRRPQGLYISLKEKGKILEVLKNWPEKNIQVIVVTDGERILGLGDLGTQGMGIPVGKLALYTALGGIRPSSCLPITIDVGTNNETLLNEEFYIGLRQKRATGKEYADLLHEFMISVKQNYGERVLVQFEDFANHNAFELLSKYSKTHLVFNDDIQGTASVVLAGVVAALKLVGGALAEHTFLFLGAGEAGTGIAELIALEISKQIKAPVEETRKKIWLVDSKGLIVSSRKESLQHFKKPWAHEHEPIKHLVDAVKTIKPTVLVGSSGVGRAFTKEVIEAMASFNEKPIILALSNPTSQSECTAEEAYTWTQGRAIFASGSPFDPVEYEGKTFVPGQANNAYIFPGFGLGLIIAGAIRVHDDMLIAASEALANQVSEENFEKGLIYPPFSNIRKISANIAANVAAKAYELGLASHLPRPANLVKYAESCMYSPVYRTYR

SEQ ID NO: 40953 - protein, 535 aa, Brassica oleracea var. alboglabra
SFKDKLFQTNNSTKLEDNSKTSTNVTSNRSSSTNTEEFSSPKKDSKNSPLVIPSKEPIMRRNMDNQAYYVLGHKTPNIRDLYTLSRKLGQGQFGTTYLCTELATGVDYACKSISKRKLISKEDVEDVRREIQIMHHLAGHGNIVTIKGAYEDSLYVHIVMELCAGGELFDRIIQRGHYSERKAAELTKIIVGVVEACHSLGVMHRDLKPENFLLVNKDDDFSLKAIDFGLSVFFKPGQIFTDVVGSPYYVAPEVLLKRYGPEADVWTAGVILYILLSGVPPFWAETQQGIFDAVLKGYIDFDSDPWPVISDSAKDLIRRMLSSKPAERLTAHEVLRHPWICENGVAPDRPLDPAVLSRLKQFSAMNKLKKMALKVIAESLSEEEIAGLREMFQAMDTDNSGAITFDEPKAGLRKYGSTLKDTEIHDLMEAADVDNSGTIDYSEFIAATIHLNKLEREEHLVAAFQYFDKDGSGYITIDELQQACVEHSMTDVFLEDIIKEVDKNNDGQIDYGEFVEMMQKGNAGVGRRTMRNSLN

SEQ ID NO: 40954 - protein, 647 aa, Nocardia farcinica IFM 10152
MCGLLGFLTADAATSEVVDQVYNALHCMRHRGPDERGTWHDDHLVFGFNRLSIIDIEHSHQPLRWGPPENPERYALTFNGEIYNYLELREELAAAHAAEFGDAPMFRTEGDSEAIVAAYHYWGAEAVAKLRGMFGFAIWDTQTRELFLARDPFGIKPLFLATGPGGTAFGSEKKSLLDLLPALRLSDDLDPRALEHYTVLQYVPEPETLHKGIRRLESGTYAVVRPGAAPQVTRYFTPRFPVRPFAPGSAQTRYNEIAAALEDSVAKHMRADVTVGSFLSGGIDSTAVAALAMRHNPNLITFTTGFEREGYSEVDVAAESAAAIGARHIVKVVSPAEFAAAIPEIVWYLDDPVADPALVPLYFVAKEARKHVKVVLSGEGADELFGGYTIYREPLSLKPFEYLPRGLRRLAGRLSERIPDGTRGKSLLHRGSLTLEERYYGNARSFNDAQLRAVLREFRPEWTHQDVTAPIYAQSRGWDPVARMQHLDLFTWLRGDILVKADKMTMANSLELRVPFLDTEVRRVAEQLPFDQKITKDTTKYALRQALEGIVPAHVLHRAKLGFPVPLRHWLRGTELYDWAHTQIAESQTDHLLDKAAITAMLVEHRAGRADHSRRLWTLLVFMVWHGIFVEDRIKPDIQEPVYPVTL

SEQ ID NO: 40955 - protein, 460 aa, Cryptococcus neoformans var. grubii
MGKDKLHVNVVVIGHVDSGKSTTTGHLIYKCGGIDKRTIEKFEKEAQELGKSSFKYAWVLDKLKAERERGITIDIALWKFETPKYQVTVIDAPGHRDFIKNMITGTSQADCAILIIATGIGEFEAGISKDGQTREHALLAFTLGVRQLIVACNKMDTCKWSEDRFNEIVKETNGFIKKVGYNPKAVPFVPISGWHGDNMLEETTNMPWYKGWTKETKSGVSKGKTLLEAIDAIEPPTRPTDKPLRLPLQDVYKIGGIGTVPVGRVETGVIKAGMVVKFAPTNVTTEVKSVEMHHEQIPEGLPGDNVGFNVKNVSIKDIRRGNVCGDSKNDPPMEAASFNAQVIVLNHPGQIGAGYTPVLDCHTAHIACKFSELIEKIDRRTGKVMEAAPKFVKSGDAAIVKLVSQKPLCVETYADYPPLGRFAVRDMRQTVAVGVIKSVEKSDGKSGKVTKAAEKAAKKK

SEQ ID NO: 40956 - protein, 495 aa, Arabidopsis thaliana
MAFEKNNEPFPLHFVLFPFMAQGHMIPMVDIARLLAQRGVLITIVTTPHNAARFKNVLNRTIESGLPINLVQVKFPYQEAGLQEGQENMDLLTTMEQITSFFKAVNLLKEPVQNLIEEMSPRPSCLISDMCLSYTSEIAKKFKIPKILFHGMGCFCLLCVNVLRKNREILDNLKSDKEYFIVPYFPDRVEFTRPQVPVETYVPAGWKEILEDMVEADKTSYGVIVNSFQELEPAYAKDFKEARSGKAWTIGPVSLCNKVGVDKAERGNKSDIDQDECLEWLDSKEPGSVLYVCLGSICNLPLSQLLELGLGLEESQRPFIWVIRGWEKYKELVEWFSESGFEDRIQDRGLLIKGWSPQMLILSHPSVGGFLTHCGWNSTLEGITAGLPMLTWPLFADQFCNEKLVVQILKVGVSAEVKEVMKWGEEEKIGVLVDKEGVKKAVEELMGESDDAKERRRRAKELGESAHKAVEEGGSSHSNITFLLQDIMQLAQSNN

SEQ ID NO: 40957 - protein, 244 aa, Thermotoga maritima
  misc_feature (1)..(1): Xaa can be any naturally occurring amino acid
  misc_feature (23)..(23): Xaa can be any naturally occurring amino acid
  misc_feature (47)..(47): Xaa can be any naturally occurring amino acid
  misc_feature (155)..(155): Xaa can be any naturally occurring amino acid
  unsure (1)..(244): unsure at all Xaa locations
XGSSHHHHHHSSGRENLYFQGHXEKTVIYLLEDGYVDFVVEKIRTKXEKLLEEKDKIFVVLAGGRTPLPVYEKLAEQKFPWNRIHFFLSDERYVPLDSDQSNFRNINEVLFSRAKIPSGNVHYVDTSLPIEKACEKYEREIRSATDQFDLAILGXGPDGHVASIFDLETGNKDNLVTFTDPSGDPKVPRVTLTFRALNTSLYVLFLIRGKEKINRLTEILKDTPLPAYFVRGKEKTVWFVGKGS

SEQ ID NO: 40958 - protein, 447 aa, Clostridium acetobutylicum ATCC 824
MKDIERDDLKYIWHPCTQMKDYEKMPPIVIDKGEGCYLYDVNGNSYLDCISSWWTNIFGHSNKRINKAIEKQLNEIEHVIFAHFSNKPAVEFSKSLIQIAPEGLDKIFFSDNGSSAVEIALKMSFQYYQQTGKVKKTKFAALTNAYHGETIGALSVGDLDLYSKIYKPLLIDTLRIQGPDCYRCKYNKERHSCEAECFEEMEKSLKKHNSELCAIIIEPMIQGAAGMKMYSPKYLKKLRYACDYYDISVIFDEIAVGFGRTGKMFACENADISPDIMCLSKGISAGYMPMSVVLTTSKIYNAFYDDYVNLKAFIHSHTYAGNALACAAAIESLKIFKEESIIEKNIGKSKLIEKLTKNRARNNKFIGDIRSLGMVTAIELVKDKDTKESFDWKSRVGYEIYKIALKKGLLLRPIGDVLYFMPPYSIGEKDIEFMVEKCFESIEQYLE

SEQ ID NO: 40959 - protein, 497 aa, Botrytis sp. BT2
MDSFIFLRSIGTKFGQLESSPAILSLTLAPILAIILLLLFRYNHRSSVKLPPGKLGLPLIGETIQLLRTLRSETPQKFFDDRLKKFGPVYMTSLIGHPTVVLCGPAGNKLVLSNEDKLVEMEGPKSFMKLIGEDSIVAKRGEDHRILRTALARFLGAQALQNYLGRMSSEIGHHFNEKWKGKDEVKVLPLVRGLIFSIASTLFFDVNDGHQQKQLHHLLETILVGSSSVPLDFPGTRYRKGLQARLKLDEILSSLIKRRRRDLRSGIASDDQDLLSVLLTFRDEKGNSLTDQGILDNFSAMFHASYDTTVAPMALIFKLLYSNPEYHEKVFQEQLEIIGNKKEGEEISWKDLKSMKYTWQAVQESLRMYPPVFGIFRKAITDIHYDGYTIPKGWRVLCSPYTTHLREEYFPEPEEFRPSRFEDEGGHVTPYTYVPFGGGLRTCPGWEFSKIEILLFVHHFVKNFSSYIPVDPNEKVLSDPLPPLPANGFSIKLFPRS

SEQ ID NO: 40960 - protein, 548 aa, Nocardioides sp. JS614
MVAGLEQYPSYAAGLARGRERVRLAHGQVRHGRNARNMRARARSCQPDIRCRANPTAAAACGGSTRVKNVASSGSADLVIVANRLPVDRVPLGDGTAEWRRSPGGLVTAIEPVMRANDGSWIGWPGGTESDLEPFEDEGLDLVPITLTQQEVEEFYEGFANGTLWPLYHDVAAKPEFHREWWDAYVVVNRRFAEQAAAAASEGATVWVHDYQLQLVPQMLRELRPDLRIGFYLHIPFPPTELFQQLPWRRQLLEGLLGADLVGFQLPGAAQNFVRLVRQRVGHKTHRDLVYLPDGRTVRAAAFPISIDAKGFEDLARSEEVEKRAAEIRDALGNPSRIFLGVDRLDYTKGIYARLRAYSELLAQGDLDVEDAVFVQVATPSREQVEQYRILRDDIDRLVGRINGDLGRIGRPAISYMHASYPREEMAALYRAADIMVVTPYRDGMNLVAKEYVACRFDNDGALVLSEFAGAADELRQAWLVNPYDINGMKSALLEAYRADEKERTRRMKAMRKTVSQNDVAAWADSFLAELTAVRPSHGKTVRPARRS

SEQ ID NO: 40961 - protein, 483 aa, Mesorhizobium sp. BNC1
MSGRKYPNPSLFINGRSVTGRGAKEEMVIDPSNEEVLGSYRSAAPEDLQELLDSAAAGFEKWRRTSAYERCEILHKVAAALRENAQEIGSLLTLETGKILSESITEVRGAADHFDWSGEEGRRLYGYTVPARRAESRLRVELEPLGIVFALIPWNFPLGTSARKVAPALAAGCSVILRPPEEAPATVEAFVRCCQEAGLPPGVLNMVLGSPKDVVEPLMASFSVRAVTFTGSTRVGKILIQQAADTVKHLVLELGGHAPAIVLPDADPKKVGVAAARAKFRNAGQVCVSPSRFIVHEKIVEPFTQAMVEETRSIKLGSGFDAGAQMGPLTTARQRERVERLVEDARSKGARILAGGQRPSGFNRGFFFEPTVLGDVPDTALIFEEEPFGPVAPIIPVRSVQEAVEKANAVKWGLAGYLFTSSLADATKVSEAMQVGMVGLNTFAAAAPEAPFGGVKESGYGRECGLEGIREFVSSKLIHTDIG

SEQ ID NO: 40962 - protein, 354 aa, Methanosarcina barkeri str. fusaro
MEKTKTLEKVFKFFLIFVPLSLFAEYTHSSPIAIFVLASLAIIPLAKFIGESTEEISVRTGPALGGLLNATFGNATELIISFFALQAGLTEMVKASITGSIIGNLLLILGMAFFFGGLGKDEQEFNTTAAKTSASTLFLATAAIVMPAVFVLTSENPSDAIIETLSIAVSVIMAVSYLASLLFSLHTHKHLYTVDTTERVAKWSVKKSITILFISTVTVAVISEILVGTIEPLAENLGWTELFIGMIFIAIIGNAAEHVSAVTIAIKDRMDLALQIAIGSTTQVAMFVVPVLVFTSYFFENPMNLIFTTFELAAIVSAVLMVKSIIEDGKSNWFEGLQLLGTYGIMAVVAFLHP

SEQ ID NO: 40963 - protein, 324 aa, Bacteroides thetaiotaomicron VPI-5482
MIKWGFIGCGEVTKTKSGPAFQKVEHSEVVAVMSRDGAKAKAYAKERGIRKWYDDAQELIDDPEVNAIYIATPPSSHATYAIMAMKAGKPAYIEKPMAVTYEECTRINRISKETGVPCFVAYYRRYLPYFQKVKEMVENGSIGNVINVQVRFAQPPRDLDYNRENLPWRVQADIAGGGYFYDLAPHQIDLLQDMFGCILEASGYKSNRGGLYPAEDTLSACFQFDNGLVGSGSWCFVAHDSAREDRIEIIGDKGMICFSVFTYEPIGLHTERGREEICIGNPEHVQQPLIQAVVDHLLGKSVCSCDGESATLTNWVMDKILGKL

SEQ ID NO: 40964 - protein, 581 aa, Saccharomyces cerevisiae
MTIIHNPKWWKEATVYQIYPASFKDSNNDGWGDLAGITSKLDYVKELGVDAIWVCPFYDSPQEDMGYDIANYEKVWPRYGTNEDCFQMIEEAHKRGIKVIVDLVINHCSEEHEWFKESRSSKANPKRDWFFWRPPKGYDEKGNPIPPNNWRSFFGGSAWRYDEKTGEFFLHVFALGQPDFNWENEECRKAIYDSSVGYWLRHNVDGFRIDVGSMYSKVEGLPDAPITDPTVPYQKGTEFFINGPRIHEYHKEMHNYMLSQVPEGKEIMTVGEVGIGNEDDFRVYTSAKEGELNMMFNFKHTSVGENPKCKYELIPFTLKDFKLALAESFLFIENTDCWSTIYLENHDQPRSVSRFGSDSPKWREISSKMLATLIISLTGTVFIYQGQELGMPNFKNRKIEQIKCVEGTGTYAAIKRDYGEDSEKMKKFFEALALISRDHGRTPFPWSADEPSAGFSKDAKPWIDMNESFRDGINAEAELKDKNSVFFFWKKALQVRKEHKDILVYGHNFQFIDLDNDKLFMFTKDTDNKKMFAVFNFSSDNTDFSVPDNEASYTMFFGNYANSNGDSRTLQPWEGRLYLLK

SEQ ID NO: 40965 - protein, 197 aa, Brassica napus
MSASRFVKCVTVGDGAVGKTCLLISYTSNTFPTDYVPTVFDNFSANVVVNGATVNLGLWDTAGQEDYNRLRPLSYRGADVFILAFSLISKASYENVSKKWIPELKHYAPGVPIILVGSKLDLRDDKQFFVDHPGAVPITTAQGEELRKLIDAPTYIECSSKSQENVKAVFDAAIRVVLQPPKQKKKKSKAQKACSIQ

SEQ ID NO: 40966 - protein, 671 aa, Zymomonas mobilis subsp. mobilis ZM4
MAETTTAEAKKNAGDAPLIDLNETSIRKFITQAKKRGYVTYDQLNEALPQDQMSSEQIEDIMSALSEMGINIVENEDSGEDGQQEEEDAAEELQGDGGTSPAPAITTKKETSDRTDDPVRMYLREMGAVELLSREGEIAIAKRIEAGRDTMILGLCESPITFDNIIEWSNALNEGTLQLREIIDLDAMLTQGPSPDQFEEDGDDNDNEISERNAGPTFKEDDDEDDDSEGELDENGQRIQRENMDEEDENTLSLAQMEEQLKPASLEKFAKIADLYRQFSVLQNARMRALGANEEFPEDQENAYQQLREELTAEVESVKFHNARIEFLVEQLYNYNSRLRTLNGQMLRLAERYKVPRDSFLNAYLGNEMEEGWVERVSKIDKKWANFTTSEAESIERIRSEVAEIAQVTGMTLKELRRIVTMVQKGEREARIAKTEMVEANLRLVISIAKKYTNRGLQFLDLIQEGNIGLMKAVDKFEYRRGYKFSTYATWWIRQAITRSIADQARTIRIPVHMIETINKLVRTSRQILHEIGREPTPEELAERLSMPLEKVRKVMKIAKEPISLETPIGDEEDSHLGDFIEDKNAIIPVDAAIQANLKETVTRVLASLTPREERVLRMRFGIGMNTDHTLEEVGQQFSVTRERIRQIEAKALRKLKHPSRSRKMRSFLDH

SEQ ID NO: 40967 - protein, 152 aa, Brassica napus
DGYVSVEVLPLLADDTNGTVEAAKYLHKVVDRRNVYIKIPATAPCIPSIRDVIASGISVNVTLIFSIARYEAVIDAYLDGLEASGLDDLSRVTSVASFFVSRVDTLMDKMLEKIGTPEALDLRGKAAVAQAALAYKLYQKKFSGPRWEALVK

SEQ ID NO: 40968 - protein, 354 aa, Burkholderia sp. 383
MKAAVWHGRHDIRVEQVPVPERPPAGWVTIRVHWCGICGSDLHEYVAGPVFIPVDAPHPLTGLKGQCILGHEFSGEIAELGAGVTGFAVGDRVTADACQHCGTCWYCKHGLYNICENLAFTGLMNNGAFAEYVNVPAELLYKLPDDFPTEAGALIEPLAVGLHAVKKAGNIVGQTVVVVGAGTIGLCTIMCAKAAGAGRVIALEMSAARKQKALEVGASVVIDPKTSDAIAEVKALTGGYGADVSFECIGHTTTAKLAIDVIRKAGKSVMVGIFEEPAPFNFFDIVSTEKEVIGSLAYNGEFADVIRFIADGRIDVQPLITGRIALGDIVSHGFEELVNHKERNVKIIVQPALA

SEQ ID NO: 40969 - protein, 366 aa, Clostridium perfringens
MKAKTTKAKKGEGKEKVDKMVLVKRLIDKGKKSGSLTYKEIMDELDEIELNPEQIEKIYEVLESMGIEVISEIEQEEEEEEELDLSVPEGIAIDDPVRMYLKEIGKVQLLSSEDEIELAKKIEEGSNYAKKKLAEANLRLVVSIAKRYVGRGMLFLDLIQEGNLGLIKAVEKFDYRKGYKFSTYATWWIRQAITRAIADQARTIRIPVHMVETINKLIRIQRQLVQELGRDPLPEELSKQMDMPVDKVREILKIAQEPVSLETPIGEEEDSHLGDFIPDDDAPAPAEAAAFTMLKEQLINVLDTLTPREEKVLRLRFGLDDGRARTLEEVGKEFNVTRERIRQIEAKALRKLRHPSRSKKLKDYLD

SEQ ID NO: 40970 - protein, 280 aa, Yarrowia lipolytica CLIB122
MDKLLAWSVKQQQEGTNEPPPDPKLLAQLFGAPDDAQLMVQAMVVITQPDNKLEDKEVAFDNFEMLVENLDNANMMKNLKLWEPLLAQLSSPHPSLQKLAAWVVATATQNNPKSQEALVEQGDAGIKKLVDLTSHDDPEVVVKSLFALASAIRNCDDAYKLFESADGLKKVVGHLKPDATAQVKSKTLGVLTGILESETDLMKPEEKRQVFDILVKELETDDHIPSLERSLHVLVLLNQKGFPFTPEETEQVKKAAKRVEGKLDEEDVKYNEDLKYVNNL

SEQ ID NO: 40971 - protein, 250 aa, Vitis vinifera
MESLGVRKGAWIQEEDVLLRKCIEKYGEGKWHLVPLRAGLNRCRKSCRLRWLNYLKPDIKRGEFALDEVDLMIRLHNLLGNRWSLIAGRLPGRTANDVKNYWHSHHFKKEVQFQEEGRDKPQTHSKTKAIKPHPHKFSKALPRFELKTTAVDTFDTQVSTSRKPSSTSPQPNDDIIWWESLLAEHAQMDQETDFSASGEMLIASLRTEETATQKKGPMDGMIEQIQGGEGDFPFDVGFWDTPNTQVNHLI

SEQ ID NO: 40972 - protein, 401 aa, Dicranella heteromalla
SDSGKDAGRLSAAWQMFKAQEDLVKVAQDHKVRLTMFHGRGGTVGRGGGPTHLAILSQPPDTINGSLRVTIQGEVIEQSFGEEHLCFRTLQRFTAATLEHGMHPPIAPKPEWRDLMDSMAVAATEEYRSIVFKNPRFVEYFRTATPELEYGRMNIGSRPSKRKPSGGIESLRAIPWIFAWTQTRFHLPVWLGLGGALKQAIEVDPRNMNTLARMYDQWPFFRVTIDLVEMVFAKGDPRIAELYDTLLVKESSQPFGEDLRRKYNETKNLLLQVPFPIPFKHFSVKFFSRRRNPECLQILMLQVLIPVTLQIARHTDILQGNPTLKQRLRLREPYITALNVQQACTLKKMREQRSQPQPESPKLSKTSELVTLNRATEFAPGLEDTVILTMKGIAAGMQNTG

SEQ ID NO: 40973 - protein, 183 aa, Triticum aestivum
ALAQAPEDPILGVTVAYNKDPSPVKVNLGVGAYRTEEGKPLVLNVVRRAEQMLINNPSRVKEYLPITGLAEFNKLSAKLIFGADSPAIQENRVATVQCLSGTGSLRVGGEFLARHYHERTIYIPQPTWGNHPKVFTLSGLTVRSYRYYDPATRGLDFKGLLEDLSSAPSGSIVLLHACGHNPT

SEQ ID NO: 40974 - protein, 511 aa, Nepeta racemosa
ILIALLCTLPFLFFLKKWRRSYSGKTPPPSPPKLPVLGNLHQLGTFPHRSLQSLSRRYGPVMQLHFGSVPVLVASSPEAAREIMKNQDLNFSNRPNLSIPRRLLYDNHDVAFAPYGEYWRQIRSICVLQLLSNKRVQSFRRVREEETSIMVEKIMQLQKTTPTAAVNLTDLLTCLTNDVFCRIALGKKYGGTTTGDGEYHVRSLKKNLAEFYVLLGISPLWEYIPWLEWTRRFDGVDRRIEEVSRTFDEFLGKVIQEHRVRDKREDTTVVGDTVGLDFVDLLLQFQRENERSSSPVDDLTIKAVILDMFLAGTDTTVTALEWALSELIKNPRAMKILQKEVRGVAGSKGEIEESDLEKMPYLKAVMKESLRLHAPVPLLVPRESTRDTKVLGYDVASGTRVLINCWAIGRDSSVWEESETFLPERFLETSIDYRGMHFELIPFGSGRRGCPGATFAAAIDELALATLVHKFDFKLPNGVRVEDLDMSEGSGFTIHKKFPLLVVPTPHACTS

SEQ ID NO: 40975 - protein, 371 aa, Rosa chinensis var. spontanea
MRSTSPQTIDSTPMSHPQQEEEEELGKQAIRLANVVILPMVLKSALELNVIDIIWGAGDGESLSPSDIAAQLPTKNSNAPAVLDRMLRLLASHSILKCSARTGSDGQVERLYSAGPICKFLVKDQNGGTRSVGPLFLLHHDKVFMEGWFHLNDAILEGGIPFNRAYGMTAFEYPETDERFNRVFNQAMSNHTTLILKKILDVYRGFEGINVLVDVGGGIGVTLNLITNKYPHIKGINFDLPHVLADAPSYPGVEHVGGDMFKSVPQGDAIFMKWILHDWSDEHCLTLLKNCCKSLPSSGKVIFVESILPEVPDSTVTSNIVCEQDLLMFTQNPGGKERTKKEYEALALKSGFSRLEVVCSAYNSWVMEFHK

SEQ ID NO: 40976 - protein, 433 aa, Dehalococcoides ethenogenes 195
MDKIVSLARRRGFIFPSSEIYGGLNSCWDYGPLGVELKRNVKEAWWRYMVRDRDDVVGLDASIIMHPRVWEASGHVAGFSDPMVDCKNCKMRWRPTDLAEPKCPACGGELTESRQFNLMFKTFMGPVEEAANIVYLRPETAQGIFVNFENVLNTTRKKLPFGIAQIGKSFRNEITTGNFIFRSREFEQMELEYFVKPGADDACLEEWTQYRLNWYKNLGMNPENLRLRAHRSDELAHYAKGCYDVEYNFPMGWSELEGIANRRDFDLTQHSKYSGKALEYFDEETKEHFIPYVIEPSAGVERSTLAFLIDAYAEEPDKDEIRTVLHLHPALAPYKIAVLPLSKKEILSDYARKIYADLRKCWMVAYDDSQSIGRRYRRQDEIGTPYCVTVDFQSLEDGMVTIRDRDSMDQIRVKVSELSCILAAKLSGEPFNS

SEQ ID NO: 40977 - protein, 364 aa, Dendrobium loddigesii
SDSGKDAGRLSAAWQLYKTQEELVKVAKEYGVKLTMFHGRGGTVGRGGGPTHLAILSQPPDTILGSLRVTVQGEVIEQSFGEENLCFRTLQRFTTATLEHGMQLPISPKPEWRALMDEMAVVATNEYRSIVFQEKRFVEYFRLATPELEYGRMNIGSRPSKRKPSGGIESLRAIPWIFAWTQTRFHLPVWLGFGVAFKHVIEKDKNNLNILREMYNEWPFFRVTIDLIEMGFTKGSTGIAALYDKLLVSTDLLPFGEQLRANYEETKRLLLQVAGHKDLLEGDPSLKQRLRLRYPYITTLNVWQAYTLKRMRDPSYHPTAKPNLSNKIMNSSKPAAELVKLNPTSEYAPGLEDTLILTMKGIAA

SEQ ID NO: 40978 - protein, 397 aa, Neisseria meningitidis Z2491
MFFKHIEAAPADPILGLGEAFKAETRPEKVNLGIGVYKDASGATPIVKAVKEAEKRLLESETTKNYLTIDGVADYNEQTQILLFGKDHEIIASRRAKTAQSLGGTGALRIAAEFAKRQLNAQTIWISNPTWPNHNAIAKAVGIQDQPYRYYDAAKHGLDWDGMIEDLSQAQKGDIVLLHGCCHNPTGIDPTPEQWETLAKLSAEKGWLPLFDFAYQGFGNGLEEDAYGLRVFLKHNTELLIASSYSKNFGMYNERVGAFTLVAEDEATAARAHSQVKTIIRTLYSNPASHGANTIALVLKNDDLKAQWIAELDEMRGRIKAMRQKFVELLKAKGATQDFDFIIEQNGMFSFSGLTPEQVDRLKNEFAIYAVRSGRINVAGITDDNIDYLCESIVKVL

SEQ ID NO: 40979 - protein, 420 aa, Frankia sp. EAN1pec
MTILDASAASGLAGPPGSHGPTDRGPVYHGPRRDPAPLLPGPEPARVLGTPAARALDAELLRALHRRLVLGRRYNQQATTLARQGRIAVYPASTGQEACQIAPAMVLRETDWLFPTYRDTLAVVSRGVRPADVLAMMRGHTHGGYDPREHRIAPLATPLATQACHAVGLAHAARLRAASDPGAPRDVVALALVGDGATSEGDFHEALTFAGVLNAPVVFLVQNNGYAISVPLARQSAAPTLAHKAVGYGVIGRLVDGNDAPAVHTVLGAAVEHARAGRGPVLVEAVTYRMDAHTSADDATRYRTAQEVASWQARDPVTLLERHLRDAGLLDDAAAAAVAAAAEELAAEMRSEFGAEPPEVDPGSLFAHVYARPTSQLREQAAELAARIAAETDHAGTNQAGTNQAGTDQAGTGPAGGEAR

SEQ ID NO: 40980 - protein, 665 aa, Ipomoea purpurea
MAENPGGAAHLQSLLQTAVQSVHWTYSLFWKLCPHNGMLVWSDGYYNGAIKTRKTVQGTEVSAEEASLHRSLQIKELYESLSATAEESNGGGQQPARRPSAALSPEDLTESEWFYLMCISFSFPSAVGLPGKAYAKRQHIWLTGANEVESKIFSRAILAKSARIQTVVCIPLMDGVVELGTTERVKEDYEFIQHIKNHFMEPQHHHHHPKPALSEHSSSEPPSQQLHSPAMASGHHHHHHHRQVRAEEEDEEEEEDEEEEEEEEEDEDEEEELESDADVGPKNHQTGDHVMPAAEEEEHINAVVAETNVGASELMQFDMSESIRVGTPPDDASTDDLDSDFHLLPQMQNPTFLSHHQGAPMLEEFPQEDTHYSETISSILRHQCGQWSDFSTTVAAADYVVHSASSAFSRWTTAASSTCSSHRSAQWVLKYTLLTVPFLHAKNSNGGDGAATILSSKLCKAAPQEEPNVNHVLAERRRREKLNERFIILRSLVPFVTKMDKASILGDTIEYVKQLRRRIQELEAPTEVDRQSITGGVTRKNPSQKSGASRTHHMGPRLNKRGTRTAERGGRPENNTEEDAVVQVEVSIIESDALVELRCTYRQGLILDVMQMLKELGLEITTVQSSVNGGIFCAELRAKLKENMKGRKATIMEVKKAIHSIIPQF

SEQ ID NO: 40981 - protein, 363 aa, Dendrobium crumenatum
SDSGKDAGRLSAAWQLYKTQEELVKVAKEYGVKLTMFHGRGGTVGRGGGPTHLAILSQPPDTILGSLRVTVQGEVIEQSFGEENLCFRTLQRYTTATLEHGMQLPFSPKPEWRALMDEMAVVATNEYRSIVFQESRFVEYFRLATPELEYGRMNIGSRPSKRKPSGGIESLRAIPWIFAWTQTRFHLPVWLGFGAAFKHVIEKDKKNLNILQEMYNEWPFFRVTIDLIEMVFTKGSTGIAALYDKLLVSADLLPFGEQLRANYEETKRLLLQVAGHKDLLEGDPYLKQRLRLRYPYITTLNVQVYTLKRIRDPNYHLTAKPNGSNEIRNSNKPAAELVKLNPTSEYPPGLEDTLILTMKGIAA

SEQ ID NO: 40982 - protein, 455 aa, Bacillus megaterium
TIKEMPQPKTFGELKNLPLLNTDKPVQALMKIADELGEIFKFEAPGRVTRYLSSQRLIKEACDESRFDKNLSQALKFVRDFAGDGLFTSWTHEKNWKKAHNILLPSFSQQAMKGYHAMMVDIAVQLVQKWERLNADEHIEVPEDMTRLTLDTIGLCGFNYRFNSFYRDQPHPFITSMVRALDEAMNKLQRANPDDPAYDENKRQFQEDIKVMNDLVDKIIADRKASGEQSDDLLTHMLNGKDPETGEPLDDENIRYQIITFLIAGHETTSGLLSFALYFLVKNPHVLQKAAEEAARVLVDPVPSYKQVKQLKYVGMVLNEALRLWPTAPAFSLYAKEDTVLGGEYPLEKGDELMVLIPQLHRDKTIWGDDVEEFRPERFENPSAIPQHAFKPFGNGQRACIGQQFALHEATLVLGMMLKHFDFEDHTNYELDIKETLTLKPEGFVVKAKSKKIPL

SEQ ID NO: 40983 - protein, 537 aa, Brassica rapa subsp. pekinensis
SFKDKTYEGNNNNLPEENSTTITHVSSVHSPTTEQDFPKEDNNNNNNKSPVLVLPVKEPFMRRNMDNQAYYVLGHKTPNIRDLYTLSRKLGQGQFGTTYLCTEVATGVDYACKSISKRKLISKEDVEDVRREIQIMHHLAGHKNIVTIKGAYEDPLYVHIVMEVCAGGELFDRIIQRGHYTERKAAELTKIVVGVVEACHSLGVMHRDLKPENFLLVNKDDDFSLKAIDFGLSVFFKPGQIFKDVVGSPYYVAPEVLLKHYGPEADVWTAGVILYILLSGVPPFWAETQQGIFDAVLKGDIDFESDPWPVISDSAKDLIRKMLCSNPSERLSAHEVMRHPWICENGVAPDRALDPAVLSRLKQFSAMNKLKKMALKVIAESLSEEEIAGLRAMFEAMDTDNSGAITFDELKAGLRRYGSTLKDTEIQDLMEAADVDNSGTIDYSEFIAATIHLNKLDREEHLVSAFQYFDKDGSGYITIDELQQSCVEHGMTDVFLEDVIKEVDQDNDGRIDYGEFVAMMQKGNAGIGRRTMRNSLN

SEQ ID NO: 40984 - protein, 364 aa, Dendrobium farmeri
SDSGKDAGRLSAAWQLYKTQEELVKVAKEYGVELTMFHGRGGTVGRGGGPTHLAILSQPPDTIHGSLRVTVQGEVIEQSFGEEHLCFRTLQRFTTATLEHGMQLPISPKPEWRALMDEMAVVATNEYRSIVFQESRFVEYFRLATPELEYGRMNIGSRPPKRKPSGGIESLRAIPWIFAWTQTRFHLPVWLGFGAAFKHVIEKDKKNLNMLREMYNEWPFFRVTIDLIEMGFTKGSPGIAALYDKLLVSTDLLPFGEQLRANYEETKRLLLQVAGHKDLLEGDPYLKQRLRLRYPYITTLNVWQAYTLKRIRDPSYHLPAKPNLSNEIMNSNKSAAELVKLNPTSEYAPGLEDTLILTMKGIAA

SEQ ID NO: 40985 - protein, 122 aa, Arabidopsis thaliana
  misc_feature (27)..(27): Xaa can be any naturally occurring amino acid
  unsure (1)..(122): unsure at all Xaa locations
TSFHTGARGTVVRLRYGGFITGMYINXITSDRTLVRLKKETRGGYVIPRGGWFELVSCPNYFGEAIEWLGWAVMTWSWAGIGFFLYTCSNLFPRARASHKWYIAKFKEEYPKTRKAVIPFVY

SEQ ID NO: 40986 - protein, 535 aa, Brassica napus
SFKDKTYEGNNNNLPEENSITITHVSSVHSPTTEQDFPKEDNNNNKSPVLVLPVKEPFMRRNMDNQAYYVLGHKTPNIRDLYTLSRKLGQGQFGTTYLCTEVATGVDYACKSISKRKLISKEDVEDVRREIQIMHHLAGHKNIVTIKGAYEDPLYVHIVMEVCAGGELFDRIIQRGHYTERKAAELTKIVVGIVEACHSLGVMHRDLKPENFLLVNKDDDFSLKAIDFGLSVFFKPGQIFKDVVGSPYYVAPEVLLKHYGPEADVWTAGVILYILLSGVPPFWAETQQGIFDAVLKGDIDFESDPWPVISDSAKDLIRKMLCSNPSERLTAHEVMRHPWICENGVAPDRALDPAVLSRLKQFSAMNKLKKMALKVIAESLSEEEIAGLRAMFEAMDTDNSGAITFDELKAGLRRYGSTLKDTEIQDLMEAADVDNSGTIDYSEFIAATIHLNKLDREEHLVSAFQYFDKDGSGYITIDELQQSCVEHGMTDVFLEDVIKEVDQDNDGRIDYGEFVAMMQKGNAGIGRRTMRNSLN

SEQ ID NO: 40987 - protein, 364 aa, Dendrobium farmeri
SDSGKDAGRLSAAWQLYKTQEELVKVAKEYGVKLTMFHGRGGTVGRGGGPTHLAILSQPPDTIHGSLRVTVQGEVIEQSFGEEHLCFRTLQRFTTATLEHGMQLPISPKPEWRALMDEMAVVATNEYRSIVFQESRFVEYFRLATPELEYGRMNIGSRPPKRNPSGGIESLRAIPWIFAWTQTRFHLPVWLGFGAAFKHVIEKDKKNLNMLREMYNEWPFFRVTIDLIEMVFTKGSPGIAALYDKLLVSTDLLPFGEQLRANYEETKRLLLQVAGHKDLLEGDPYLKQRLRLRYPYITTLNVWQAYTLKRIRDPSYHLPAKPNLSNEIMNSNKSAAELVKLNPTSEYAPGLEDTLILTMKGIAA

SEQ ID NO: 40988 - protein, 453 aa, Emericella nidulans
MTSNGTNGSATAYHASSTQEAIQAENDFAAHNYHPLPVVFARAQGTSVWDPEGRHYLDFLSAYSAVNQGHCHPKLVAALVDQASRLTLSSRAFYNDVFPKFAEMVTKYFGFDMVLPMNTGAEAVETGIKIARKWGYKVKGIPENEAIILSAENNFHGRTMAAISLSSDPESRENYGPYVPNIGCTIPGTEKPITYNDKAVREAFEKAGSNLAAFLVEPIQGEAGIIVPDDDYLQLARSLCDQHNVLLICDEIQTGIARTGKLLCHEWSGIKPDMVLLGKAISGGMYPVSCVLGRKDVMLTVEPGTHGSTYGGNPLACAVAIRALEVVQEENMVERAEKLGQAFRSGLEAIQNPIIQTVRGKGLLNAIVIDESKTNGHTAWDLCMLMKEKGLLAKPTHQNIIRLAPPLVITEEEIAKALEIIKAAVAELPNLKGAAEDKVVPPPEKKVKITLEN

SEQ ID NO: 40989 - protein, 193 aa, Triticum aestivum
SNFNNKYCMHKLPYMILVHIHSTYKEAEISSHGPWKPQRNSHRQRTRKRIQRTHTSNNPSTLGIDRRDHHGNILLFRRNTRGGCLDLLGDGVDGVDDPRDVPEEGEQEADPELVPAAELEEDAEGREDDGEDDVDAVGRARHGRRCSGGRRAFHSIGADAWVDDIPGIPDRYRHAFLYKLVLWSHLNRPNVKL

SEQ ID NO: 40990 - protein, 343 aa, Arabidopsis thaliana
MGRAPCCEKVGIKKGRWTAEEDRTLSDYIQSNGEGSWRSLPKNAGLKRCGKSCRLRWINYLRSDIKRGNITPEEEDVIVKLHSTLGTRWSTIASNLPGRTDNEIKNYWNSHLSRKLHGYFRKPTVANTVENAPPPPKRRPGRTSRSAMKPKFILNPKNHKTPNSFKANKSDIVLPTTTIENGEGDKEDALMVLSSSSLSGAEEPGLGPCGYGDDGDCNPSINGDDGALCLNDDIFDSCFLLDDSHAVHVSSCESNNVKNSEPYGGMSVGHKNIETMADDFVDWDFVWREGQTLWDEKEDLDSVLSRLLDGEEMESEIRQRDSNDFGEPLDIDEENKMAAWLLS

SEQ ID NO: 40991 - protein, 419 aa, Streptomyces peucetius
MNRRIVITGIGVVAPGAVGTKPFWELLLSGTTATRAISTFDATPFRSRIAAECDFDPVAAGLSAEQARRLDRAGQFALVAGQEALADSGLRIDEDSAHRVGVCVGTAVGCTQKLESEYVALSAGGAHWVVDPGRGSPELYDYFVPSSLAAEVAWLAGAEGPVNIVSAGCTSGIDSIGYACELIREGTVDAMVAGGVDAPIAPITVACFDAIRATSDHNDTPETASRPFSRSRNGFVLGEGGAIVVLEEAEAAVRRGARIYAEIGGYASRGNAYHMTGLRADGAEMAAAITAALDEARRDPSDVDYVNAHGTATKQNDRHETSAFKRSLGEHAYRVPISSIKSMIGHSLGAVGSLEVAATALAVEYGVIPPTANLHDPDPELDLDYVPLTAREKRVRHALTVGSGFGGFQSAMLLSRLER

SEQ ID NO: 40992 - protein, 425 aa, Streptomyces peucetius
MTGTAARTASSQLHASPAGRRGLRGRAVVTGLGIVAPNGLGVGAYWDAVLNGRNGIGPLRRFTGDGRLGRLAGEVSDFVPEDHLPKRLLAQTDPMTQYALAAAEWALRESGCSPSSPLEAGVITASASGGFAFGQRELQNLWSKGPAHVSAYMSFAWFYAVNTGQIAIRHDLRGPVGVVVAEQAGGLDALAHARRKVRGGAELIVSGAVDSSLCPYGMAAQVKSGRLSGSDNPTAGYLPFDRRAAGHVPGEGGAILTVEDAERAAERGAKVYGSIAGYGASFDPPPGSGRPSALARAVETALADAGLDGSDIAVVFADGAAVPELDAAEAEALASVFGPRRVPVTVPKTLTGRLYSGAGPLDVATALLALRDEVVPATAHVDPDPDLPLDVVTGRPRSLADARAALLVARGYGGFNSALVVRGAA

SEQ ID NO: 40993 - protein, 500 aa, Streptococcus pyogenes MGAS10394
MNKRVKIVATLGPAVEIRGGKKYGEDGYWAGQLDVEESAKKIAELIEAGANVFRFNFSHGDHKEQGDRMATVRLAEEIARQKVGFLLDTKGPEMRTELFADDAKEFSYVTGEKIRVATTQGIQSTRDVIALNVAGSLDIYDEVEVGHTILIDDGKLGLKVIDKDIATRQFIVEVENDGIIAKQKGVNIPNTKIPFPALAERDNADIRFGLEQGLNFIAISFVRTAKDVEEVREICRETGNDHVQLFAKIENQQGIDNLDEIIEAADGIMIARGDMGIEVPFEMVPVFQKMIITKVNAAGKAVITATNMLETMTEKPRATRSEVSDVFNAVIDGTDATMLSGESANGKYPVESVRTMATIDRNAQTLLNEYGRLDSSAFPRTNKTDVIASAVKDATHSMDIKLVVTITETGNTARAISKFRPDADILAVTFDEKVQRALMINWGVIPVLAEKPASTDDMFEVAERVAVEAGLVQSGDNIVIVAGVPVGSGGTNTMRVRTVK

SEQ ID NO: 40994 - protein, 112 aa, Zea mays
MAAVETVVLKVAMSCEGCAGAVRRVLSKMEGVETFDIDLKEQKVTVKGNVKPEDVFQTVSKSGKRTSYWEGEATAPDAAAAPEAEAAPGTAAEAPPAAAPAAPEITPAKADA

SEQ ID NO: 40995 - protein, 559 aa, Sulfolobus solfataricus
MAAPVLLLKEGTSRTTGRDALRNNILAAKALAERLRSSLGPKGLDKMLIDSFGDVTITNDGATIVKDMEIQHPAAKLLVEAAKAQDAEVGDGTTSAVVLAGALLEKAESLLDQNIHPTIIIEGYKKAYNKALELLPQLGTRIDIKDLNSSVARDTLRKIAFTTLASKFIAEGAELNKIIDMVIDAIVNVAEPLPNGGYNVSLDLIKIDKKKGGSIEDSVLVKGLVLDKEVVHPGMPRRVTKAKIAVLDAALEVEKPEISAKISITSPEQIKAFLDEESKYLKDMVDKLASIGANVVICQKGIDDIAQHFLAKKGILAVRRVKRSDIEKLEKALGARIISSIKDATPEDLGYAELVEERRVGNDKMVFIEGAKNLKAVNILLRGSNDMALDEAERSINDALHALRNILLEPVILPGGGAIELELAMKLREYARSVGGKEQLAIEAFADALEEIPLILAETAGLEAISSLMDLRARHAKGLSNTGVDVIGGKIVDDVYALNIIEPIRVKSQVLKSATEAATAILKIDDLIAAAPLKSEKKGGEGSKEESGGEGGSTPSLGD

SEQ ID NO: 40996 - protein, 299 aa, Glycine max
MEVAAAKALKPSLRTEFIFPQAIYDEILCFNANNVVAGEDFSMDDLLDFSNGEFQVGKDFDDYEEEEDEEKNSTSGSLQSQDRAEDDNNSNSTAGGGGHDYVFAGELSVPADDVADLEWVSHFVDDSLPELSILYPIHCSKKTRVWAEPESRLSPAQTVSKVPRKSRTEKPRKPNTRVWSSFTVFAGSVGFGELVTKKQKKKVEAQSGGAQSLRRCSHCQVQKTPQWRIGPLGPKTLCNACGVRFKSGRLFPEYRPACSPTFCGHIHSNNHRRVLEMRWKKQIAESVTGSDRKQLIPNY

SEQ ID NO: 40997 - protein, 541 aa, Nocardioides sp. JS614
MPKLIAFNEEARRGLERGMNTLADAVKVTLGPKGRNVVLEKKWGAPTITNDGVSIAKEIELEDPYEKIGAELVKEVAKKTDDVAGDGTTTATVLAQAMVREGLRNVAAGANPMGLKRGIEAAVEAVSGQLLSMAKDVETKEQIASTASISAADTTVGEIIAEAMDKVGKEGVITVEESNTFGLDLELTEGMRFDKGYISAYFVTDPERMETVLEDPYVLIANQKISSVKDLLPLLEKVMQSGKPLLILAEDVDGEALSTLVVNKIRGTFKSVAVKAPGFGDRRKAMLQDIAILTGGQVISEEVGLKLESTGIELLGQARKVVITKDETTIVEGAGDADQIAGRVNQIRAEIEKSDSDYDREKLQERLAKLAGGVAVIKVGAATEVELKERKHRIEDAVRNAKAAVEEGIVAGGGVALVQAANAAFDKLDLTGDEAVGAQIVRFATDAPLKQIAINAGLEGGVVAEKVRGLTAGHGLNAATGEYVDMIASGIIDPAKVTRSALQNAASIAALFLTTEAVVADKPEKAAPMGDPSGGMGGMDF

SEQ ID NO: 40998 - protein, 589 aa, Saccharomyces cerevisiae
MTISSAHPETEPKWWKEATIYQIYPASFKDSNNDGWGDMKGIASKLEYIKELGTDAIWISPFYDSPQDDMGYDIANYEKVWPTYGTNEDCFALIEKTHKLGMKFITDLVINHCSSEHEWFKESRSSKTNPKRDWFFWRPPKGYDAEGKPIPPNNWRSYFGGSAWTFDEKTQEFYLRLFCSTQPDLNWENEDCRKAIYESAVGYWLDHGVDGFRIDVGSLYSKVAGLPDAPVIDENSKWQLSDPFTMNGPRIHEFHQEMNKFIRNRVKDGREIMTVGEMRHATDETKRLYTSASRHELSELFNFSHTDVGTSPKFRQNLIPYELKDWKVALAELFRYVNGTDCWSTIYLENHDQPRSITRFGDDSPKNRVISGKLLSVLLVSLSGTLYVYQGQELGEINFKNWPIEKYEDVEVRNNYDAIKEEHGENSKEMKRFLEAIALISRDHARTPMQWSREEPNAGFSGPNAKPWFYLNESFREGINAEDESKDPNSVLNFWKEALRFRKAHKDITVYGYDFEFIDLDNKKLFSFTKKYDNKTLFAALNFSSDSIDFTIPNNSSSFKLEFGNYPRSEVDASSRTLKPWEGRIYISE

SEQ ID NO: 40999 - protein, 575 aa, Staphylococcus epidermidis RP62A
MKEQNPLFFLFKRLSWPYGLIIAAVIITSLGSLSGLLVPLFTGRLVDKFSVSSINWGMIAIFGSIFLVNALLSGIGLYLLSKIGEKIIYAIRSLLWEHIIQLKMPFFDKNESGQLMSRLTDDTKVINEFISQKLPNLLPSVLTLIGSLVMLFIMDWKLTLLTFITIPVFILIIVPLGRVMQKISTNTQSEIANFSGLLGRVLTEMRLVKVSNTERLELDNAHTNLKKIYRLGLKQAKISAVVQPISGVVMLLTIAIILGFGALEIGTGAITPGTLIAMIFYVIQLSMPLINLSTLVTDYKKAVGASSRIYEIMQEPIEPTEALSESKDVTIIDGELVFEHVDFKYDVKKILEDVSFSIPQGEVSAFVGPSGSGKSTIFNLIERMYDIERGDIKYGNQSIFDIPLSKWRTKIGYVMQSNSMMSGTIRDNILYGINRKVDDEELIEYAKLANCHDFIMQFDEGYDTMVGERGLKLSGGQRQRIDIARSFVKNPDILLLDEATANLDSESELKIQEALETLMEGRTTVVIAHRLSTIKKAGQIVFIDKGEVTGKGTHHELMASHDKYRHFVTSQKLSD

SEQ ID NO: 41000 - protein, 304 aa, Thermoplasma volcanium GSS1
MLPNFLPVGEIRKLAASVLPDINIITDLDFKSDESDILIVTAFTKVDKALLDKFPRLKFIQVASTGYDNVDVTEVKSRNILMCNSPSSNKESVAEHVIGMALYFLKDFGHLDREIRNGNWPILTFSRDLMGKVFGIIGMGAIGRKLAERLIQFGVGIIYYDVKRLPEEVEDELGITYVTLDELISSADIISIHVPLTETTKGMIGRKEFEKMKDGCIFINTSRAEVVVTKDLVWALKQGKIKAGIDVYDREPPDFSSELFQMDNALFSPHIAGVTVESQRRFIEETVANVIRYMQGVDPLNRVL

SEQ ID NO: 41001 - protein, 488 aa, Burkholderia sp. 383
MKQRPAATPYAMPVDFPAIVDRYGPAVVTIMTAAPDQQAGGPSFSILDPDDPLAAFFRHDAPPPAQGPQAPTQAQAQAQAPAPDTAPRAVSGSGSGFIVSADGLILTSAHVVDDATDVTVRLTDRREFKATVLAVDPQSDVAVLRVNATKLPFVRVGDSSKVRAGEPVMTIGAPDGSGNTVTAGIVSATSHRLPDGSAFPFFETDIAPNPDNSGGPVFNRAGDVIGIAVQVYTGADRYASMTFAIPIAFAAKVRAQLQKQMQAQAQQSQAPGEPSSGNAIGVDVQDVGIGLAAAFGLPRPAGALVNGVAPGSPAAAAGVKPGDVIVKLGDKTIGRSAELNDLAAALPPGQKAPLRLIRNRAPVMLTITGADEAAGNAGATVGMATPKAAARPGAGAGAADGGDRLGLTMHALSDDERRSTGLAVGMMVDAVHGPAATAGIQPGDVVLELNDTLLETPDDIPTLEANGSVIAVLIQRNNARKFVSVRAR

SEQ ID NO: 41002 - protein, 484 aa, Oryza sativa
MALSTAQTGESMHSSTFASRYVRTALPRFRMPEKSIPKDAAYQIINDELMLDGNPRLNLASFVTTWMEPECDKLMMAAINKNYVDMDEYPVTTELQNRCVNMIAHLFNAPIGDDETAVGVGTVGSSEAIMLAGLAFKRKWQNRMKAEGKPHDKPNIVTGANVQVCWEKFARYFEVELKEVKLTQGYYVMNPEKAVEMVDENTICVAAILGSTLNGEFEDVKMLNDLLTAKNAETGWNTPIHVDAASGGFIAPFIYPELEWDFRLPLVKSINVSGHKYGLVYAGVGWVIWRNKEDLPDELIFHINYLGADQPTFTLNFSKGSNQIIAQYYQLIRLGFEGYKDIMQNCRDNATVLREGIEKTGHFDVVSKDSGVPLVAFSLKDSSRYTVFEVAESLRRFGWIVPAYTMPADAEHVAVMRVVIREDFSRGLAERLITDLTKTVADMDAHAVKKAAAEPAKKTVREIEKEVTTYWRSFVARKKSSLVC

SEQ ID NO: 41003 - protein, 147 aa, Helianthus tuberosus
MAATDIAVQAGPWGGNGGKRWLQTARGGKITSIIIKGGTCIFSIQFVYKDKDNIEYHSGQFGVQGDKAETITFADDEDITAISGTFGAYYHLTVVTSLTFQTNKKVYGPFGTVASSSFSLPLTKGKFAGFFGNSGDVLDSIGGVVVP

SEQ ID NO: 41004 - protein, 255 aa, Petunia integrifolia
MSTSNASTSGVRKGAWTEEEDLLLRECIEKYGEGKWHLVPVRAGLNRCRKSCRLRWLNYLRPHIKGGDFSLDEVDLILRLHKLLGNRWSLIAGRLPGRTANDVKNYWNTHLRKKLIAPHDQKQESKNKAMKITENSIIKPRPRTFSRPAMNHVSCWNGKSCNKNTIDKNEGDTEIIKFGDEKQKPEESIVDGLQWWANLLANNIEIEELVSYNSPTLLHEETAPSVNAESSLTQEGGSGLSDFSVDIDDIWDLLS

SEQ ID NO: 41005 - protein, 147 aa, Helianthus tuberosus
MAASDVAVQAGPWGGNGGKRWLQTAHGGKITSIIIKGGTCIFSIQFAYKDKDNIEYLSGQFGVQGDKAETITFADNEDITAISGTFGAYYQMTVVTSLTFQTNKKVYGPFGTVASSSFSLPPTKGKFAGFFGNSGDVLDSIGGVVVP

SEQ ID NO: 41006 - protein, 255 aa, Petunia integrifolia
MSTSNASTSGVRKGAWTEEEDLLLRECIEKYGEGKWHLVPVRAGLNRCRKSCRLRWLNYLRPHIKRGDFSLDEVDLILRLHKLLGNRWSLVAGRLPGRTANDVKNYWNTHLRKKLIAPHDQKQESKNKAMKITENNIIKPRPQTFSRPAMNHVSCWNGKSCSKNTIDKNEGDTEIIKFSDEKQKPEESIDDGLQWWANLLANNIEIEELVSCNSPTLLHEETAPSVNAESSLTQGGGSGLSDFSVDIDDIWDLVS

SEQ ID NO: 41007 - protein, 431 aa, Chlorobium tepidum TLS
MPVLTRSAELFEKAKKFIPGGVNSPVRAFKSVGGTPIYMAKGQGAYMTDVDGNTYLDYVGSWGPFILGSMHPRVTAAIEYTLRNIGTSFGTPIELEIEIAELLCKIVPSLEMVRMVNSGTEATMSAVRLARGYTGKDKIIKFEGCYHGHGDSFLIKAGSGVLTLGDPDSPGVTKGTANDTLNATYNDIESVKAIVNENKGQVAAIIIEPVAGNTGVIPAKKEFLVALRELCDAEGIVLIFDEVMCGFRVALGGAQELYGVTPDLTTMGKIIGGGLPVGAFGGKRHIMENIAPLGSVYQAGTLSGNPLALTAGLETLKILMEENPYPELERKAAFLEAGFKANMEKLGLNYTQNRVGSMACLFFTETPVVDYKSAITADTAKYGKYFHSMLDQGIYLAPSQFEAMFTSFAHTDEDLEKTVKANYNALVAATK

SEQ ID NO: 41008 - protein, 670 aa, Ipomoea tricolor
MAENPGGAAHLQSLLQTAVQSVHWTYSLFWKLCPHNGMLVWSDGYYNGAIKTRKTVQGTEVSAEEASLHRSQQIKELYESLSATAEESNGGGQQPARRPSAALSPEDLTESEWFYLMCISFSFPSAVGLPGKAYAKRQHIWLTGANEVESKVFSRAILAKSARIQTVVCIPLMDGVVELGTTERVKEDYEFIQHIKNHFMEPQPHHHHPKPALSEHSSSEPPSQQLHSPVMASGHHHHHHQVRAEDEDEEEEEDEEEEEEEEEDDDDDDDEAEELESDADVGPKNHQTGDHVMAAAEEEENINAMVAETNVGASELMQFDMSESIRVGTPPDDASTDLDSDFHLLPQMPHCQNPTFLSQGAPMEEFPREDTHYSETISSILRHQCGQWSDDFSTTVAAADYVVHSASSAFSRWTTAASSTCSSHRSAQWALKYTLLTVPFLQAKNSHGGGAADTIPSSKLCKAAPQEEPNVNHVLAERRRREKLNERFIILRSLVPFVTKMDKASILGDTIEYVKQLRRRVQELEAARGNPSEVDRQSITGGVTRKNPAQKSGASRTQMGPGLNKRGTRTAEGGGRPANDTEEDAVVHVEVSIIESDALVELRCTYRQGLILDVMQMLRELGLEITTVQSSVNGGIFCAELRAKVKENMKGRKATIMEVKKAIHSIIPQF

SEQ ID NO: 41009 - protein, 147 aa, Helianthus tuberosus
MAASDIGVQAGPWGGNGGKRWLQTAHGGKITSIIIKGGTCIFSIQFVYRDKDNIEHHSGQFGVQGDKAETITFADDEDITGISGTFGAYYQMTVVTSLTFKTNKKVYGPFGTVAGSSFSLPLTKGKFAGFFGNSGDVLDSIGGVVVP

SEQ ID NO: 41010 - protein, 196 aa, GIBBERELLA ZEAE PH-1
MDDNLEKPVLFFDIDNCLYSRNYKVLELMSGLIDSYFKNHLGLSPDEAERLHKDYYQQYGQAIEGLVRDYQIDALEYNAKVDDALPLDDIIKPNPQLRQFLEDIDTSKVRLWLLTNAYVNHGKRVIKLLGVDDLFEGLTYCDYTQIPLNCVGAQKAGWAAVHYVEAGFPLPDTPASQYQTPLMDRGMEKTGISAAW

SEQ ID NO: 41011 - protein, 365 aa, Dendrobium fimbriatum
SDSGKDAGRLSAAWQLYKAQEDLIKVAKEFGVKLTMFHGRGGTVGRGGGPTHLAILSQPPDTIHGSLRVTVQGEVIEQSFGEEHLCFRTLQRFTAATLEHGMHPPISPKPEWRALLDEMAVVATEEYRSIVLQEPRFVEYFRLATPEMEYGRMNIGSRPSKRKPSGGIESLRAIPWIFAWTQTRFHLPVWLGFGTAFKHAIEKDIKNLHMLQEMYNEWPFFRVTIDLIEMVFAKGNPGIAALHDKLLVSDDLWSFGERLRTNYEETKNLLLQVAGHRDLLEGDPHLKQRLRLRDSYITTLNVCQACTLKRIRDPNFHVTVRPHISKDIIDSSNKRAAELVKLNPTSEYAPGLEDTLILTMKGIAA

SEQ ID NO: 41012 - protein, 479 aa, Streptomyces coelicolor A3(2)
MTDTPTQLFLGGAWADAADGAVMPVDDPATGEILAHVADAGPKDARLAEEAAVQAQEEWARAAPRARSEILRRAYEIVLERTDALARLMTSEMGKPLAEARGEVAYAAEFFRWFSEEAVRIDGGHGVLPDGRNRMLLSRRPVGPCLLITPWNFPLAMGTRKIGPAVAAGCTMVLKPAPQTPLSSLALAAILKEAGLPDGVLNVVTTSRAGEVCEPLLRGGRIRKLSFTGSTAVGRLLLAQCADTVVRTSMELGGNAPFVVFDDADLDAAVDGAMVAKMRNMGEACTAANRFFVHRSVAGEFADRLARRMGALVVGPGTGDGVDVGPLIDAAGRAKVEELVADAVERGARVLVGGTTPEGPGCFYPPTVLTDVAPESRLMATEIFGPVAAILTFDDEDEVVRRANDTPWGLVGYVFTEGLDRALRVSERLDVGMVGLNTGLVSNPAAPFGGVKQSGLGREGGRVGIEEFLEYQYVALPTG

SEQ ID NO: 41013 - protein, 364 aa, Dendrobium fimbriatum
SDSGKDAGRLSAAWQLYKTQEELVKVAKEYGVKLTMFHGRGGTVGRGGGPTHLAILSQPPDTIHGSLRVTVQGEVIEQSFGEEHLCFRTLQRFTAATLEHGMQLPISPKPEWRALMNEMAVVATNEYRSIVFEESRFVEYFRLATPELEYGRMNIGSRPSKRKPSGGIESLRAIPWIFAWTQTRFHLPVWLGFGAAFKHVIEKDKKNLNILREMYNEWPFFRVTIDLIEMVFTKGSPGIAALYDKLLVSTDLLPFGEQLRANYEETKRLLLQVAGHKDLLEGDPYLKQRLRLRYPYITTLNVWQAYTLKRIRDPSYHLTAKPNLSNEIMNSNKPAAELVKLNPTSEYAPGLEDTLILTMKGIAA

SEQ ID NO: 41014 - protein, 679 aa, Dehalococcoides ethenogenes 195
MSIWIALVVGLAGLVVAGLLARFVLRQDEGISKVREIASAIREGAMAFITREYTVMAIFVAAVTIILALLPSLGWPVSVSFLFGALCSGLAGFIGMSIAVRANARTTTAASHSLNQGLKFSFRAGSVMGMSVVGIGIIGLSIMYFAFGSNADFLQILPGYGFGASSVAIFARVGGGIFTKAADTGADIVGKVEKGIPEDDPRNAAVVADFVGDNVGDVAGMGADLFESYVDSIIATMALATVGAFSMKLGYSLVPSEEAAFFLPMLVAAGGILASVIGIFLVRTGEKLQMKALLAALRKGTLAAAFLSAVFSFLAVWYLQADLGLFVAILAGLAAGVFIGESTNYFTSYVYKPTLGIAASCQTGAATNIISGFSVGLLSVVPPIILVVAAIVIAYTFGDVYGVALAGVGMLATLGIQDATDAYGPVADNAGGIAEMAGLPKEVRERTDALDSLGNTTAAIGKGFAIGSAGLTSLALLLSYTQAVGITASQVSLLDVKVLAGLLLGVMMPAVFCSLTLKAVGVTSFSIVNEVRRQFKEIAGIMDGTAKPEYGKCVDICTRDSIKQMILPGIITVVSPVIVGWLLGSVAVVGFLAGIILCGFVLAVTFANAGGAWDNAKKWVETGAYGGKGSDAHKAAVVGDTVGDPMKDTAGPSLNIMIKLVAIIALVMAPILANFSGII

SEQ ID NO: 41015 - protein, 294 aa, Saccharomyces cerevisiae
MKTLVHVASVEKGRSYEDFQKVYNAIALKLREDDEYENYIGYGDDLVRLAWHISGTWDKHDNTGGSYGGTYRFKKEFNDPSNAGLQNGFKFLEPIHKEFPWISSGDLFSLGGVTAVQEMQGPKIPWRCGRVDTPEDTTPDNGRLPDADKDAGYVRTFFQRLNMNDREVVALMGAHALGKTHLKNSGYEGPWGAANNVFTNEFYLNLLNEDWKLEKNDANNEQWDSKSGYMMLPTDYSLIQDPKYLSIVKEYANDQDKFFKDFSKAFEKLLENGITFPKDAPSPFIFKTLEEQGL

SEQ ID NO: 41016 - protein, 212 aa, Bacillus halodurans C-125
MKFFIDTANINEIREANDLGILAGVTTNPSLVAKEGVDFHERLREITSLVKGSVSAEVVALDAEGMIKEGKELAAIAPNITVKVPMTTEGLKAVHAFHQEGITTNVTLVFSAVQALLAARAGATYVSPFLGRLDDIGHDGLDLISQIAEIFHVHDLDIQIIAASIRHPQHVTEAALRGAHIATIPFKVISQLSKHPLTDKGIEQFLKDWNNR

SEQ ID NO: 41017 - protein, 397 aa, Arabidopsis thaliana
MDEALTNASAIGDQRQKIEQYKLILSSVLSSNDLLQAQRFIDHILSDDVPLVVSRQLLQSFAQELGRLEPETQKEIAQFTLTQIQPRVVSFEEQALVIREKLAGLYESEQEWSKAAQMLSGIDLDSGMRAVDDNFKLSKCIQIARLYLEDDDAVNAEAFINKASFLVSNSQNEVLNLQYKVCYARILDMKRKFLEAALRYYGISQIEQRQIGDEEIDENALEQALSAAVTCTILAGAGPQRSRVLATLYKDERCSKLKIYPILQKVYLERILRRPEIDAFSEELRPHQKASLPDKSTVLDRAMIEHNLLSASKLYTNIRFDELGTLLAIDPRKAEKIAANMIGQDRMRGSIDQEEAVIHFEDDVEELQQWDQQISGLCQALNDILDGMAKKGMSVPV

SEQ ID NO: 41018 - protein, 364 aa, Dendrobium delicatum
  misc_feature (146)..(146): Xaa can be any naturally occurring amino acid
  misc_feature (148)..(148): Xaa can be any naturally occurring amino acid
  unsure (1)..(364): unsure at all Xaa locations
SDSGKDAGRLSAAWQLYKTQEEPVKVAKEFGVKLTMFHGRGGTVGRGGGPTHLAILAQPPDTIHGSLRVTVQGEVIEQLFGEEHLCFRTLQRFAAATLEHGMQLPISPKPEWRALMDEMAVVPTKEYRSIVFQEPRFVEYFRLATXEXEYGRMNIGSRPSKRKPSGGIESLRAIPWIFAWTQTRLHLPVWLGFGAAFKHVIEKDKKNLNILREMYNEWPFFRVTIDLIEMVFTKGSPGIAALYDKLLVSTDLVPFGEQLRANYEETKRLLLQVAGHKDLLEGDPYLKQRLRLRYPYITTLNVCQAYTLKRIRDPSSHLTAKPSLSNEIMNSHKPAAELVQLNPTSEYAPGLEDTLILTMKGIAA

SEQ ID NO: 41019 - protein, 458 aa, Bacillus megaterium
TIKEMPQPKTFGELKNLPLLNTDKPVQALMKIADELGEIFKFEAPGRVTRYLSSQRLIKEACDESRFDKNLSQALKFVRDFAGDGLFTSWTHEKNWKKAHNILLPSFSQQAMKGYHAMMVDIAVQLVQKWERLNADEHIEVPEDMTRLTLDTIGLCGFNYRFNSFYRDQPHPFITSMVRALDEAMNKLQRANPDDPAYDENKRQFQEDIKVMNDLVDKIIADRKASGEQSDDLLTHMLNGKDPETGEPLDDENIRYQIITFLIAGHETTSGLLSFALYFLVKNPHVLQKAAEEAARVLVDPVPSYKQVKQLKYVGMVLNEALRLWPTAPAFSLYAKEDTVLGGEYPLEKGDELMVLIPQLHRDKTIWGDDVEEFRPERFENPSAIPQHAFKPFGNGQRACIGQQFALHEATLVLGMMLKHFDFEDHTNYELDIKETLTLKPEGFVVKAKSKKIPLGGI

SEQ ID NO: 41020 - protein, 487 aa, Deinococcus radiodurans R1
MTTTDLRTTYSSVTRSQAYFDGEWRNAPRNFEVRHPGNGEVIGEVADCTPTDARQAIDAAEVALREWRQVNPYERGKILRRWHDLMFEHKEELAQLMTLEMGKPISETRGEVHYAASFIEWCAEEAGRIAGERINLRFPHKRGLTISEPVGIVYAVTPWNFPAGMITRKAAPALAAGCVMILKPAELSPMTALYLTELWLKAGGPANTFQVLPTNDASALTQPFMNDSRVRKLTFTGSTEVGRLLYQQAAGTIKRVSLELGGHAPFLVFDDADLERAASEVVASKFRNSGQTCVCTNRVYVQRGVAEEFIRLLTEKTAALQLGDPFDEATQVGPVVEQAGLDKVQRQVQDALTKGAQATTGGQVSSGLFFQPTVLVDVAPDSLILREETFGPVAPVTIFDTEEEGLRLANDSEYGLAAYAYTRDLGRAFRIAEGLEYGIVGINDGLPSSAAPHVPFGGMKNSGVGREGGHWGLEEYLETKFVSLGLS

SEQ ID NO: 41021 - protein, 532 aa, Bacillus halodurans C-125
MTTKYIFVTGGVVSSLGKGITAASLGRLLKNRGMKVTIQKFDPYINVDPGTMSPYQHGEVFVTDDGAETDLDLGHYERFIDINLNKNSNVTTGKIYSSVLKKERRGDYLGGTVQVIPHVTNEIKERVFRAGRETNADVVITEIGGTVGDIESLPFLEAIRQIKSDIGVDNVMYIHCTLIPYLAAAGEMKSKPTQHSVKELRSLGIQPNVIVVRTEKPVPEEMKEKIALFCDIRKDSVIEARDADTLYEVPLDLQAQNLDEIVCDHLNLSCQEADMTEWKSLVEKVKNLSGLVKIALVGKYVALPDAYLSVAEALRHAGYAFDADINIKWVDSEDVTAENVAEQLQGVDGILVPGGFGDRGIEGKIEAIRYAREQKIPFLGICLGMQLASIEFARNVLGLEGAHSAEINPDTPHPIIDLLPEQKDVEDMGGTLRLGLYPCKLKNGTLAQSAYNDQVIYERHRHRYEFNNQYREQMEAKGFMFSGTSPDGRLVEIVELGDHPFFIASQFHPEFVSRPTRPQPLFREFIQASLRK

SEQ ID NO: 41022 - protein, 308 aa, Zea mays
MAASAGGGAVRALSQKEQDIQMMLAADVHLGTKNCDFQMERYVFKRRTDGIYIINLGKTWDKLQLAARVIVAIENPQDIIVQSARPYGQRAVLKFAQYTGAHAIAGRHTPGTFTNQLQTSFSEPRLLILTDPRTDHQPIKESALGNIPTIAFCDTDSPMRYVDIGIPANNKGRNSIGCLFWLLARMVLQMRGTILPGHKWEVMVDLFFYRDPEEAKEQEEEAAAAPEFAAVTDYQGADQWGGDQWTSDVAAPPVAPTGADWGAAPASVPTGDGWDQTVAPVPVDGTVPPVVAPTGWESAAQPTAQGWE

SEQ ID NO: 41023 - protein, 298 aa, Shigella flexneri 2a str. 301
MIRVACVGITVMDRIYYVEGLPTESGKYVARNYTEVGGGPAATAAVAAARLGAQVDFIGRVGDDDAGNSLLAELESWGVNTRYTKRYNQAKSSQSAIMVDTKGERIIINYPSPDLLPDAEWLEEIDFSQWDVVLADVRWHDGAKKAFTLARQAGVMTVLDGDITPQDISELVALSDHAAFSEPGLARLTGVKEMASALKQAQTLTNGHVYVTQGSAGCDWLENGGRQHQPAFKVDVVDTTGAGDVFHGALAVALATSGDLAESVRFASGVAALKCTRPGGRAGIPDCDQTRSFLSLFV

SEQ ID NO: 41024 - protein, 162 aa, Cichorium intybus
VQQLESSRMKLSQLEQELQRARQQGIFISSSGEQSQSTSGNGASSFHVEYSRWLEEQNRRISELREAVSSHAADGELRLIVDGVITHYEDIFRIKNDAAKADVFHILSGMWKTPAERCFLWLGGFRSSELLKLLITQLEPLTEQQLLAINNLQQTSQQAEDA

SEQ ID NO: 41025 - protein, 320 aa, Dechloromonas aromatica RCB
MNAFPTAVDPLRLYEQLLLIRAYENAIVRGSTDGRIPGTCTSVGQEAAAVGAINALEADDLILTNHRSAGHLLARGADPGRMLAEVMGRRDGYCKGRSGSLHISAKELGVVLTTTIVGGELSLAPGVALAQTMQGRPGIVACFFGDGAACEGSFHESLNLAALWNLPVLYICENNQWQAFVHRREAMSSEHVSDWGAGYGIPARTVDGNDVFAVLEATREAATQVRDTRRPVLLEVLTYRTRGHFEPDDQGYVDKAELAAWLARDPIALCRDRLIADGHLDVAADAELAARVEASIAAAVAFAAASPFPSIEELTLDVYA

SEQ ID NO: 41026 - protein, 180 aa, Cichorium intybus
NREAARKSRLRKKAYVQQLEASRLKLLHLEQELEQTKAQAALLSGGVNASHLGLPGTTNSGIAAFEMEYEHWVEEQNKKTNALKTALHAPLPDTELDVLVKDTLNHYANLFTIKATAAKVDVCYLISGMWKTSTERLFLWIGRFRPSELLKVLVPQLKLLDQQSHDLCNLIQACQQAEDA

SEQ ID NO: 41027 - protein, 138 aa, Saccharomyces cerevisiae
MANDLVQARDNSQVFGVARIYASFNDTFVHVTDLSGKETIARVTGGMKVKADRDESSPYAAMLAAQDVAAKCKEVGITAVHVKIRATGGTRTKTPGPGGQAALRALARSGLRIGRIEDVTPVPSDSTRKKGGRRGRRL

SEQ ID NO: 41028 - protein, 452 aa, Coxiella burnetii RSA 493
MNTSTPQIIKNVVNLALPMAGSRLIQMLSGFIGMLMLARLGHSILAASMLMTSTQVTIIVIFISLLFSMSVVVGQAYGAKKYDEVGVILQQGCILALILSIPLIILFLVADRILLALGQLPELVIYVKHYFRALIWGTPGFVLLAALQQALYGMSRQRIVILANLFCLGVFVLSAYVLVFGHLGISAQGVTGVPYAFAIQAYLNIIILLFCFYYQKQFKPMGIFKWRSHQRWRYLKQLFQIGWPMCMQFGGELMAFFVISIMIGWLGKNELAAAQVTQQCLFLFVVPMFAVAEATGIMVSHAVGGKQYQSVKRIGEISLIIAMILVSVAALIFLAFPEFLASLYIDVKAPQYTHMIHLIKILFILVAFSITFDTLRNVASGALRGFYDTRFAMWAGLGAMWIISVPGGYLLGVVFHYGVIGFRIASAFAFLIGALLVLWRWRERVKEYSQLP

SEQ ID NO: 41029 - protein, 400 aa, Dechloromonas aromatica RCB
METYQSSSNVLFVLLGAIMVLAMHAGFAFLEVGTVRKKNQVNALVKILSDFGVSTVAYFFVGYTIAYGVNFFSGVETLLQKSGFELTKFFFLLTFAAAIPAIISGGIAERAKFHPQLIATFLLVGFVYPFFEGIAWNQAFGIQAWLKASFGEEFHDFAGSVVVHAMGGWIALPAVLLLGARYGRYNKDGRISAHPPSSIPFLALGAWILIVGWFGFNVMSAQTLDKISGLVALNSLMAMVGGTLVALVAGKNDPGFLHNGPLAGLVAVCAGSDLMHPIGALVVGGVAGGLFVVMFTLVQNRWKIDDVLGVWPLHGMCGAWGGIAAGIFGSKAFGGAGGIAFMPQLIMTLMAIAVALVGGTLVYGALKATLGLRLDKEEEYEGADLSIHRITATPEREPNW

SEQ ID NO: 41030 - protein, 859 aa, Arabidopsis thaliana
MASSEVSMKGNRGGDNFSSSGFSDPKETRNVSVAGEGQKSNSTRSAAAERALDPEAALYRELWHACAGPLVTVPRQDDRVFYFPQGHIEQVEASTNQAAEQQMPLYDLPSKLLCRVINVDLKAEADTDEVYAQITLLPEANQDENAIEKEAPLPPPPRFQVHSFCKTLTASDTSTHGGFSVLRRHADECLPPLDMSRQPPTQELVAKDLHANEWRFRHIFRGQPRRHLLQSGWSVFVSSKRLVAGDAFIFLRGENGELRVGVRRAMRQQGNVPSSVISSHSMHLGVLATAWHAISTGTMFTVYYKPRTSPSEFIVPFDQYMESVKNNYSIGMRFKMRFEGEEAPEQRFTGTIVGIEESDPTRWPKSKWRSLKVRWDETSSIPRPDRVSPWKVEPALAPPALSPVPMPRPKRPRSNIAPSSPDSSMLTREGTTKANMDPLPASGLSRVLQGQEYSTLRTKHTESVECDAPENSVVWQSSADDDKVDVVSGSRRYGSENWMSSARHEPTYTDLLSGFGTNIDPSHGQRIPFYDHSSSPSMPAKRILSDSEGKFDYLANQWQMIHSGLSLKLHESPKVPAATDASLQGRCNVKYSEYPVLNGLSTENAGGNWPIRPRALNYYEEVVNAQAQAQAREQVTKQPFTIQEETAKSREGNCRLFGIPLTNNMNGTDSTMSQRNNLNDAAGLTQIASPKVQDLSDQSKGSKSTNDHREQGRPFQTNNPHPKDAQTKTNSSRSCTKVHKQGIALGRSVDLSKFQNYEELVAELDRLFEFNGELMAPKKDWLIVYTDEENDMMLVGDDPWQEFCCMVRKIFIYTKEEVRKMNPGTVSCRSEEEAVVGEGSDAKDAKSASNPSLSSAGNS

SEQ ID NO: 41031 - protein, 147 aa, Helianthus tuberosus
MAASDIGVQAGPWGGNGGKRWLQTAHGGKITAIIIKGGTCIFSIQFVYKDKDNIEYLSGQFGVQGDKAETITFADDEDITGISGTFGAYYQMTVVTSLTFQTNKKVYGPFGTVAGSRFSLPLTKGKFAGFFGNSGDVLDSIGGVVVP

SEQ ID NO: 41032 - protein, 475 aa, Cucurbita maxima
MKMLSTKATCNSHGQDSSYFLGWEAYENNPFHHTSNPNGIIQMGLAENQLSFDLLESWLSKNPDAASFKRDGKSIFRELALFQDYHGLPAFKKALVEFMAEIRGNKVSFEANNIVLTAGATSANETLMFCLAEAGDAFLLPTPYYPGFDRDLKWRTGVEIVPIHCTSSNGFQITQSALEQAYKDAQTRNLRVKGVLVTNPSNPLGTTMNRDELNLVFDFITSKGIHLISDEIYSGTVFGSPGFVSAMEVLKERSSEDEEVWKRVHIVYSLSKDLGLPGFRVGAIYSNDDMVVAAATKMSSFGLVSSQTQYLLSAMLSDKKFTISYISENQKRLKQRQKMLVSGLQKAGINCLDSNAGLFCWVDMRHLLESDKFESELELWKKIVYEVGLNISPGSSCHCTEPGWFRVCFANMSESTLKLAVRRLKSFVTELRSTTTSNHRNHDNKICKNIKKNIFTKWVFRQSAQEANRKMQAER

SEQ ID NO: 41033 - protein, 129 aa, Petunia axillaris
MSTSNASTSGVRKGAWTEEEDLLLRECIEKYGEGKWHLVPVRAGLNRCRKSCRLRWLNYVRPHIKRGDFSLDEVELILRLHKLLGNKWSLIAGRLPGRTANNVKNYWNTHLRKKLIVPHDQKQESKTKP

SEQ ID NO: 41034 - protein, 234 aa, Glycine max
KLIGRGTFGSVFHATNIETGASWARRPPPLIHDDPTSAECIKQLEQEIKILRQLHHPNIVQYYGSETVGDHLYIYMEYVYPGSISKFMREHCGAMTESVVCNFTRHILSGLAYLHSNKTIHRDIKGANLLVNESGTVKLADFGLAKILMGNSYDLSFKGSPYWMAPEVVKGSIKNESNPDVVMAIDIWSLGCTILEMLTGKPPWSEVEGPSAMFKVLQESPPIPETLSSVGKDF

SEQ ID NO: 41035 - protein, 120 aa, Petunia axillaris
MSTSNASTSGVRKGAWTEEEDLLLRECIEKYGEGKWHLVPVRAGLNRCRKSCRLRRLNYLRPHIKRGDFSLDEVDLILRLHKLLGNRWSLIAGRLPGRTANDVKNYWNTDLRKKLIAPHD

SEQ ID NO: 41036 - protein, 103 aa, Brassica napus
MASILNQTQELQQSSKVLGHVRCESYFLFSGESNLSDALRAVLYFLGLAYCFIGLSAITARFFKSMENVVKHSRKVVSVDPVTKAQVITYKKVWNFTIADISL

SEQ ID NO: 41037 - protein, 195 aa, Zea mays
KRSEAMSMSKTGQAAEKDEQQQSRGIALMQGICAVVYRKADNTPCPIKQGLYLGSVGAAFNKDALKSLNITHILIVAKSLDPVFPAEFNYKKIEVLDIPDTDLLKHSDECFGFIDEAISSGGNVLVHCFAGRSRSVTIVVAYLMKKHQMSLESALSLVRSKRPQVAPNGGFISQLEKFQKSLQVEQEWRMQPVQH

SEQ ID NO: 41038 - protein, 332 aa, Dehalococcoides ethenogenes 195
MAVIYYDKDCDLSLIEKKIIGIVGYGAQGHAHAQNLRDSGLKVIVACVEGGRGWKKATADGFEVMCVAEMAKKADIIMMLAPDTSQAKIYKDSVEQGLTPGKMLMFAHGFNIHYGQIVPPSFVDVTMIAPKCPGYMLRQVFTEGAGAPSLIAVEQDASGKAKEIALAYAKGIGSNRAGVLETTFAEETETDLFGEQAVLCGGTTSLVKAGFETLVEAGYQPEVAYFECLHELKLIVDLMYQGGIAYMRDSISDTAKYGDFTRGPRVINEETYETMGEILGEIQDGSFAKEWILENQAGRPVYNSLRRMESEHLIEEVGAELRSMMSWLKKKK

SEQ ID NO: 41039 - protein, 189 aa, Oryza sativa (japonica cultivar-group)
MADAGHDESGSPPRSGGVREQDRFLPIANISRIMKKAVPANGKIAKDAKETLQECVSEFISFVTSEASDKCQKEKRKTINGEDLLFAMGTLGFEEYVDPLKIYLHKYREMEGDSKLSSKAGDGSVKKDTIGPHSGASSSSAQGMVGAYTQGMGYMQPQSNFHILVVLQSFAFPYMYQVAQIYCKYPSIE

SEQ ID NO: 41040 - protein, 370 aa, Drosanthemum paxianum
SDSGKDAGRLSAAWQMYKVQEELVKVSKQFGVKLTMFHGRGGTVGRGGGPTHLAILSQPPETIHGSLRVTVQGEVIEQSFGEQNLCFRTLQRYTAATLEHGMNPPKSPKPEWRALLDQMAVVATEEYRSIVFKEPRFVEYFRLATPETEYGRMNIGSRPSKRKPSGGIESLRAIPWIFAWTQTRFHLPVWLGVGAAFRHVLEKDIRNHNMLRDMYNNFPFFRVTIDLLEMVFAKGDPEIAALYDKLLVSEDLQPFGARLRANYEDTKRRLLEVAGHRDLLEGDPYLKQRLRLRDPYITTLNVCQAYTLKRIRDPDFQVTERPHLSKEIMDMNKAAAELVKLNPTSEYAPGLEDTLILTMKGIAAGMQNTG

SEQ ID NO: 41041 - protein, 503 aa, Neisseria meningitidis Z2491
MKWLKRLTVIVGTFYRYRLAGLCASLMGSGWICALLKMMPQSSKLKNEPPAVRLRLALESLGPIFIKFGQVLSTRPDLIPHDYAVELAKLQDKVPPFDARLSREQIEKSLGQSIEKLYAEFETEPIASASIAQVHKARLHSGERVAVKVLRPNLLPLIEQDLSLMRFGAAWVERLFSDGRRLKPLEVVAEFDKYLHDELDLMREAANAGQLGRNFHNSNMLIVPKVFYDYCTSDVLTIEWMDGTPVADIAKLKADGIDLHKLADYGVEIFFTQVFRDGFFHADMHPGNILVAADNRYIALDFGIVGTLTDYDKRYLAINFLAFFNRDYRRVATAHIESGWVPADTRAEELEAAVRAVCEPVFNKPISQISFGLVLMRLFEVSRRFNVEIQPQLVLLQKTLLNIEGLGRQLDPDLDLWKTAKPFLVKWMNGQVGPKALWRNLKNEAPDWAQIIPSLPRKISALIDENRQQEMRDAYIHLVKVQQRQSLWLAVIAVVLLLILLLK

SEQ ID NO: 41042 - protein, 163 aa, Helianthus annuus
MSIIPNFFGRRRTNCFDPFSLDVWDPFEGFPFNNNNFGSLSDQVRSSSETSSFVNANVDWRETNDAHVFKADVPGLKKEEVKVEVEDDRVLQISGERNKESEEKGDTWHRVERSSGKFVRRFRLPENAKVDQVKAAMENGVLTVTVPKVEVKKPDVKSIQISG

SEQ ID NO: 41043 - protein, 472 aa, Zea mays
MAFYRGLTAVSRLRSRMAQEATTLGGVRWLQMQSASDLDLKSQLQELIPEQQDRLKKLKSEHGKTQLGNITVDMVLGGMRGMTGMLWETSLLDPEEGIRFRGLSIPECQKVLPTAVKGGEPLPEGLLWLLLTGKVPTKEQVDALSKELLARSTVPAHVYKTIDALPVDAHPMTQFTTGVMALQVESEFQKAYDNGLPKSKFWEPTYEDCLNLIARLPPVASYVYRRIFKSGKSIEADNSLDYAANFSHMLGFDDQKMLELMRLYVTIHTDHEGGNVSAHTGHLVGSALSDPYLSFAAALNGLAGPLHGLANQEVLLWIKSVIEETGSGVTTDQLKDYVWKTLKSGKVVPGFGHGVLRKTDPRYSCQREFALKHLPEDPLFQLVSKLYEVVPPILTELGKVKNPWPNVDAHSGVLLNHFGLSEARYYTVLFGVSRSMGIGSQLIWDRALGLPLERPKSVTMEWLENYCKNKAA

SEQ ID NO: 41044 - protein, 645 aa, Pseudomonas syringae pv. syringae B728a
MGQTRFATGRQLDLICLGRLGVDLYAQQVGALLEDVSSFAKYLGGSSANIAFGTARLGLRSAMLSRVGDDHMGRFLVESLAREGCDVSAIKRDPERLTAMVLLGLKDRETFPLVFYRENCADMALRAEDIDEQQIASSKALLITGTHFSTDQVFKASSQALDYAKKHDVKRVLDIDYRPVLWGLAGKADGETRFVADQKVSQHVQRILPRFDLIVGTEEEFQIAGGATDLLAALRRVRELTAATLVVKLGPQGCTVIHGAIPARLEEGAIYPGVQVEVLNVLGAGDAFMSGFLSGWLKEASDERCCQLANACGGLVVSRHACAPAMPTPAELDYLFNSPQPITRPDQDVALQRLHQVSVPRKQWRQLFIFAFDHRGQLVELAQQAGRDLGSISQLKQLFVQAVERVEADLRKRGIEADVGLLADQRFGQDSLNAATGRGWWVARPVEVQGSRPLAFEHGRSIGSNLLAWPQEQIIKCLVQYHPDDEPMLRLEQEAQIKALYDASKVSGHELLLEIIPPKDHPSPHPDVMLRSLKRLYNLGIYPAWWKIEAQSAQVWQQLDELIQQRDPYCRGVVLLGLNAPVEDLAAGFAEARHSRVCQGFAVGRTIFREPSRAWMAGEIDDATLISRVQSTFNWLIESWRESRA

SEQ ID NO: 41045 - protein, 368 aa, Dicranum scoparium
SDSGKDAGRLSAAWQMFKAQEDLVKVAKQYGVRLTMFHGRGGTVGRGGGPTHLAILSQPPDTINGSLRVTIQGEVIEQSFGEQHLCFRTLQRFTAATLEHGMHPPIAPKPEWREIMDVMAVASTKEYRSIVFQNPKFVEYFRAATPELEYGRMNIGSRPSKRKPNGGIESLRAIPWIFAWTQTRFHLPVWLGLGSALREALETDPRNIAILRRMYNQWPFFRVTIDLVEMVFAKGDPRIAALYDNLLVSDELKPLGEELRRKYSETRDLLLRVAGHEDILQGNPTLKQRLRLREPYVTALNVQQALVLKKMRDQSTQFCALQNGSEVKSPKRAAELVELNPTTEFPPGLEDTLILTMKGIAAGMQNTG

SEQ ID NO: 41046 - protein, 486 aa, Saccharomyces cerevisiae
MVQSAVLGFPRIGPNRELKKATEGYWNGKITVDELFKVGKDLRTQNWKLQKEAGVDIIPSNDFSFYDQVLDFVFVVQCHSDRYTKYDLSPIDTLFAMGRGLQRKATETEKAVDVTALEMVKWFDSNYHYVRPTFSKTTQFKLNGQKPVDEFLEAKELGIHTRPVLLGPVSYLFLGKADKDSLDLEPLSLLEQLLPLYTEILSKLASAGATEVQIDEPVLVLDLPANAQAAIKKAYTYFGEQSNLPKITLATYFGTVVPNLDAIKGLPVAALHVDFVRAPEQFDEVVAAIGNKQTLSVGIVDGRNIWKNDFKKSSAIVNKAIEKLGADRVVVATSSSLLHTPVDLNNETKLDAEIKGFFSFATQKLDEVVVITKNVSGQDVAAALEANAKSVESRGKSKFIHDAAVKARVASIDEKMSTRAAPFEQRLPEQQKVFNLPLFPTTTIGSFPQTKDIRINRNKFNKGTISAEEYEKFINSEIEKVIRFQE

SEQ ID NO: 41047 - protein, 541 aa, Kluyveromyces lactis NRRL Y-1140
MNQESEYLCDSMDRPRYDTINDNTRYESDGESASSGDAIDNRYRLMSPDADRDDFIDEDFIEDLTAPTSSRNEVSYILSNSALITLTFLMEYSLAIISLFVIGHVCKSSDALASASLAVMTYNITGLAFVEGMATSLDTFCSQAYGAKKYAKVGLYSFRCAAMIMTGIFPVIISWWFSASWLGYVIAEQDILPEIQLFLRIISFGLPGLIFFETGKRFLQSQGHFQAGTYSLLITVPVNIILVYSFTRYIGYAGAPLGIAISHWFMALMLLVYCKFWRKETLICWYPMFSSMFHFKRLFCSWKPMWNLAFPGLLMIEAEYLSFEVLTIMSTYLGVKAIAAQSVVSNIGSLIYQIPFAMGCVVSTRVANYVGTESVNNAKICINTSYVIAAFVGIANCCLILTGDKNLAYLFTKDKEVVELYRHVAPILAVNQLYDAFTTFSAAILRAQGRQQVGSLLNIIAYYFIALPLSGWLTFGKFQLGLKGLWYGCGTGILLLAFALSYCVFNSNWENIVEECHRREKEENEVDLESMASNMSNIIDV

SEQ ID NO: 41048 - protein, 156 aa, Helianthus annuus
MSIIPSFFTGNGSNIFDPFSSEIWDPFQGLSSVINNLPESSRETTAIANTRIDWKETPEAHVFKADLPGLKKEEVKVEVEEGRVLQISGERSRENVEKNDKWHRMERSSGKFLRRFRLPENAKMDQVKAAMENGVLTVTVPKAEVKKPEVKAIDIS

SEQ ID NO: 41049 - protein, 708 aa, Neurospora crassa
MEGIKQTFQRCKAQNRAALVTYVTAGFPHPEQTPDILLAMEKGGADVIELGVPFTDPIADGPTIQTANTIALQHGVTLQSTLQMVRDARQRGLKAPVMLMGYYNPLLSYGEERLLNDCKEAGVNGFIIVDLPPEEAVSFRQLCTRGGLSYVPLIAPATSDARMRVLCQLADSFIYVVSRQGVTGASGTLNANLPELLARVKKYSGNKPAAVGFGVSTHDHFTQVGAIADGVVVGSMIITTIQKAAKGEEVKAVQEYCSYLCGRNFEQSAHELNMGEALEAAKEPVGTATVDGVITEADIDAQLAALHGTIPKRFGEFGGQYVPEALMDCLSELEEGFNKIKDDPAFWEEYRSYYPWMGRPGQLHKAERLTEYAGGANIWLKREDLNHTGSHKINNALGQLLLARRLGKKKIIAETGAGQHGVATATVCAKFGMECTVFMGAEDVRRQALNVFRMKLLGAKVVAVEAGSRTLRDAVNEALRYWVVNLADTHYIIGSAIGPHPFPTIVRTFQSVIGNETKQQMLEKRGKLPDAVVACVGGGSNAVGMFYPFSNDPSVKLLGVEAGGDGVDTPRHSATLTAGSKGVLHGVRTYILQNQYGQIEDTHSISAGLDYPGVGPELSNWKDTERAKFVAATDAQAFEGFRLMSQLEGIIPALESSHGIWGALELAKTMKPDEDVVICLSGRGDKDVQSVADELPIIGPKIGWDLRF

SEQ ID NO: 41050 - protein, 364 aa, Dendrobium loddigesii
SDSGKDAGRLSAAWQLYKTQEELVKVAKEYGVKLTMFHGRGGTVGRGGGPTHLAILSQPPDTILGSLRVTVQGEVIEQSFGEENLCFRTLQRFTTATLEHGMQLPISPKPEWRALMDEMAVVATNEYRSIVFQEKRFVEYFRLATPELEYGRMNIGSRPSKRKPSGGIESLRAIPWIFAWTQTRFHLPVWLGFGVAFKHVIEKDKNNLNILREMYNEWPFFRVTIDLIEMVFTKGSTGIAALYDKLLVSTDLLPFGEQLRANYEETKRLLLQVAGHKDLLEGDPSLKQRLRLRYPYITTLNVWQAYTLKRMRDPSYHPTAKPNLSNKIMNSSKPAAELVKLNPTSEYAPGLEDTLILTMKGIAA

SEQ ID NO: 41051 - protein, 245 aa, Hordeum vulgare
MAMRAISLCLILGLLAAAAPASATSFDFYYLILMWPGAYCADSDYGCCVPKYGYPAEDFFVEGFMTFDLSLNKAIVRCNSDKPFDVNKLEPIENNLNHYWSNIHCPRNDGTGTWKSEWRSYGVCSGLKLVDYFRAALNLRKKADVLGALAEQGINPDYRLYNTEHIKWAVNQKLGVMPGVQCRDGPFGKKQLYQIYLCVDKDGQIFIDCPKLPKLHCPEEVLFHPFHTWMLNATSPAKITLPTEA

SEQ ID NO: 41052 - protein, 364 aa, Dendrobium thyrsiflorum
SDSGKDAGRLSAAWQLYKTQEELVKVAKEYGVKLTMFHGRGGTVGRGGGPTHLAILSQPPDTILGSLRVTVQGEVIEQSFGEEHLCFRTLQRFTTATLEHGMQLPISPKPEWRALMDEMAVVATNEYRSIVFQESRFVEYFRLATPELEYGRMNIGSRPPKRKPSGGIESLRAIPWIFAWTQTRFHLPVWLGFGAAFKHVIEKDKKNLNLLREMYNEWPFFKVTIDLIEMGFTKGSPGIAALYDKLVGSTDLLPFGEQLRANYEETKRLLLQVAGHKDLLEGDPYLKQRLRLRYPYITTLNVWQAYTLKRIRDPSYHLNAKPNQSNEIMNSNKPAAELVKLNPTSEYAPGLEDTLILTMKGIAA

SEQ ID NO: 41053 - protein, 485 aa, Betula pendula
MGFMNSNAKHLLSKIATGNGHGENSPYFDGWKAFESNPFHPTKNPQGVIQMGLAENQLCFDLVQEWILKNPQASICTPEGVYDFSEIAVFQDYHGLPEFRNAVAKFMAKVRGNRVRFDPDRIVMSGGATGAHETIAFCLADPGEAFLVPTPYYPGFDRDLRWRTGVQLLPVTCESPNNFKVTRKALEAAYESAQEKNIRVKGLLITNPSNPLGTILDKQTLRELVSFINEKSIHLICDEIYAATVFSQPDFVSISEVIEEEKEIACNRDLIHIVYSLSKDMGFPGFRVGIIYSYNDAVVQCCRKMSSFGLVSSQTQHLLASMLSDDVFVDRFIAESSKRLEKRYQDFTFPLAQVGINCLKSNAGLFLWMDLRHLLKNQTPEAEMELWKVIIDEVKLNVSPGDSFHCSEPGWFRVCLAQKGQSRRRVALTRIRTFVHQNKEVKNRLKRKCWNSNLRLSFSSLRVDHDNMMSPHSPMAQSPLVRAMN

SEQ ID NO: 41054 - protein, 114 aa, Zea mays
VVLNEYERWNVGAHTGHLVGNALSNPYLSFATALNGLTGPLRCLAKQEVLAWIISVIEETVSGVTTHELKDEVRTTLNSGKVVPAFGHGVLRQTDTPYSCQSEFASKHLPMGSL

SEQ ID NO: 41055 - protein, 192 aa, Deinococcus radiodurans R1
MSASPSLPASQGPLPQGERVNKAGRVVWFTGLSGAGKSTLATALFEELSARGEAVELLDGDAVRENLSKGLGFSREDRDTNVRRIAFVAGLLAKHGVTVLVSAISPYADTRREVLASLPNALEVFVDAPLEVVTERDVKGLYLKALAGEIPHFTGVSDPYEAPENPDLHLRTDRISVEDGVQQLLGRLSDDR

SEQ ID NO: 41056 - protein, 367 aa, Betula pendula
QMGLAENQLCFDLIEEWIKKNPKASICTAQGVNELKNIAIFQDYHGLPEFRQAVANFMGRVRGGRVRFDPDRIVMSGGATGANELITFCLADPGDVFLVPSPYYPAFDRDMGWRTGVQILPVHCDSSNGFLITKAALEAAYEKAQEENIKIKGLLIANPSNPLGTVLDRETLTSVVSFVNEKNIHLVCDEIYSATVFGSATFTSISEIIEEVEYCNRDLIHIVYSLSKDMGLPGFRVGIVYSYNDAVVSCGRKVSSFGLVSSQTQHLLASLLSDEEFVGKYLSESSKRLAKRHDMFTKGLEKAGISCLKSNAGLFVWMDLRWLLEKQTFEEELVLWRVIINQVKLNVSPGTSFHCSEPGWFRVCFAA

SEQ ID NO: 41057 - protein, 740 aa, Pleurotus ostreatus
MSSVTAAAKQAVSSITDNAKMASLTQFRVECGPSQRMTTDQGLHVADTDNCNSNVGPALLEDHIAREKIMRFDHERIPERVVHARGAGAHGYFKAYDSSAEQWTKAKVLMDPSRTTPVFVRFSTVQGSRGSADTVRDVRGFAVKFYTEEGNWDIVGNNIPVFFIQDAIKFPDIIHAVKPEPHNEVPTGQSAHNNFWDFVGLQPESAHMIMWVMSDRAIPRSYRMMQGFGVNTYTLLNATGEKHFVKFHWIPELGVHSLVWDEALKIAGQDPDFHRKDLNEAIESGAYPKWRLALQVISEKDEHNFDFDILDATKIWPEELVPLHFVGEMVLNKVVDEYFAEVEQVAFCTSNIVPGIGFSDDPLLQGRNFSYLDTQLSRLGINWQQIPINRPVCPVMNFQRDGQMQMKIHKGTVNYWPNRQEAVQPVAVSEGGYDDHVRKISGIAQRMRGPKFNEHYSQAQLFYNSLSPTEQTHLQSALAFELSHCEDPAVYRNYINILNNIDYQLAKYVAVAVGGDVPDASAKPNEGNKSARLSQVYYAPKEPTIKGRRIAILLADGFDKAEVVAIKALITSASANAFVIGPRRGKVYAAGEKIGVEGGGIDADHHFEGQRSTMFDALVIPSGEHVALLMKSGRAVHWLREAFGHCKAIGAVGEAILFVQQAINLPEVQYADPTDSSMEVVASYSVVTTAHYGVSTAIGDATKMTLNIGEKGFMERFAYEVSKHRCFKREEDGLTARIAY

SEQ ID NO: 41058 - protein, 637 aa, Pseudomonas putida KT2440
MSVRRTRKDDGSQWTVADSRSVYGIRHWGAGYFAINEAGRVEVRPNGPQSAPIDLFEQVDELRQSGLSLPLLVRFPDILQDRVRQLTGAFDANIARLEYQSQYTALYPIKVNQQEAVVENIIATQNVSIGLEAGSKPELLAVLALAPKGGTIVCNGYKDREFIRLALMGQKLGHNVFIVIEKESEVALVIEEAAELKVKPQVGLRVRLSSLASSKWADTGGEKSKFGLSAAQLLSVVQRFRDAGLDQGIRLLHFHMGSQIANLADYQHGFKEAIRYYGELRALGLPVDHIDVGGGLGVDYDGTHSRNASSINYDMDDYAGVVVGMLKEFCDAQGLPHPHIFSESGRSLTAHHAMLVIQVTDVEKHNDDVPTIENKEALPETVQWLVDLLGPTDIEMVTETYWRATHYMGDVAAQYADGKLSLGEKALAEQCYFAVCRRLHNSLKARQRSHRQVLDELNDKLADKYICNFSVFQSLPDTWAIGQVLPIIPLHRLDEEPMRRAVLQDLTCDSDGKINQYVDEQSIETSMPVHAVKEGEDYLLGVFLVGAYQEILGDMHNLFGDTDSVNIYQNADGSVYHAGIETHDTIEDMLRYVHLSPEELMTHYRDKVASAKITARERTQYLDALRLGLTRSSYLSS

SEQ ID NO: 41059 - protein, 368 aa, Betula pendula
QMGLAENQVSFDLLEEYLEKHSEASTWGKGASGFRENALFQDYHGLLSFRKAMASFMEQIRGDRVKFDPERVVLTAGATAANELLTFILADPGDALLVPTPYYPGFDRDLRWRTGVKIVPIHCESSNNFQITPKALEDAYNNAEAMNIKVRGVLITNPSNPLGATIQRSVLEEILDFVTRKNIHLVSDEIYSGSVFSSSEFISVAEILEAREYRKEYSERVHIVYSLSKDLGLPGFRVGTIYSYNDDVVKTARRMSSFTLISSQTQHLLASMLSNKKFTENYIQINRERLRKRYEMIIEGLRSAGIECLKGNAGLFCWMNLSPLLDEPTREGELVVWDSMLHEVKLNISPGSSCHCSEPGWFRVCFAA

SEQ ID NO: 41060 - protein, 108 aa, Brassica napus
  misc_feature (10)..(10): Xaa can be any naturally occurring amino acid
  misc_feature (25)..(26): Xaa can be any naturally occurring amino acid
  unsure (1)..(108): unsure at all Xaa locations
VAFQVNYFPXSRLNPVRHADKLPKXXCFCSGNREKCMIEKENSRPPPPERYRSWDADRQERFVKRFVEALAEPRVTHEIRSIWISYWTQADKSLGQKLASRLNVRPKY

SEQ ID NO: 41061 - protein, 368 aa, Arxula adeninivorans
MAAQVEEQVLNLRAQADHNPSFVLKKPLELGFEERPVPVITDPRDVKIQVKKTGICGSDVHFWQHGRIGDYVVEKPMVLGHESSGVVVEVGSEVTSLKVGDRVAMEPGVPDRRSKEYKMGRYHLCPHVRFAACPPTDGTLCKYYTLPEDFCVKLPENVDFEEGALVEPLSVAVHTARLLGIYPGSKVVVFGAGPIGQLCIGVCKAFGASIIGAVDLFEQKLETAKEFGASHTYVPQKGDSHDETAHKILELLPNKQAPDVVIDASGAEQSINAGIELLERGGTFGQVAMGRTDYIQFAVSRMAMKEIRFQGVFRYTYGDYELATQLIGDGKIPVKKLVTHRRPFEKAEEAYELVKSGVAVKCIIDGPE

SEQ ID NO: 41062 - protein, 744 aa, Calothrix viguieri
MTETSPKPIVTTAAFPANEVERLEALRRYNILDTPPEVAFDRITSLAARLFNVPITLVSLVDESRGWFKSSYGFEMREVRRDTTICSFALLSDEVLVIPDTREDSRLVCNPFVQNEPGLRFYAGAPLLTQDGFNLGTLCLLDTKPRDGLSDEQKSVLSDLAAMVMDELELRLAARKVAQMDTALLEVTQGVSTATGEAFFSALVQHMLKVLGVDYVYIGLVDPDNQEIIRTIAACAKGQIIGNFEYLLHDTPCEQVLQKRKLCCYPHRVQALFPKAPLLEPLGVESYVAVPFFDTTGIPLGLLGVMDGNALTNIQLAESLLTIFALRIATELERQQTEAARQQAQYELERLVEQRTTELSKANELLKVLLDNVQAGIVACDAEGILTLFNQAARQFHGLPEQALPPEEWAKHYDLYLPDGKTRMSKNEIPLFRALQEQTVKNVEMVIAPKHGKVKTLLASGQAIVDNEGKKQGAVVVMHDITERKIAEAERIQLIRQQVQEQSARLKAEEANRLKDEFLAVLSHELRTPLNPILGWTKLLRAGKLDSAKTDYALETIERNAKLQTQLIGDLLDVSRILQGKLSLNMAAVNLAPTISAAIETVQLAAQAKSIQIETVFDPNVGQVLGDSTRLQQVVWNLLSNAVKFTKNGGRVEIRLECVDSQAEIKVSDTGKGISPDFLPHVFESFRQADATITRKFGGLGLGLAIVRHLVELHGGTIYAESPGEDLGATFTVRLPLIAVVKTC

SEQ ID NO: 41063 - protein, 389 aa, Digitalis laevigata
MSWWWAGAIGAARKKLEEDDAPPKHSSVALIVGVTGIIGNSLAEILPLADTPGGPWKVYGVARRTRPAWHEDNPINYVQCDISDPDDSQAKLSPLTDVTHVFYVTWANRSTEQENCEANSKMFRNVLDAVIPNCPNLKHISLQTGRKHYMGPFESYGKIESHDPPYTEDLPRLKYMNFYYDLEDIMLEEVEKKEGLTWSVHRPGNIFGFSPYSMMNLVGTLCVYAAICKHEGKVLRFTGCKAAWDGYSDCSDADLIAEHHIWAAVDPYAKNEAFNVSNGDVFKWKHFWKVLAEQFGVECGEYEEGVDLKLQDLMKGKEPVWEEIVRENGLTPTKLKDIGIWWFGDVILGNECFLDSMNKSKEHGFLGFRNSKNAFISWIDKAKAYKIVP

SEQ ID NO: 41064 - protein, 669 aa, Bacteroides thetaiotaomicron VPI-5482
MNDNKLMNRAADNIRILAASMVEKANSGHPGGAMGGADFVNVLFSEFLVYDPENPRWEGRDRFFLDPGHMSPMLYSTLALTGKFTLDELKEFRQWGSPTPGHPEVDIMRGIENTSGPLGQGHTFAVGAAIAAKFLKARFNEVMNQTIYAYISDGGIQEEISQGAGRIAGALGLDNLIMFYDSNDIQLSTETKDVTVEDTAMKYEAWGWNVLSINGNDPDEIRAAIKEAQTEKERPTLIIGKTVMGKGARKADGSSYEANCATHGAPLGGDAYVNTIKNLGGDPVNPFVIFPEVAELYAKRAAELKKIVAERYAKKAKWTKANPELAAKLEAFFSGKAPKVDWAAIEQKAGTATRAASATVLGALAMQVENMIVASADLSNSDKTDGFLKKTHSFKKGDFSGAFFQAGVSELSMACICIGMSLHGGVIAACGTFFVFSDYMKPAVRMAALMEQPVKFIWTHDAFRVGEDGPTHEPVEQEAQIRLMEKLKNHKGHNSMLVLRPADAEETTIAWKLAMENMSTPTGLIFSRQNIANLPAGTDYEQAAKGAYIVAGSDENPDVILVASGSEVSTLVAGTELLRKDGVKVRIVSAPSEGLFRSQSKEYQESVLPADAKIFGLTAGLPVTLQGLVGCHGKVWGLESFGFSAPYTVLDEKLGFTAENVYNQVKAMI

SEQ ID NO: 41065 - protein, 389 aa, Digitalis viridiflora
MSWWWAGAIGAAKKKLEEDDAPTKHSSVALIVGVTGIIGNSLAEILPLADTPGGPWKVYGVARRTRPAWHEDNPINYIQCDISDPDDSQAKLSPLTDVTHVFYVTWANRSTEQENCEANSKMFRNVLDAVIPNCPNLKHISLQTGRKHYMGPFESYGKIESHDPPYTEDLPRLKYMNFYYDLEDIILEEVEKKEGLTWSVHRPGNIFGFSPYSMMNLVGTLCVYAAICKHEGKVLRFTGCKAAWDGYSDCSDADLIAEHHIWAAVDPYAKNEAFNVSNGDVLKWKHFWKVLAEQFGVECGEYEEGVDLKLQDLMKGKEPVWEQIVRENGLTPTKLKDVGIWWFGDVILGNECFLDSMNKSKEHGFLGFRNSKNAFISWIDKAKAYKIVP

SEQ ID NO: 41066 - protein, 565 aa, Coxiella burnetii RSA 493
MLDITFKTDKNNKPYLETGITGKALLTIPQLNKGTAFTEEERDTFGLRGKLPNRVETLDDQVARAYLQYKSFDMQLNRNFYLNHLLDTNQVLFHRLVKNHVQEMLPTIYTPIVGNAVRAFNKRFMHPRGLYISYEDRNQIKKILNNRSHPIIDLIVVSDGEGVLGIGDQGVGAMAIPVAKLMVYTAIGGINPIRTLPILLDAGTNNEELLNDPLYLGWRHPRLSGNEYAEFIEKFIEAVQATFPQVFLHWEDFGRTNAYRNLIKYREITCSFNDDIQGTGCVALAAILAALKITRSTLPEQRIAVFGAGTAGMGITDTLFRALSQNGLSEKEARNPFWLIDRNGLLTEYSEEVTSAQQPYLRKKEEIASWKIKNPQQISLLEVIENVKPTILIGASAQSHAFDQTIVKAMAKHVEKPIIFPLSNPTDRSEAEPADLHRWSHGKALIATGSPFEDIIFDNQIFPVNQCNNYLAFPGIGLGAIAVKANRVSDNMLWSASQALSRYANESTHRLLPSIAQAQEASRQVAIAVAKTAIEEGLAKFSLDQVETLVDQQIWEPHYLSYRKR

SEQ ID NO: 41067 - protein, 389 aa, Digitalis ciliata
MSWWWAGAIGAAKKKLEEDGAPTKHSSVALLVGVTGIIGNSLAEILPLADTPGGPWKVYGVARRTRPARHEDNPINYIQCDISDPDDSQAKLSPLTDVTHVFYVTWANRSTEQENCEANSKMFRNVLDAVIPNCPNLKHISLQTGRKHYMGPFESYGKIESHDPPYTEDLPRLKYMNFYYDLEDILLEEVEKKEGLTWSVHRPGNIFGFSPYSMMNLAGTLCVYAAICKHEGKVLRFTGCKAAWDGYSDCSDADLIAEHHIWAAVDPYAKNEAFNVSNGDVFKWKHFWKVLAEQFGVECGEYEEGVDLKLQDLMKGKEPVWEEIVRENGLTPTKLKDIGIWWFGDVILGNECFLDSMNKSKEHGFLGFRNSKNAFISWIDKAKAYKIVP

SEQ ID NO: 41068 - protein, 483 aa, Burkholderia vietnamiensis G4
MSSGVRHDYAPLRLYIDGRFHDADGRRTQPVVDPGTTRVLGELPHATAHDIDAAVQAAHRAFVTWRHESPLVRSDLLRRAAALARERAETIGRHITMDQGKPLREAIAEVVSAAEQLEWHAEEGRRTYGRVVPARSPDVMQTVLREPIGVCAAFSPWNFPFSQAMHKIAAALASGCTLVLKGPEESPSAIVALAQLFHDAGLPPGCLNIVWGVPGDVSKQLIEAPQVRKISFTGSVPVGKQLAALAASLMKRMTMELGGHAPVLVCADADVERAAAMLAAYKFRNAGQVCVSPTRFFVQRAAFDRFVCAYLDAVGTIRVGYGLDAGVTMGPLAHARRVDEIDAFVADATAKGAQIATGGMRLPGPGHYFAPTVVLGPTRDTRLMNDEPFGPIVGIVPFDDLDDALAEANRLPFGLASYAFTTSARNAHRISRALEAGMVNINHFGMGPAEIPFGGVKDSGFGSEGGMEAFDGYLVTKFVTQMN

SEQ ID NO: 41069 - protein, 348 aa, Legionella pneumophila subsp. pneumophila str. Philadelphia 1
MNMNTAPKQYGFYMPAEWYPHERCWMAWPCHHETWSKIGLDKAKMAYARVAKAIAQFEPVTLLVNPGDEDSAENLCKGHNIEIISLPINDSWTRDTGATFLINNERQLAGVDWIHNAWGGNYADCSLDNLIASHLIKYTEAQYFHAPLVMEGGSFHVDGEGTILTSKECLLNSNRNPHLSQQEIEQYLINYLGAERIIWLNMGLIGDETDGHVDEIATFIAPGKVLCLITKDKEDPNYHRLQENFEILKSSKDARGRTFEVYTVEQPPATYLNGERLTLSYINFYMANQGIVMPAFGYESFDRLAYQLFVQIFPGYQITQIDALDVFSGGGGIHCITQQQPKSHKLVE

SEQ ID NO: 41070 - protein, 389 aa, Digitalis davisiana
MSWWWAGAIGAAKKKLEEDDAPTKHSSVALIVGVTGIIGNSLAEILPLADTPGGPWKVYGVARRTRPAWHEDNPINYIQCDISDPDDSQAKLSPLTDVTHVFYVTWANRSTEPENCEANSKMFRNVLDAVIPNCPNLKHISLQTGRKHYMGPFESYGKIESHDPPYTEDLPRLKYMNFYYDLEDILLEEVEKKEGLTWSVHRPGNIFGFSPYSMMNLVGTLCVYAAICKHEGKVLRFTGCKAAWDGYSDCSDADLIAEHHIWAAVDPYAKNEAFNVSNGDVFKWKHFWKVLAEQFGVECGEYEEGVDLKLQDLMKGKEPVWEEIVRENGLTPTKLKDIGIWWFGDVILGNECFLDSMNKSKEHGFLGFRNSKNAFISWIDKAKAYKIVP

SEQ ID NO: 41071 - protein, 630 aa, Legionella pneumophila subsp. pneumophila str. Philadelphia 1
MNNNTLSDDNLYNIENWGEGYFRINSKGNIEISKKPGKPGVELQTIVDAADRAGLHLPLLIRCSDILHDRVHRIYQAFTQAREDTCYAGNYQLVYPIKVNQEQSVVRELLKSPDNQIGLEAGSKPELMAVIGMLGDHQSTIVCNGYKDTSYIRTALIAQQMGHKVFIVIEKKSELDIILKESARLQIKPTLGVRIRLVSKSAGKWENTGGVKSKFGLNAKQVLELILQLKANDMLDCLQLMHCHLGSQIANIHDIRHCMQEVARYYIELRQLNAPIGTIDVGGGLSVDYEGTRSNKGCSMNYSLVEYATHIMLALKHLCQEAEISEPDLISESGRALTAHHAVLISNITDVEIINKAPVLPEISEDDSHVIRDIYDTYQAITDSSPTEIYNYAAHSLNEAHSLFKHGVISLQEKAKVEAFYTNICMEIKDKLDEENPSEKALLMRINECMAAKIFCNISFFQSIPDAWAIGQIFPVAPISQLNRTLSMHSILQDLTCDSDGTIKQYPGSSCVTTTLMLPSYDINNPYNIGFFLVGAYQEILGNLHNLFGDTNSLDVKLSDDGQFELDDLVSGDTVTNVLNLAHFDTKKLIQSYEKQLIKSELPKEKALSYLNELRSIFSQLTYLDGNIAQ

SEQ ID NO: 41072 - protein, 231 aa, Streptococcus suis
MKALIFDVDDTLYDQIQPFERALERHIEVAREQIEPLYLSFRRYADEVFEATAIGKMSLKDSHIYRMKHALADFGYQVSDATALAIQIDYDYFQGQIELSPVFPEIFSWCQAQGIAMGIITNGPYRHQLRKIRTMGLVNWFELEHVLISGQVGITKPNPAIFQLMEERLGMSGEDICYLGDSFENDVVGAKAANWKAIWFNHRKRVEPTAPYQADKVVTDWDELVEVIQSF

SEQ ID NO: 41073 - protein, 373 aa, Physcomitrella patens
MRKTLKKCCCFASLMELCVRASVEGRRAHHLVTLSSLFNKGTQPTIKANKPSVSYGQALQAKKEEDFVIVKTNCQRIPGDGSSTYDAFAVLDGHNGSAAGAFTKENLLNNVVNAVPSGLSRDEWLAALPRAMVAGFVKTDKDWRSKGIFSGTTVTLVIVDGYIVTCACVGDSRCVLDAQGIVTALTIDHRFDTNEEECERVVASGGQVARLHPYGCDIGPLRSWPGGICLSRTIGDVDAGEHIVPVPHVKQIKLSPGGGRLIIASDGVWDALTSEKAAKVCRGEKHPEVAAKNIVKEVIKVQGLRDDTTCLVVDIVPPGRASRSFAPAVRKQMMVMRFLRRTRSKKGSGSGAPMEELFEESSATLSERLRPVT

SEQ ID NO: 41074 - protein, 332 aa, Saccharomyces cerevisiae
MVRVAINGFGRIGRLVMRIALQRKNVEVVALNDPFISNDYSAYMFKYDSTHGRYAGEVSHDDKHIIVDGHKIATFQERDPANLPWASLNIDIAIDSTGVFKELDTAQKHIDAGAKKVVITAPSSTAPMFVMGVNEEKYTSDLKIVSNASCTTNCLAPLAKVINDAFGIEEGLMTTVHSMTATQKTVDGPSHKDWRGGRTASGNIIPSSTGAAKAVGKVLPELQGKLTGMAFRVPTVDVSVVDLTVKLNKETTYDEIKKVVKAAAEGKLKGVLGYTEDAVVSSDFLGDSNSSIFDAAAGIQLSPKFVKLVSWYDNEYGYSTRVVDLVEHVAKA

SEQ ID NO: 41075 - protein, 632 aa, Coxiella burnetii RSA 493
MCGIAGIFNLNGKPVAFDQIKAMTDSIAHRGPDGEGQFTDKYIGLGHRRLAIIDLSPAGHQPMQTKDGRYLITYNGEVYNFKILRKELETLGYSFFSNTDTEVVLNAYVQWGEKCLEKFNGMFAFAVWDRKEKTLFLARDRYGIKPLYYYQTNDCFVFASEIKAIIASGLYGAEINKEALVEYLTFQNFFTDRTLFKDVRIMPAGHFMMVKRENSSLHQYWDFNFTNDSALSEKMLLEKINDLFQQAVNRQLVSDVPVNSYLSGGVDSGSITMIAAKQLPHIRTFTVGFDLSSASGLELAFDERQAAEHLSYLAGTEHYEMVLKAGDMERCMQDLVWHLEEPRIGQSYPNFYAAKLASKFGKVVLAGTGGDELYAGYPWRYLCGQSSENFEDYIDKYYQYWQRLMSNKNLFKVLAPIAEEVKSIWTRDIFANVFRIKDTPIKTEDYINYSLYFEAKTFLHGLLVVEDKLSMAHGLETRVPCLDNDFVDFALQVPVKYKLSDFAFERVNENDTFSKREKRMNGKKILRKMMSRYVPDNVAHAPKQGFSAPDASWFKGESIEFVRSLLGDRNAKIFELLDYSVVNHLVNDHIQNHHNHRLLIWSLIYLEIFMQVHLSKGHKSNYHLFTPETVEL

SEQ ID NO: 41076 - protein, 413 aa, Chlorobium tepidum TLS
MKRVVVTGIGVLSPIGLSAGAFWNALMEGKSGAAPITYFDTTNFATTFACELKNFKADEYIDRKSADRMDPYCQYGVISAEQALKDSGLDLTAIDPTRIGVVHGSGIGGMTVYDQQFRQYLERGPRRVSPFFIPMLIPDIAAGQISIRNGLMGPNYATASACATSLHAIMDAVMLLQMGMADYMVCGGSEAPITQMSVAGFNSAKALSTRNDAPTKASRPYDVDRDGFVMGEGAGSLVIETYESAVKRGAKIYAEIVGMGASADAYHLTAPHPEGLGACSAMTTALNMAGITPDKIDYINTHGTATPLGDLAEIKAIKKVFGEHASKLSISSTKSMTGHLLGAAGVVESIACILALQNQTVPPTINLDNVDPEIDVDVTPNVPKQRSIEYALNNGFGFGGHNGCLIFRKAPAA

SEQ ID NO: 41077 - protein, 341 aa, Staphylococcus aureus subsp. aureus Mu50
MNNKVLVTGGTGFVGMRIISRLLEQGYEVQTTIRDLSKADKVIKTMQDNGISTERLMFVEADLSQDEHWDEAMKDCKYVLSVASPVFFGKTDDAEVMAKPAIEGIQRILRAAEHAGVKRVVMTANFGAVGFSNKDKNSITNESHWTNEDEPGLSVYEKSKLLAEKAAWDFVENENTIVEFATINPVAIFGPSLDAHVSGSFHLLENLLNGSMKRVPQIPLNVVDVRDVAELHILAMTNEQANGKRFIATADGQINLLEIAKLIKEKRPEIAQKVSTKKLPDFILSLGAKFNHQAKEGKLLLDMNRNVSNERAKTLLGWEPIATQEEAILAAIDSMAKFHLI

SEQ ID NO: 41078 - protein, 364 aa, Dendrobium thyrsiflorum
SDSGKDAGRLSAAWQLYKTQEELVKVGKEYGVKLTMFHGRGGTVGRGGGPTHLAILSQPPDTILGSLRVTVQGEVIEQSFGEEHLCFRTLQRFTTATLEHGMQLPISPKPEWRALMDEMAVVATNEYRSIVFQESRFVEYFRLATPELEYGRMNIGSRPPKGKPSGGIESLRAIPWIFAWTQTRFHLPVWLGFGAAFKHVIEKDKKNLNLLREMYNEWPFFRVTIDLIEMVFTKGSPGIAALYDKLLVSTDLLPFGEQLRANYEETKRLLLQVAGHKDLLEGDPYLKQRLRLRYPYITTLNVWQAYTLKRIRDPSYHLNAKPNQSNEIMNSNKPAAELVKLNPTSEYAPGLEDTLILTMKGIAA

SEQ ID NO: 41079 - protein, 427 aa, Ipomoea batatas
DMPLDSDVFRVPPGYNVPQQVHITQGDYEGKGVIISWVTPEEPGSKTVVYWAENSSVKRRADGVVVTYKYYNYTSGYIHHCTIKDLEYDTKYYYELGLGDAKRQFWFVTPPKPGPDVPYTFGLIGDLGQTYDSNTTLTHYELNPVKGQSLLFVGDLSYADRYPNHDNNRWDTWGRFVERSTAYQPWIWTAGNHEIDFVPDIGETVPFKPFTHRFFMPFESSGSTSPLWYSIKRASAHIIVMSSYSAYGTYTPQWKWLQGELPKVNRSETPWLIVLMHCPMYSSYVHHYMEGETMRVLYEPWFVEYKVDVVFAGHVHSYERTERVSNVAYNIVNGLCSPKNDSSAPVYITIGDGGNSEGLATEMTQPQPSYSAYREASFGHGIFDIKNRTHAHFGWHRNQDGLAVEGDSLWFINRYWMSKEEASVSAV

SEQ ID NO: 41080 - protein, 494 aa, Alkaliphilus metalliredigenes QYMF
MEFYGEIKLDKEDSQHLYIQLYKALKTLILKDNIKGDQRLPPIRKLAKALSINVVTVVNAYDILEKEGFVYKKIGSGTYVSPQILGSKEKMIGVPEEEGFSLIDQGYIQVGENMINFASATPMPELFPVADFKAVLNEVLDRDKGYAFGYQESQGYYPLREILKKYIQSYGIDTEIDNIQVISGAQQGIDLIAKGILNYGDTVIVESPSYTGAIAAFRSRGAKIVDIALEEDGILLEELEKKIIIHRPKLIYIMPNFQNPTGISYSGEKKQKILEICRKYQVVVVEDDYLSELNFYSMNNQTLKAIDVHQQVIYIKSFSKIFMPGLRLGFLVIPSRFYDQLIVAKHSSDISTPGLLQRAFALYLEKGIWQGHLSYMEEQYKERFDCMVQSLKREMPKEVQCLLPKGGVNFWLTLPQGISPKKLYEEALKENIVFAPGHLFFLGKEDFGQLRLSIAAVSKDEIEVGIEKLGKIISKLLIKESKKKESFEHYKPIL

SEQ ID NO: 41081 - protein, 259 aa, Dendrobium thyrsiflorum
  misc_feature (226)..(226): Xaa can be any naturally occurring amino acid
  unsure (1)..(259): unsure at all Xaa locations
SDSGKDAGRLSAAWQLYKAQEDLIKVAKEFGVKLTMFHGRGGTVGRGGGPTHLAILSQPPDTIHGSLRVTVQGEVIEQSFGEEHLCFRTLQRFTAATLEHGMHPPISPKPEWRALLDEMAVVATEEYRSIVFQEPRFVEYFRLATPEMEYGRMNIGSRPSKRKPSGGIESLRAIPWIFAWTQTRFHLPVWLGFGTAFKHAIEKDIKNLHMLQEMYNEWPFFRVTIXLIEMVFAKGNPGIAALYDKLLVSDDLWSFGERL

SEQ ID NO: 41082 - protein, 364 aa, Dendrobium moschatum
SDSGKDAGRLSAAWQLYKAQEELVKVAKEFGVKLTMFHGRGGTVGRGGGPTHLAILSQPPDTIHGSLRVTVQGEVIEQSFGEEHLCFRTLQRFTAATLEHGMQLPISPKPEWRALMDEMAVVATNEYRSIVFQESRFVEYFRLATPELEYGRMNIGSRPSKRRPSGGIESLRAIPWILAWTQTRLHLPVWLGFGAAFKHVIEKDKKNLNILREMYNEWPFFRVTIDLIEMVFTKGSPGIAALYDKLLVSSDLLPFGEQLRANYEETKRLLLQVAGHKDLLEGDPYLKQRLRLRYPYITTLNVWQAYTLKRIRDPSYHLTAKPNLSNEIMNYNKPAAELVKLNPTSEYAPGLEDTLILTMKGIAA

SEQ ID NO: 41083 - protein, 555 aa, Prochlorococcus marinus str. NATL2A
MAKFVFVTGGVVSSIGKGIVAASLGRLLKSKGYSVSILKLDPYLNVDPGTMSPFQHGEVFVTEDGAETDLDLGHYERFTDTAMSRLNSVTTGSIYQAVINKERRGDYDGRTVQVIPHITREIRERIKRVANNSGADVVISEIGGTVGDIESLPFLEAIREFKGDVKRNDVVYVHVTLLPYIGTSGEIKTKPTQHSVKELRSIGIQPDILVCRSDRPINDGLKNKIGGFCGVNSDAVIASLDADSIYSVPLALKDEGLCKEVLDCLDLNDHESDLKDWERLVHKLRNPGPSVKVALVGKYVQLNDAYLSVVEALRHACISHDASLDLHWINAENIESEGAEKLLQGMDAIVVPGGFGNRGVNGKIAAIRWAREQRVPFLGLCLGMQCAVIEWARNIAGLEDASSAELNPNSKHPVIHLLPEQQDVVDLGGTMRLGVYPCRLQANTTGQSLYNEEVVYERHRHRYEFNNSYRTLLMESGYVISGTSPDGRLVELIELKNHPFFIACQYHPEFLSRPGKPHPLFGGLIQAAQMRVPSSPSEAFNPQSKIIEKKSLEQQ

SEQ ID NO: 41084 - protein, 432 aa, Synechocystis sp. PCC 6803
MGQPSDLTESTLRFSSLDPLHPPVISQLTAIAKRIRRNSLHLPTIWQEAVDSIGSTLGVSRCLLLTKDFQSRHLQIEAEFCQPTVTAFAALIVPEESEIWRQLFEQHQPITLYNVQFQGEDLGGLWIFPTLYQDQANGYLCLQQVGPAPGPWHPETEALLQELAEQTGTAIAHATLYQELTQATKAAEEASRLKSEFLASTTHELRTPLNGIIGFLRLILDDMADSEAEKHEFVEEAYQSALLLLNLINDILDLAKIEAGRVGIELEVVDFSEVLQATENFALPQAQNKGLSFNLTAPNQGPLLVYGNQRWLLQVMLNIVGNAIKFTHEGGITVAVEVMPRTVLWEGVQKPGLLKVSVGDTGIGVSLEQQSKLFKKFVQIDGSHSKAYGGTGLGLVISQKLVETMGGKVAFFSMGEGLGSTVTFTVLLEELP

SEQ ID NO: 41085 - protein, 375 aa, Funaria hygrometrica
SDSGKDAGRLSAAWQMFKAQEDLVKVAKQYGVRLTMFHGRGGTVGRGGGPTHLAILSQPPDTINGSLRVTIQGEVIEQSFGEEHLCFRTLQRFTAATLEHGMHPPIAPKPEWRELMDAMAVASTKEYRSIVFQNPSFVEYFRAATPELEYGRMNIGSRPSKRKPNGGIESLRAIPWIFAWTQTRFHLPVWLGLGSALKQALQTDPRNIATLRRMYNQWPFFRVTIDLVEMVFAKGDPRIAALYDNLLVSDQLKPLGEELRQKYNETRDLLLKITFHDEILQGNPSLKQRLRLREPYITALNVQQALVLKKMRDQSLQFCALQNSSSSKDQSELPTTPKRAAELVELNPTTEFPPGLEDTLILTMKGIAAGMQNTG

SEQ ID NO: 41086 - protein, 274 aa, Arabidopsis thaliana
MLTLYHQERSPDATSNDRDETPETVVREVHALTPAPEDNSRTMTATLPPPPAFRGYFSPPRSATTMSEGENFTTISREFNALVIAGSSMENNELMTRDVTQREDERQDELMRIHEDTDHEEETNPLAIVPDQYPGSGLDPGSDNGPGQSRVGSTVQRVKREEVEAKITAWQTAKLAKINNRFKREDAVINGWFNEQVNKANSWMKKIERKLEERKAKAMEKTQNNVAKAQRKAEERRATAEAKRGTEVAKVVEVANLMRALGRPPAKRSFFSFS

SEQ ID NO: 41087 - protein, 371 aa, Hypnum cupressiforme
SDSGKDAGRLSAAWQMFKAQEDLVKVAKQYGVRLTMFHGRGGTVGRGGGPTHLAILSQPPDTINGSLRVTIQGEVIEQSFGEEHLCFRTLQRFTAATLEHGMHPPIAPKPEWREIMDKMAVISTKEYRAVVFQTPKFVEYFRTATPELEYGRMNIGSRPSKRKPSGGIESLRAIPWIFAWTQTRFHLPVWLGLGSALKEVLQTDPRNIAILRRMYNQWPFFRVTIDLVEMVFAKGDPRIAALYDNLLVSDEIKPFGDELRRKYNETREYLLRVAGHEDILQGNPTLKQRLRLREPYLTALNVQQALVLKKMRDSSSQFCALQNGHSGEVPKSPRRAEELVELNPTTEFPPGLEDTLILTMKGIAAGMQNTG

SEQ ID NO: 41088 - protein, 963 aa, Arabidopsis thaliana
MAARNLEKMASIDAQLRLLAPGKVSEDDKLIEYDALLLDRFLDILQDLHGEDVREFVQECYEVAADYDGNRNTEKLEELGNMLTSLDPGDSIVVTKSFSNMLSLANLAEEVQIAYRRRIKKLKKGDFADEASATTESDIEETLKRLLQLNKTPEEVFDALKNQTVDLVLTAHPTQSVRRSLLQKFGRIRDCLTQLYAKDITPDDKQELDEALQREIQAAFRTDEIRRTPPTPQDEMRAGMSYFHETIWKGVPKFLRRVDTALKNIGINERVPYNAPLIQFSSWMGGDRDGNPRVTPEVTRDVCLLARMMAANLYFSQIEDLMFEMSMWRCNEELRVRAERQRCAKRDAKHYIEFWKQIPANEPYRAILGDVRDKLYNTRERARQLLSSGVSDVPEDAVFTSVDQFLEPLELCYRSLCDCGDRPIADGSLLDFLRQVSTFGLALVKLDIRQESERHSDVLDAITTHLGIGSYKEWSEDKRQEWLLSELSGKRPLFGPDLPKTEEVADVLDTFKVISELPSDSFGAYIISMATAPSDVLAVELLQRECGITDPLRVVPLFEKLADLESAPAAVARLFSIEWYRNRINGKQEVMIGYSDSGKDAGRLSAAWQLYKTQEELVKVAKEYGVKLTMFHGRGGTVGRGGGPTHLAILSQPPDTIHGQLRVTVQGEVIEQSFGEEHLCFRTLQRFTAATLEHGMHPPVSPKPEWRVLMDEMAIIATEEYRSVVFKEPRFVEYFRLATPELEYGRMNIGSRPSKRKPSGGIESLRAIPRIFAWTQTRFHLPVWLGFGGAFKRVIQKDSKNLNMLKEMYNQWPFFRVTIDLVEMVFAKGDPGIAALYDRLLVSEELQPFGEQLRVNYQETRRLLLQVAGHKDILEGDPYLRQRLQLRDPYITTLNVCQAYTLKQIRDPSFHVKVRPHLSKDYMESSPAAELVKLNPKSEYAPGLEDTVILTMKGIAAGMQNTG

SEQ ID NO: 41089 - protein, 582 aa, Kluyveromyces lactis NRRL Y-1140
MGKMSFIEGLQKRFFLGYSYKYNTFELDPIILATSIKVAVLDYFRNTPWYWIIRDAVFYHLLFNVLSRIILYIRGYGLLTSISKLFHYASRRLFEVLLSLPMVRGSVDKEVSKVLATIEKDMIKNDANLKDFPELPRTGLSEADVLKELDKLNSVLKHSDWENGKVSGAVYHGGDDLIDLQSKAFKKFCVANQLHPDVFPGVRKMEAEVVSMVLNLFNAPPTGCGTTTSGGTESLLLACVSAKMLGLRYKGITEPEIIIPKTAHAGFDKAGYYFGIKIHHVDLDPVTFQADVKQMRKLINRNTVMLAGSAPNFPHGIIDDIVSIGKLGETYKIPVHVDCCLGSFIVAFMSKAGFNDVPLFDFRVPGVTSISCDTHKYGFAPKGSSVIMYRNPELRKQQYYVSTEWTGGLYGSPTLAGSRPGALVVGCWATMVHVGADGYINSCKDIVGKARELKEFIQKEIPELQILGDPLCSVISFTSNKIDIYELSDTLSKSGWHLSALQNPSSIHLALTKLSLKSVDELKHLLKSTVDKMKQSPDAKPSSDGTSALYGVAGSVKTVGVADRLIEGFLDSLYKLEPEHAT

SEQ ID NO: 41090 - protein, 1324 aa, Oryza sativa
MVFKGRFFSSRHKSSESSSPTDGSNSPRTPTSAPPAAGSPAAASSSSSSRSDKKKPKSETPRKRDKLFGGSASGSAASKGGAGAAPASASSSPSADGRKAAAAQLRDGGAGGASAAALSPILASSLGLNRIKTRSGPLPQEGHRIAAALGSSNLSRGQAQADPSAASAGGGGGGGRKAGSSWADSTSGSRGKGKAAEHPARGATATSLEGKSSAKGFCIMILQAGYRFLEDRGISLSLPSSCIDSKGRTALSNSIQAPFRAYRVDDVLSYKEIGAHDFHFAAWCLDAKLGTTGANCAYDPCETPKESESPRFKAIMQATSAPRKRVPADIKSFSHELNSKGVRPFPFWKPRGIYNLKEVLKVIQVRFEKAKEEVNSDLAVFAGDLVGVMEKYADSHPEWKETLEDLLILARSCCVMTPGEFWLQCEGIVQDLDDHRQELPMGVLKKLYTRMLFILTRCTRLLQFHKESGFAEDEVVMDQRDKIIQSADRQILAQPGDDTTTRGSKSDVRKSYSQEQHNLKWKRSQEIKPVKFLSPLDTTDVKKEVESPTRERISSWKPFPSPVPKPPKDPTPIKEESPNKKTDTPPAVSSQAELNSPVESTSHQSLPPKHQHKTSWGHWSDQPNISEEGSIMCRICEEYVPTHYVENHSAICASADRCDQKGVSVDERLIRVAEALEKLVESYTQKDLPNAVGSPDVAKVSNSSINEESDGPSPKLSDWSRRGSADMLDYLQEADSTISLDDIKNLPSMTCKTRFGPKSDHGMATSSAGSMTPRSPLTTPRSNHIDMLLAGRSAINESDDLPQIVELADIARCIATTPLDEERALSLLVTCIEDLQEIVNRRKHEALTVQTFGTRIEKLHREKYLLLCDSVDMDKVDSASTVMDEEDDVVRSLRASPVHPVKDRTSIDDFEIIKPISRGAFGRVFLAKKRTTGDLFAIKVLRKADMIRKNAVESILAERDILITVRNPFVVRFFYSFTSRENLYLVMEYLNGGDLYSLLRNLGCLDEDVARIYLAEVVLALEYLHSMHIVHRDLKPDNLLIAHDGHIKLTDFGLSKVGLINSTDDLSGPAVSGSSLYGDDEPQMSEFEEMDHRARRQKRSAVGTPDYLAPEILLGTGHGTSADWWSVGVILFELIVGIPPFNAEHPQTIFDNILNRKIPWPHVPEEMSSEAQDLIDKLLTEDPHQRLGANGASEVKQHQFFKDISWDTLARQKAAFVPSSDSAFDTSYFTSRYSWNPSDENIYEAYEFEDSSDNGSLSGSSSCVSNHQDDMGDESSGFTEFESSSNVNYSFSNFSFKNLSQLVSINYDLLTKGLKDDPPTKSET

SEQ ID NO: 41091 - protein, 454 aa, Deinococcus radiodurans R1
MTATQAKPRQPDLKTSLPGPKTAEIMARDQATLSTSYMRPYPFVPDFGKGVWLTDVDGNTMLDFFAGIAVSTTGHAHPHVVQAVQRQIEKFTHVCLTDYPQEITTSLAERLVKHVERPGEKWRVFFSNSGAEAVEAAVKLARNHTGRQHIISTMGSFHGRTYGAITLTGSKTKYKRGFGPLLPAVSHVPYPNPFRPPLGSTPENCGQAVIDHIESLFVGILPADEVAAIIVEPMQGEGGYIVPPADFLPGLRALCDKHGIMLIFDEVQAGMGRTGKMFSFQHFDVQPDIITSAKGIASGMPLGALLAKESVMTWPVGSHGSTYGGNPVAAAASHATLDLLEGQVKHEGCGDSLMDNAAQVGDFILGELKGMQDEFPFIGDVRGRGLFIGIEFVKPDGSPDGALRDQASMMMFEKGLLNLDCGEAVIRISPPLILTREEAATGLDIMRGVFQELK

SEQ ID NO: 41092 - protein, 349 aa, Oryza sativa (japonica cultivar-group)
MDMASIECVSYSDSMDDDDDDGVGVGGVSHLPRPILVKPSSAAAAVNVVVVSAGSGGGAGGGGGGVGVVAGAPAVPPATSVHELLECPVCTNSMYPPIHQCQNGHTLCSTCKTRVHNRCPTCRQELGDIRCLALEKVAESLELPCKYYSLGCPEIFPYYSKLKHESQCNFRPYNCPYAGSECSVVGDIPFLVAHLRDDHKVDMHSGCTFNHRYVKSNPREVENATWMLTVFHCFGQYFCLHFEAFQLGVAPVYMAFLRFMGDENDARNYSYSLEVGANGRKMIWEGTPRSIRDSHRKVRDSHDGLIIQRNMALFFSGGERKELKLRVTGRIWKEQQNPDSGACIPNLFS

SEQ ID NO: 41093 - protein, 389 aa, Digitalis lutea
MSWWWAGAIGAAKKKLDEDDAPTKHSSVALIVGVTGIIGNSLAEILPLADTPGGPWKVYGVARRTRPAWHEDNPINYVQCDISDPDDSQAKLSPLTDVTHVFYVTWANRSTEQENCEANSKMFRNVLDTVIPNCPNLKHISLQTGRKHYMGPFESYGKIESHDPPYTEDLPRLKYINFYYDLEDIMLEEVEKKEGLTWSVHRPGNIFGFSPYSMMNLVGTLCVYAAICKHEGKVLRFTGCKAAWDGYSDCSDADLIAEHHIWAAVDPYAKNEAFNVSNGDVFKWKHFWKVLAEQFGVECGEYEEGVDLKLQDLMKGKEPVWEEIVRENGLTPTKLKDVGIWWFGDVILGNECFLDSMNKSKEHGFLGFRNSKNAFISWIDKAKAYKIVP

SEQ ID NO: 41094 - protein, 353 aa, Oryza sativa
MGRAPCCEKVGLRRGRWTKEEDEKLARYIRENGEGAWRSMPKNAGLLRCGKSCRLRWINYLRADLKRGNISPQEEDIILNLHATLGNRRMEMHTEMLSATGFNLAQRKFPMLLTDDTDGGLSCLWSLIAGHLPGRTDNEIKNYWNSHLSRKGYEFLRGGGGGAVVDVDLSKLPGGGKRRGGRTGRSSSGKEKTRTKEKDKAPAPEAAHNDDGGGGGGGGIDNVSAASHSHREEQAQASASGLTSDGLEEGPLGLSEEMVSGPVGPVSPKPEVGQDGSSAESGCCGPSGSSGPTEAVGQDMGDKSMDWDLVGLDDGFANDDMWGSLSWDYGELVGPDGVHQGEVLSDLFFLGNL

SEQ ID NO: 41095 - protein, 196 aa, Thermosynechococcus elongatus BP-1
MKFLNQITNYAKEAVQSAKYIGQGLSVTFDHMRRRPITVQYPYEKLIPSERFRGRIHFEFDKCIACEVCVRVCPINLPVVDWVFNKELKKKELKHYSIDFGVCIFCANCVEYCPTNCLSVTEEYELATYDRHELNYDSVAMGRIPYKVTQDPMVTPIREFAYLPAGVMSGHDLPAGAQRAGERPEAIANTAKSSEN

SEQ ID NO: 41096 - protein, 509 aa, Burkholderia vietnamiensis G4
MRACRGAAPGKAESGVTCRRPRSIRTSRKRSSRPRCDVAAHAAPHRVHALEERYLMDYQKRQKRFWHPMSSAAAGHTTPTVIIARGDGNYVYDVEGHRMLDGVGGLWNVNVGHNRPEVKAAIARQMDELSYYQTFDGVAHPRVYDLADRLCAMFEQEDMQRVMFGSGGSDAIETALKMARQYWVAAGEPSRTKFLSLRNGYHGVHMGGTSIGGNGVYHYNHGPLLPGCVLLDTPWLYRNPWNCDDPDQLVEHCIRQLEDTIAFHGQQTIAAFVAEPVQGAGGLIVPPASYWARVRNVCDRHGILLIADEVVTGFGRTGSMLGSRGWGVAADILCVAKGISAGYVPLGATLYNGRIAQAIEHGAGFSHVVMHGYTYSGHPLACAASLAVLDIVEAEDLPGNAARMGQRLLEQLLPLTRDFETVGDVRGKGLMLALDLVTDKASRTPLDPGKGFAARVADAARKRGVLVRAIANKIVMSPPLTLQPKETDLIAHALRDALQECCADARAIA

SEQ ID NO: 41097 - protein, 371 aa, Pneumocystis jirovecii
GASFWSTISGEHGLDSTGLYHGTSDLQLERMNVYFNEASGGKYVPRAVLVDLEPGTMDAVRSGPFGNLFRPDNFIFGQSGAGNNWAKGHYTEGAELVDTVLDVVRREAEACDCLQGFQITHSLGGGTGAGMGTLLISKIREEYPDRMMATFSVVPSPKVSDTVVEPYNATLSVHQLVENSDETFCIDNEALYDICMRTLKLPDPGYGDLNHLVSAVMSGITTCLRFPGQLNSDLRKLAVNMVPFPRLHFFMVGFAPLTSKGSHSFRSLTVPELTQQMFDAKNMMAASDPRHGRYLTVAAIFRGTVSMKEVEDQMHNVQQKNSSYFVEWIPNNVQTALCSIPPRGLKMSSTFIGNSTSIQELFKRVGDQFAA

SEQ ID NO: 41098 - protein, 542 aa, Rhodobacter sphaeroides 2.4.1
MSAKEVRFGTDARGRMLKGINTLADTVKITLGPKGRNVILDTSYGAPRITKDGVTVAREIELSDRFENVGAQMVKEVASRTNEEAGDGTTTATVLAQAIAKEGMKAVAAGMNPMDLKRGIDRAVAIVIAEIRSMSRPVGDSAEIAKVGALSANGEAAIGRQIADAMAKVGTAGVIKVEENKGLETETEVVEGMQFDRGYLSPYFITHAQKMVVELDDCAILLHEGKLTSLASMVPLLEAVVQAEKQLLVVAEDVEGEALTTLVVNKLRGGLKVAAAKAPGFGDGRAAMLEDLAVLTGAHLISAELGTKLETVTLDMLGFAKKVVLTKDSTILIDSAGDKAAIASRIGQIRNQIEDTTSAYNKEKLQERLARLAGGVAVIRVGGATEIEVKERRDRVEDTLNATRAAVQEGVVPGGGAALIHAGKALAGLKGDNPDQDAGIKIIRRAIQAPLRQIADNAGIDGSVVAGKVIENDSATFGFDAQLETYGDMLQAGIIDPTKVVRIALEDAASIAGLLITTEVIIAHKPERGERMSQMDEMGGMM

SEQ ID NO: 41099 - protein, 543 aa, Streptococcus pyogenes serotype M6
MAKDIKFSADARAAMVRGVDMLADTVKVTLGPKGRNVVLEKAFGSPLITNDGVTIAKEIELEDHFENMGAKLVSEVASKTNDIAGDGTTTATVLTQAIVHEGLKNVTAGANPIGIRRGIETATATAVEALKAIAQPVSGKEAIAQVAAVSSRSEKVGEYISEAMERVGNDGVITIEESRGMETELEVVEGMQFDRGYLSQYMVTDNEKMVADLENPFILITDKKVSNIQDILPLLEEVLKTNRPLLIIADDVDGEALPTLVLNKIRGTFNVVAVKAPGFGDRRKAMLEDIAILTGGTVITEDLGLELKDATMTALGQAAKITVDKDSTVIVEGSGSSEAIANRIALIKSQLETTTSDFDREKLQERLAKLAGGVAVIKVGAPTETALKEMKLRIEDALNATRAAVEEGIVAGGGTALITVIEKVAALELEGDDATGRNIVLRALEEPVRQIALNAGYEGSVVIDKLKNSPAGTGFNAATGEWVDMIKTGIIDPVKVTRSALQNAASVASLILTTEAVVANKPEPAAPAPAMPAGMDPGMMGGF

SEQ ID NO: 41100 - protein, 379 aa, Arabidopsis thaliana
MELLTTVASFFTPTTLFLLLNLMIGTIVVTSRLGSGSRKHYQHHDGFGSGHAPAPLARAPSIIDRVKSINFHLYKFPHPETELFSMTAHHDIIGSDLHVYPDPNPAPLQRAPSLLDRVKSINMSYFKFPHDVTGSDPHSHSHSHLDLHPDPAPAPLQRAPSLLDRVKSINMSYFKFQQYNPEENDYAHHTEPTRFESIPTRMGRVDPIDISKFRIPEEDQPTGTGVNSQINPPGLTRAPSILERVKSIKLSSFYRSDPDLDQKQNPDPVLHEEHKHVRSKSESKKPVKKKKKALTKMTKSASEKSGFGFAGSHAEAPETVESLERRRPDTTRVERSTSFGDGEDGVDAKASDFINKFKQQLKLQRLDSILRYKEMLKAH

SEQ ID NO: 41101 - protein, 133 aa, Synechococcus sp. CC9605
MSSSNPVERSAEEWKQSLTPEQFQVARCGGTERAFTGAYWNNKATGMYHCVCCGAPLFSSKTKFDSGTGWPSFWDGVSSEAITTKADLTHGMVRTEINCAQCDAHLGHVFPDGPAPTGQRYCVNSASLDFKAS

SEQ ID NO: 41102 - protein, 379 aa, Protomyces inouyei
GEHGLDGNGVYCGDSDIQLERMNVYFNETSSNKHVPRAVLIDLEPGTMDAVRAGPFGNLFRPDNFVFGQSGAGNNWAKGHYTEGAELVDSVLDVVRREAEGCDCLQGFQITHSLGGGTGAGMGTLLISKIREEYPDRMMATFSVVPSPKVSDTVVEPYNATLSIHQLVENSDQTFCIDNEALYDICMRTLKLSNPAYGDLNHLVSSVMSGITTCLRFPGQLNSDLRKLAVNMVPFPRLHFFMVGFAPLTSRGSHSFRHLSVPELTQQMFDPKNMMAASDPRHGRYLTVATYFRGAVSMKKVEEQMRSVQIKNSAYFVEWIPNNVQTALCSVPPQGLKMSSTFIGNSTSIQELFKRVGDQFSAMFRRKAFLHWYTGEGMD

SEQ ID NO: 41103 - protein, 542 aa, Nocardia asteroides
MAKTIAYDEEARRGLERGLNSLADAVKVTLGPKGRNVVLEKKWGAPTITNDGVSIAKEIELEDPYEKIGAELVKEVAKKTDDVAGDGTTTATVLAQALVREGLRNVAAGANPLGRKRGIEKAVEAVTAKLLDTAKEVETKEQIAATAGISAGDAAIGELIAEAMDKVGKEGVITVEESNTFGLQLELTEGMRFDKGYISGYFATDPERQEAVLEDPYILLVGSKVSTVKDLLPLLEKVIQAGKPLLIIAEDVEGEALSTLVVKKILGTFKSVAVKAPGGGDRRKAQLADIAILTGGQVISEEVGLSLETAGIELLGQARKVVVTKDETTIVEGAGDAEAIAGRVSQIRAEIENSDSDYDREKLQERLAKLAGGVAVIKAGAATEVELKERKHRIEDAVRNAKAAVEEGIVAGGGVAFLQSVPALDDFKLEGDEATGANIVRVALSAPLKQIAFNAGLEPGVLAEKVSNLPAGQGLNAQTNEDEDLLAAGVADPVKVTRSALQNAASIAALFLTTEAVVADKPEKASAAPATGHRFKMGGMDF

SEQ ID NO: 41104 - protein, 637 aa, Coxiella burnetii RSA 493
MCGIVGFWDFRRSWKKEQYQKVAAKMADQITSRGPDSSGVWCDEKTGLAFGHRRLAVIDLSTAGHQPMLSHSGNTAIIYNGEIYNAPFIRRELENAGIYCCGHSDTEVLLEACELWGVKSAVKKMNGMFAFAYWNKLEKKLYLGRDRLGIKPLFWSLKNNIFYFSSQLKALAAHPVWNVEIDRTALTSYFRFNYIPAPLSIYKGVYKLKPGTILTIDPNQKIIEETFWSLETVCQKNINKKKIDDNEVLEKTETLLRDAVKCRMYSDVPLGAFLSGGIDSSAVVALMQAQSTNRIKTFSIGFYEKEYNEASYAKEVAQHLKTDHHELYLHVDEAARLIPQIPEWYDEPFADSSQIPTYLVSQLARQHVTVSLSGDGGDELFAGYNRYLLAENLWSKLVRFPLWMRQSGSKTINFFSPSAWDKFANVIPRKLRPSSVGDKAHKLAALLTQSSEDLYKGLVSLWERPAELVIDGSDISLWPEPLPDLNFTERMQYIDTLTYLPDDILTKVDRASMAVSLEARIPLLDYRLVEYIWSLPMRFKLERGETKWLLRRVLGKYVPEKLFTRPKMGFGVPIDHWLRCQLREWAEDLLSVPKLEKDGLLHSSLIRQRWQEHLSGKRNWQYSLWSVLMFQLWRERW

SEQ ID NO: 41105 - protein, 397 aa, Taphrina populina
IGAAFWSTISGEHGLDGSGVYHGTSDLQLERMNVYFNEAGAGKYVPRAVLIDLEPGTMDAVRAGPFGNLFRPDNFVFGQSGAGNNWAKGHYTEGAELVDSVLDVVRREAEGCDCLQGFQITHSLGGGTGAGMGTLLISKIREEYPDRMMATFSVVPSPKVSDTVVEPYNATLSVHQLVENSDQTFCIDNEALYDICMRTLKLNSPSYGDLNHLVSAVMSGITTCLRFPGQLNSDLRKLAVNMVPFPRLHFFMVGFAPLTSRGSHSFRSLSVPELTQQMFDPKNMMAASDPRHGRYLTVAAYFRGAVSMKEVEEQMRSVQTKNTSYFVEWIPNNVQSALCSIPPRGLKMSSTFIGNSTSIQELFKRVGDQFTAMFRRKAFLHWYTGEGMDEMEFTEAE

SEQ ID NO: 41106 - protein, 413 aa, Fagus sylvatica
MAGICCGVVGEGETTAPIELSSRPSRRRRIDLVPLKLMADVAAPQPLETDKKRQKLCLNTTSSLPSQVVENCKCVEEENEEKKKTNKNEALHTNQAANSCESSKPVEGRNNEEAVQECPKFGVTSVCGRRREMEDAVSVHPSVSNNFHFFGVFDGHGCSHVAMRCRDRLHDIVKEEVESVTEGMEWKDTMEKSFDRMDKEVQEWRVPIKTTNCRCDVQTPQCDAVGSTAVVAIVTPEKIIVSNCGDSRAVLCRNGVAFPLSSDHKPDRPDELVRIQDAGGRVIYWDGARVLGVLAMSRAIGDNYLKPYVISEPEVTITDRTAEDECLILASDGLWDVVSNETACGVARMCLRAQKPSSPPRSPGNDMAVGAASESSDKACSDASILLTKLALARHSTDNVSVVVVDLRRNHQQ

SEQ ID NO: 41107 - protein, 232 aa, Triticum aestivum
  misc_feature (59)..(59): Xaa can be any naturally occurring amino acid
  misc_feature (96)..(96): Xaa can be any naturally occurring amino acid
  misc_feature (138)..(138): Xaa can be any naturally occurring amino acid
  misc_feature (160)..(160): Xaa can be any naturally occurring amino acid
  misc_feature (167)..(167): Xaa can be any naturally occurring amino acid
  misc_feature (190)..(190): Xaa can be any naturally occurring amino acid
  misc_feature (217)..(217): Xaa can be any naturally occurring amino acid
  misc_feature (222)..(222): Xaa can be any naturally occurring amino acid
  misc_feature (226)..(226): Xaa can be any naturally occurring amino acid
  unsure (1)..(232): unsure at all Xaa locations
MASLQVTPTSAFTEWNELKFEGLYLFHTPLGSGANQARVIDNKAPIGIGATVVNNWTSXDGPGPNAKLVARAQGLHIQAGNWVNSFSLVFVDQRFXSGSTLEVTGIVVESGEWAIVGGTGQFAMANGVISKKFHGAEXAKGNIIQLTIHAFCPVLGPTKXRSATKVXGPWGVGSGGSPDGTSPGRKPQRXLKEHHRCQLGIAVTSIAFSYVDSAGQXQSAGXWGGXGGETEP

SEQ ID NO: 41108 - protein, 595 aa, GIBBERELLA ZEAE PH-1
MAPHDVERGSISKMKEESLAPGSSFSMREPEYADILPPSYWGRFVDGFRRDQRSSLFTNDPLGQQEGLGRVHDGAHYYDLQSAMLETANSGLARELKGRHLQMIAIGGSIGRALADGGPASILLAFTIVGAMLFCTCQALGELAVIFPIAGSFSSWATRFIDPSWGFAMGWNYAMQWLIVLPLEIIAASLTLSYWDESLTRAIFVSAFLVLIIVINMFGVKGYGEAEFIFSIIKVIAVIGFILLGIVLNCGGTPDSGYIGGRFWHEPGAFNNGFKGMCNVFVTAAFSFAGTELIGLAAAETANPRKSLPTALKQVFWRITLFYIVALTLVGLLVPYNDPRLTKGTSDADAAASPFVIAIEEAGIQVLPSVMNAVILCAVLSVGNSAVFGSSRTLAALANLRQAPKILGYVDRKGRPLVAIAIASAFGLIAFLADLPQQGAVLDWLMSISGLSTIITWGSICVCHIRFRRAWAARGRSVSELPFQSQVGVVGSWIGITLNVLVLIAQFWVGAFPIGWQDLTSSQVAQNFFHKWVGAPCVLAFYIFHKLYFRTTFVRTRDMDVDTGRRDFNVPILVAQEKQERARWPRWKRYYKFMC

SEQ ID NO: 41109 - protein, 719 aa, Ashbya gossypii ATCC 10895
MFGQGYYQGNRDQDSPLQRPPAAQFSSAYMEQQGSHQSLQEHLAYEQLQLQQQQQQQQQHAAAPHANGDGYGAGFTDIPTMLGSVGAPSPAFQPPMVVGMQQQPINTPPPTATSIYSQNNNSFTNVNDTTLAPGHSSPGHYSNSSDYSGQQPASSAYKQFGGSESPLQPAALPGLLDGSLGDQTLVGNQSSQGAMLSRQSLQCSSVPQSPNGGQRQTSGVGNYMYFERRPELLSKSTQEKAAAVKLKVENFYQSSVNHAIERNQRRVELESQLLSHGWSEERKNRQLSSLGKKESQFLRLRRTRLSLEDFHTVKVIGKGAFGEVRLVQKKDTGKIYAMKTLLKSEMYKKDQLAHVKAERDVLAGSDSPWVVSLYYSFQDAQYLYLIMEFLPGGDLMTMLIRWQIFTEDVTRFYMAECILAIEAIHKLGFIHRDIKPDNILIDIRGHIKLSDFGLSTGFHKTHDSNYYKKLLQEDEQQQNGGNMGKYPASGGGGNGGGNRNTMLVDAIHLTMTNRQQMQTWRKSRRLMAYSTVGTPDYIAPEIFLYQGYGQECDWWSLGAIMYECLIGWPPFCSETPQETYRKIMNFEQTLVFPDDIHISYEAEDLIRRLLSHADERLGRHGANEIKNHPFFRGVDWETIRQVGAPYIPKLSSVTDTRFFPTDELENVPDSPAMAQAAKQREQMLKQGGSAANTAQAKEDLPFIGYTYSRFDYLTRKNAL

SEQ ID NO: 41110 - protein, 203 aa, Wolbachia endosymbiont of Drosophila simulans
MGLIGGFCHLSIGQEAVAVGTQAASKLGDAFITSYRDHGLMLACDSDPNVVMAELTGKETGCSKGKGGSMHVFDVEKKFFGGHGIVGAQVPIGTGIAFANKYKKKDNVVFTYFGDGAANQGQVYESFNMASLWELPVVYIIENNEYAMGTSVQRSTLVTELYKRGESFGIPGKQVDGMDFFSVYEATSEAAEHTRSGKGAILL

SEQ ID NO: 41111 - protein, 456 aa, Escherichia coli CFT073
MEGQQHGEQLKRGLKNRHIQLIALGGAIGTGLFLGSASVIQSAGPGIILGYAIAGFIAFLIMRQLGEMVVEEPVAGSFSHFAYKYWGSFAGFASGWNYWVLYVLVAMAELTAVGKYIQFWYPEIPTWVSAAVFFVVINAINLTNVKVFGEMEFWFAIIKVIAVVAMIIFGAWLLFSGNGGPQASVSNLWDQGGFLPHGFTGLVMMMAIIMFSFGGLELVGITAAEADNPEQSIPKATNQVIYRILIFYIGSLAVLLSLMPWTRVTADTSPFVLIFHELGDTFVANALNIVVLTAALSVYNSCVYCNSRMLFGLAQQGNAPKALASVDKRGVPVNTILVSALVTALCVLINYLAPESAFGLLMALVVSALVINWAMISLAHMKFRRAKQEQGVVTRFPALLYPLGNWICLLFMAAVLVIMLMTPGMAISVYLIPVWLIVLGIGYLFKEKTAKAVKAH

SEQ ID NO: 41112 - protein, 221 aa, Pisum sativum
TTSSSDGIPKSEASERIKTGFLHFKKEKYDKNPALYGELAKGQSPPFMVFACSDSRVCPSHVLDFQPGEAFVVRNVANLVPPYDQAKYAGTGAAIEYAVLHLKVSNIVVIGHSACGGIKGLLSFPFDGTYSTDFIEEWVKIGLPAKAKVKAQHGDAPFAELCTHCEKEAVNASLGNLLTYPFVREGLVNKTLALKGGYYDFVKGSFELWGLEFGLSSTFSV

SEQ ID NO: 41113 - protein, 432 aa, Haemophilus somnus 2336
MTTSATLFYRAQQVIPGGVNSPVRAFKGVGGTPVFIEKANGAYIFDIEGKQYIDYVGSWGPMILGHNHPSILSAVLKIAENGLSFGTPTPLEIELAELICQLVPSIEMVRMVNSGTEATMSAIRLARGYTKRDKILKFEGCYHGHSDSLLVKAGSGSLTLGQPSSPGVPEDFAKHTITCEYNNLQSVKNAFEQYPDQIACVIVEPVAGNMNCILPKQDFLQGLRQLCNEYGSLFIIDEVMTGFRVALGGAQSYYEVTPDLTTLGKVIGGGMPVGAFGGKKEIMQYIAPTGPVYQAGTLSGNPIAMSAGIACLNELKKEGNEQRLAMLTKKLALGLKNLANQHNIPLVVNYVGGMFGIFFTTQNEVTSYQQAIQCDIERFNLFFHKMLEQGVYLAPSAFEAGFMSLAHTDADIDRTLQAADIAFASLRSSSFS

SEQ ID NO: 41114 - protein, 408 aa, Photobacterium profundum SS9
MIRRVVVTGMSGVTALGNDWQAIEPKLRACENATQYMVDYEQYDGLNTKLAAPIHGFSLPKHYTRKKIRSMGRVSKLSTLATENALIQSGLLDNDVLTNGETGIAYGSSTGSTPAIGAFGVMLNEKSTRAITATTYVQMMPHTTAVNVGLFFGFRGRVIPTSSACTSGSQAIGYAYEAIKHGYQTVMIAGGAEELCPTESAVFDTLFATSLKNDAPKTTPRPYDTERDGLVIGEGAGTLVLEEYEHAIARGAKIYAELVGFASNCDAAHVTQPQQETMQLCMEMALKNANLSPESIDYISAHGTATEKGDIAESNATANIFGDKAPISSLKSYFGHTLGACGAIEAWLSLEMMNTGWFSPTLNLDNVDERCGALDYICGEGRNIDCQYIMSNNFAFGGINTSLIFKRW

SEQ ID NO: 41115 - protein, 468 aa, Mesorhizobium loti MAFF303099
MRLSNLGTEQLREKDRSFVFHPSTHLAKHSRGETPNRIMAGAEGVYIWDTEGRKSLDGFGGLYCVNMGYGCTEIAEAIARQAHELPFAHVYASQGTEPVALLAEAVVEYFGQNMRRVFFGLSGSDANETNIKLVWYYNNILGRPEKKKIISRHRGYHGSGLVTGSLTGLAFFHNFFDLPLDLVRHTTTPHHYRQAHDGESEQAFSTRCADELEGLILAEGPETVAAFIGEPVLGTGGIVPPPKGYWTAIQGVLDKYDILLIADEVVCGFGRTGEQFGSHLYGMRPDFVTIAKGLSSAYLPISGSIIGDRVWSVLEQGTEKHGALGHGWTYSGHTLCAAAALANIRLLKERNILEHVRDVGPYWHARMNAELAGHPIVGEVRGVGILAAVELMRDPKQRIPFESDLQVGVRAAAALFENGVIGRAMPHGDILGFAPPLIITRKEIDIIVDATAKSVETTYRALKAEGAI

SEQ ID NO: 41116 - protein, 448 aa, Lycopersicon peruvianum
WSPELSSDLYRIDGWGAPYFTVNSSGDISVRPHGTDTLPHQEIDLLKVVKKASDPINSGGLGLQLPLVVRFPDVLKNRLESLQSAFDYAVQSEGYEAHYQGVYPVKCNQDRFVVEDIVKFGSGFRFGLEAGSKPELLLAMSSLCKGSSEGLLVCNGFKDAEYISLALVARKLQLNTVIVLEQEEELDLVIDISRKMAVQPVIGLRAKLRTKHSGHFGSTSGEKGKFGLTTTQILRVVRKLKESGMLDCLQLLHFHIGSQIPSTELLADGVGEAAQVYSELVRLGAGMKFIDIGGGLGIDYDGTKSSDSDVSVGYGLQDYASTVVQAVRFVCNRKNVKHPVICSESGRAIVSHHSVLIFEAVSSTTTRSQELSSMSLHSFVEKLNDDARGDYRNLSAAAIRGEYDTCMLYADQLKQRCVDQFKDGNLDIEQLAAVDAVCDFVSKAIGAS

SEQ ID NO: 41117 - protein, 349 aa, Uromyces viciae-fabae
MATQTLPAQMTALYYEKPRDFSIIKADVPLIDHDEVLLKVSMCGVCGTDQHIHEGEFIAKFPLIPGHEVIGTIVLAGNQVENVKVGDRVVCDVSETCHKCFFCQRGTPLFCESFEAHGVTLNGGFAEYAKFRAAKVFPIKNLTDEQATLVEPASCAVHGLDKIRPKPGSECLLIGAGPTGLMLAQLLKLNGAQRVVLAANKGMKMDIARKINAADEYIDLDRKDAANQWAQLKEDNPHGFDVVVEATGVESIVNDSINYVRRGGTLLVYGVYDNAARVTWSPTKIFQDEINIVGSFAQIHCFPRAVAYLESGKIRTDGMVTHVYKIEEYQEALDKMASRQCLKIAVKPN

SEQ ID NO: 41118 - protein, 388 aa, Taphrina virginica
IGAAFWANISGEHGLDGSGVYHGTSDLQLERMNVYFNEAAAGKYVPRAVLIDLEPGTMDAVRAGPFGNLFRPDNFVFGQSGAGNNWAKGHYTEGAELVDSVLDVVRREAEGCDCLQGFQITHSLGGGTGAGMGTLLISKIREEYPDRMMATFSVVPSPKVSDTVVEPYNATLSVHQLVENSDQTFCIDNEALYDICMRTLKLNNPAYGDLNHLVSGVMSGITTCLRFPGQLNSDLRKLAVNMVPFPRLHFFMVGFAPLTSRGAHSFRSLSVPELTQQMFDPKNMMAASDPRHGRYLTVAAYFRGAVSMKEVEEQMRSVQMKNPSYFVEWIPNNVQTALCSIPPRGLKMSATFIGNSTSIQELFKRVGDQFSAMFRRKAFLHWYTGEGM

SEQ ID NO: 41119 - protein, 448 aa, Lycopersicon peruvianum
WSPDLSSDLYRIDGWGAPYFTVNSSGDISVRPHGTDTLPHQEIDLLKVVKKASDPINSGGLGLQLPLVVRFPDVLKNRLESLQSAFDCAVQSEGYEAHYQGVYPVKCNQDRFVVEDIVKFGSGFRFGLEAGSKPELLLAMSSLCKGSSEGLLVCNGFKDAEYISLALVARKLQLNTVIVLEQEEELDLVIDISRKMAVQPVIGLRAKLRTKHSGHFGSTSGEKGKFGLTTTQILRVVRKLKESGMLDCLQLLHFHIGSQIPSTELLADGVGEAAQVYSELVRLGAGMKFIDIGGGLGIDYDGTKSSDSDVSVGYGLQDYASTVVQAVRFVCNRKNVKHPVICSESGRAIVSHHSVLIFEAVSSTTTRSQELSSMSLHSFVEKLNDDARGDYRNLSAAAIRGEYDTCMLYADQLKQRCVDQFKDGNLDIEQLAAVDAVCDFVSKAIGAS

SEQ ID NO: 41120 - protein, 328 aa, Magnetospirillum magnetotacticum MS-1
MSDASLSASSQKIPVTVLTGYLGAGKTTLLNRILTEPHGKRYAVIVNEFGEIGIDNDLVVGADEEVFEMNNGCVCCTVRGDLIRIMDGLVKRRGKFDAIIVETTGLADPAPVAQTFFVDQDVGEAARLDAVVTVADAKWLSDRLADAPEAKNQIAFADVILLNKADLVAKEDLDRVEGQIRGINPYAKVHRTERCNIALDAVLDRKAFDLSRILDLEPDFLEEGHHHHHDAQMQSVSAKIDGPVDPEKFMPWISNLTTVQGPDILRCKGIVAFPDEPNRFVFQGVHMILDGDLQGAWGVDETRVSRVVFIGRNLDPEAIREGFYACKA

SEQ ID NO: 41121 - protein, 881 aa, Shewanella oneidensis MR-1
MTDMYASLRSNVSMLGQILGDTMRTHLGDSFLEKVEQIRKLAKDSRRGDEAAREQMLELLTALPDEELVPFAKAFNQFLNLANLSEQFHTISRNCDELVCVPDPVEQLLGRMLNGRVDQTKMLDCLKTLDIDLVLTAHPTEISRRTLIQKYAAIVDCLAEQENNQLSDRERQQINLRLRQLIAQIWHTNEIRRERPTPVDEARWGLSTIEESLWHAVPDFLRQLNDQVQERTGQQLPIDIAPVRFSSWMGGDRDGNPFVTAKVTQEVLDRNRHAAARLFLKDIVLLVGELSMEEANDELKAYTNNSCEPYRFVLRSLRQKLRDTIDYLNARIEGHNPEVDKSTLIWQESDLKAPLEMLYKSLYDCGMRLIANGLLLDILRRLACFGIHMLRLDIRQDAGRHCDVLAELTRYLGMGDFNHWDETEKQAFLLRELSNRRPLIPSNWQPSADVAEVLNTCRLIAKHPAKALGSYVISMASKPSDVLTVLLLLKETGCTHPMRVVPLFETLSDLNNAAACITDLLDIDWYRGYTKGMQEVMIGYSDSAKDAGVMAAAWAQYRAQEQLVAVCNQAGVKLTLFHGRGGSIGRGGGPAHKAILSQPPGSVDGRIRVTEQGEMIRFKFGLPKLAVQSLALYTSAVLEATLLPPPEPKQEWRNCMERIAEESVSAYRGIVREEPDFVAYFRAATPEVELGKLPLGSRPAKRRVDGGIESLRAIPWIFAWSQNRLMLPAWLGAGEALQAACQRGEIGLLQDMEREWPFFSTRISMLEMVYAKAEPNLARYYETCLVSTNLHHLGETLRQRLDLGIKVVLELTKSDTLMAHTPWNRESVKLRNPYIDPLNFLQTELLARTRKETSETPASEHVQLALMLTIAGVAAGMRNTG

SEQ ID NO: 41122 - protein, 267 aa, Cryptococcus neoformans var. neoformans B-3501A
MSAISRPITSRLWNHYTTALRERPLRTKMIQSGVLFITADIVAQLGIEGRSLRRAISGEEGDEVYEPLRTARLVSYGTIIFAPLAHMWLSTLEKISLSSRWTTLASRLVLDMTVWSPCVTFMFPTSLGLLEGKSIKEVRHKVAMGWFPTWQKAVCVFGPTQILNFTLVPAQHRLLFVQSVGMCWNIFLSWQNNRNNKVLAAATLKLAVARVHVSEIESEENPEENEVEQAEKELEKAQAAVKRAEEKKERMRKEGGEAGVGVRMGWS

SEQ ID NO: 41123 - protein, 350 aa, Saccharomycopsis capsularis
GAAFWQTICGEHGLDDSGNYHGNNDLQKARLNVYFNEAMSGKYVPRAVLVDLEPGTIDNVRSSSIGDLFRPDNMIFGQSSAGNVWAKGHYTEGAELVDSVLDVIRREAEGCDSLQGFQISHSLGGGTGSGMGTLLISKICEEYPDRMMATFSVVPSPKTSDTVVEPYNATLSIHQLIENSAETFCIDNEALYDICLRTLKLPQPNYNDLNQLVSCVMSGVTTSLRYPGQLNSDLRKLAVNLVPFPRLHFFMVGYAPLTSIGARSFSSLSVPELTQQLFDPRNMMAASDPRQGRYLTAATFFRGKASVKEVEDEMHKIQTRNSAGFVEWIPNNVQTAVCSVPPQDSDMSAT

SEQ ID NO: 41124 - protein, 276 aa, Arabidopsis thaliana
MGKDIELPGFRFHPTEEELLDFYLKNMVYGKRSSVEVIGFLNIYRHDPWDLPGLSRIGEREWYFFVPRERKHGNGGRPSRTTEKGYWKATGSDRKIISLSEPKRVIGLKKTLVFYRGRAPGGSKTDWVMNEFRMPDNCSLPKDVVLCKIYRKATSLKVLEQRAEMEAKMNQTCPNSPLSSSETISFVGKEENMMTSFRAPQVIAMEEANKIQMHQENAKTEEKQREAETKEPSSSLKLPFGSLPELQLPKPGVEWDQLLSISPWLQNLTPIVNIYW

SEQ ID NO: 41125 - protein, 372 aa, Saitoella complicata
GASFWQTIAGEHGINGSGHYEGTSDLQLERMNVYFNEAAGGKYVPRAVLVDLEPGTMDAVRAGPFGELFRPDNYIFGQSGAGNNWAKGHYTEGAELVDSVLDVVRREAEGCDCLQGFQITHSLGGGTGAGMGTLLISKIREEYPDRMMATFSVVPSPKVSDTVVEPYNATLSVHQLVENSDETFCIDNEALYDICMRTLKLTNPSYGDLNHLVSAVMSGITTCLRFPGQLNSDLRKLAVNMVPFPRLHFFMVGFAPLTAPGARSFRALSVPELTQQMFDAKNMMAASDPRHGRYLTVAAIFRGQVSMKEVEEQMRSVQTKNSSYFVEWIPNNVQTALCSIPPRNLKMSSTFIGNSTSIQELFKRVGEQFSAM

SEQ ID NO: 41126 - protein, 416 aa, Cryptococcus neoformans var. neoformans B-3501A
MAENYQKKELLALMNTGGNKVCVDCNAPSPQWASVSYGIFICLECSGVHRGFGVHISFVRSITMDKWSDEQLNKMKTGGNEKFKDFMENYGPEGGYTKGMGMQEKYNSWAAAQYREKLTAECAGQPWSASSPPANFGLPSRPASSQTTRKSRAAGGITGSSLNPSRTNSPSIPQGSDDLYGQKSANEAFFERMGNANATRPDHLPPSQGGKYSGFGSTLEPDVASSHPSYSLSSHAAPTLDEFQRNPLGALTKGWGLFSSAIVSAGREINNAVVQPGLDRAQALAAGENSEEWKRYVNQASAQAKDAGGWLGQRAHEGWEGLNDVAKTKGGVDLNESFGKLGLGKSSIPGSRGYGQAGALDRAEDGLLSPHGAGNDDEEDFFESWGATPTASTTSATTGAKSIADKGKKKDDEKNE

SEQ ID NO: 41127 - protein, 59 aa, Triticum aestivum
MSWWWAGAVGAVKKLQDQRAAAAEPTFQSVGLILGFTGIVGTFLLDILPRGDTLGGLWE

SEQ ID NO: 41128 - protein, 338 aa, Aspergillus oryzae
MATPKVGINGFGRIGRIVFRNAIASGDVDVVAVNDPFIETHYAAYMLKYDSTHGRFQGTIETYDEGLIVNGKKIRFFAERDPAAIPWGSAGAAYIVESTGVFTTTEKASAHLKGGAKKVIISAPSADAPMFVMGVNNKEYKTNINVLSNASCTTNCLAPLAKVINDKFGLVEGLMTTVHSYTATQKTVDAPSAKDWRGGRTAAQNIIPSSTGAAKAVGKVIPSLNGKLTGMSMRVPTANVSVVDLTCRTEKAVTYEDIKKTIKAASEEGELKGILGYTEDDIVSTDLIGDAHSSIFDAKAGIALNEHFIKLVSWYDNEWGYSRRVVDLIAYISKVDGQ

SEQ ID NO: 41129 - protein, 340 aa, Prochlorococcus marinus str. NATL2A
MGIPLESAKEISDVSSGKSNSASTSQKLSASTVSSQKSRSSRRQSNRLATDAIGFYLTSIGRVPLLTPAEEIELAHHVQQMKDLLNLPLEERSTRQKHKIKMGKRARDRMMAANLRLVVSVAKKYQNQGLELLDLVQEGAIGLERAVDKFDPAMGYKFSTYAYWWIRQGMTRAIDNSARTIRLPIHISEKLSKMRRISRELSHRFGRQPNRLELANAMGIEPQDLEDLVSQSAPCASLDAHARGEEDRSTLGELIPDPNSDEPMEGMDRSIQKEHLGGWLSQLNEREQKIMRLRFGLDGEEPLTLAEIGRQINVSRERVRQLEAKAILKLRVMTTHQNAA

SEQ ID NO: 41130 - protein, 205 aa, Erwinia carotovora subsp. atroseptica SCRI1043
MITIWGRDNSTNVKKVLWCAEELALPYQHIAVGGQFGRNHDADYLAMNPNGLIPCLQDDDLVLWESNTIVRYLAAQYGQNSLYLTDAGERAGAEKWMDWTSSLAASFGPVFINMVRIAPEKRDMVLVQKGMAECERLFGIVDTVLASQQWLSGDRFGVGDIPLGCVVYGWLNMPIERQTHPHLERWYQQLAARPAYQKHVMIPLS

SEQ ID NO: 41131 - protein, 281 aa, Zea mays
MAPSSYEVAASILLCAEDSSSILDLEAEAEEEALLARSGEPGGGAEFPVPSEECVAGFLESEAAHMPREDYAERLRSGGMDLRVRTDAIDWIWKVHTCYGFGPLTACLAVNYLDRFLSLYQLPEGKAWMTQLLSVACLSLAAKMEETYVPSSLDLQAGDARYVFEAKTIQRMELLVLSTLKWRMQAVTPLSYVDYFLHRLRGGAAPSRRAVLRSAELILCIARGTHCLDFRPSEIALAVAATVAGEERAVDIDRAFTHRVHKVRVVPASAFSLALSSDSIG

SEQ ID NO: 41132 - protein, 336 aa, Zea mays
GPSGGAAHSTSTGGGGGSPSDRGGPAPSASASVSTPASESTVARRLNGLDPHGDDAPSSQPATSKKKKRGARAVGPDKNGRGLRQFSMRVCEKVESKGRTTYNEVADELVAEFSDPNINIDSPDPDNSSAQQYDEKNIRRRVYDALNVLMAMEIISKDKKEIQWRGLPKTSMNDIEELKTEVNGLKGRIDKKNAYLQDLQDQYACLQNLVRRNEQLYGSGDAPSGGVALPFILVQTRPHATVEVEISEDMQHVHFDFNSTPFELQDDSFVLKAMALSGEETDCTQAPGANGGECSSTRNNYWHHHQQPQPPGPRVVRVPNSPPIPGILKGRVKHEH

SEQ ID NO: 41133 - protein, 195 aa, Pseudomonas syringae pv. phaseolicola 1448A
MEQEKSSCLRHGVTLSEKDLSRFLGTTQHYMWSTIKNEYALTESIDHLMGQHQQQLMRSISFESFQSMPGVEALLNLLEHTGVPCAVASSSPRNLVELILEKTKLRRFFKKVICGTDVKESKPNPEIFLTAAKGLGVSPRSCLVIEDSHHGVTAAKAAHMFCIGLRHPGSLQQDLSAADLIANNHYEIKQWFAEK

SEQ ID NO: 41134 - protein, 737 aa, Frankia sp. EAN1pec
MCSLSWSTYSGPPGVIVNESRVAAALPDYELGAQLGQGAFGLVLAGRHRELHRDVAIKILSGGPEETAGYGRAEARLLAALDHPHIVRIYHAVATDDLHLIVMELLAGGTLTRRRADMTGETACAVGLAVATALSAAHARGVLHRDIKPDNILFDATGLLKVTDFGIAKMMEGTATTASAVIGTPRYMAPEQLLGTRLGPATDLYALGVLLYELLTGAPPFALALPAPVLIHHHLHVRPEPPAGVPGPLADVVMRTLAKDPADRPGSARAFARELTQAAAEAYGPGWTSQTGIALRFDDDIRALAEATTPAVAVPTMPTSPPPPVPAPPAPAPASIDELPTRWAAPQPSAPSQRGADAGAARPTQRAGQAVPIWLRRRLPLAAVGLLILVTVVILALSRSGKQPGVPSASEGSGSTASTNSRTLGAPLAGHTSTVRAVAFSPDGRILASASDDEPVRLWDVTDPGDARPLDASLTGHSGWVHSVAFSPDGHTLASAGDDHTVRLWNVTDPANAHPLGAPLTGHTSTVWAVAFSPDGRILASAGNDETVTLWDVADPAQARPLDVISETRAVRSVAFSPDGRILASAGDDGTASLWNVADPTNPRPLGTPLAGHTNTVWVVAFSPNGHTLASAGDDHTVRLWNVTDPANAHPLGAPLTGHTSTVRSVAFSSDSRTLASGSDDHTVRLWDVIDPANAHPRGASLTGHSSWVRSVAFAPDGRTLASGSDDHTMRLWDVTS

SEQ ID NO: 41135 - protein, 545 aa, Campylobacter lari RM2100
MKLKQTKYIFVTGGVLSSLGKGIAAASIATILKNSGLKVSILKADPYINVDPGTMSPLEHGEVFVTDDGAETDLDLGHYERFLNESLSQDNNFTTGRVYQSVIEKERRGDYLGKTIQVIPHIVDEIKDRIKRAGVDKDILIVEIGGTVGDIEGLPFLEAIRALKLEVGKYNAINIHLTLVPFIKAAGELKTKPTQHSVGELRRIGISPDMIICRSEKSLDRELKDKIAISCGVEKNCVIESVDAASIYQIPLNFLKQDILNSIASLLDLQNLKPNMNEWDSLVKRVIAPSNELSIAFVGKYVDLKESYKSLTEAIIHAGAALDARVNLKWIDSEKLENANVEESFKDVSGILVAGGFGYRGVEGKIKAIQYARENKIPFLGICLGMQLSLVEFARNVLKLEDANSHEFDPKCKNPIIFLIDEFIDASGEKQIRTSKTPLGGTMRLGAYECHIKPNTLLSKVYDNQKIIKERHRHRYEANPKYKEMFEKNGLIISGENEGLVEAVELKDHPFFLAVQFHPEFTSRLVRVNPAIFSFIKASLINHAK

SEQ ID NO: 41136 - protein, 370 aa, Ipomoea nil
MSSATTSQAAAEKGSKASTKKGIKETLLTPRFYTTDFDEMEMLFNTEINKNLNNSELRVLQEFKKDYNQTHFVRNKEFKEVADKLQGPLREIFVEFLERSCTAEFSGFLLYKELGRRLKKTNPVVAEIFSLMSRDEARHAGFLNKGLSDFNLALDLGFLTKARKYTFFKPKFIFYATYLSEKIGYWRYITIYRHLKANPEFQCYPIFKYFENWCQDENRHGDFFSALMKAQPQFLNDWKAKLWARFFCLSVYVTMYLNDCQRTAFYEGIGLDTKEFDMHVIIETNRTTARIFPAVLDVENPEFKRKLDRMVEINQKLLAVGETDDIPLVKNLKRIPLVAALVSEILAAYLMKPVESGSVDLAEFEPQLGY

SEQ ID NO: 41137 - protein, 408 aa, Arabidopsis thaliana
  misc_feature (212)..(212): Xaa can be any naturally occurring amino acid
  unsure (1)..(408): unsure at all Xaa locations
MASLDSLVIFLFSTLFVTIVSSETPCPNFKSIISFGDSIADTGNLVGLSDRNQLPVTAFPPYGETFFHHPTGRSCDGRIIMDFIAEFVGLPYVPPYFGSKNRNFDKGVNFAVAGATALRSSFLKKRGIQPHTNVSLGVQLKSFKESLPNLCGSPSDCRDMIGNALILMGEIGGNDYKFPFFNRKPVKEVEELVPFVIASISSTITEFIGIGXKTFLVPGEFPIGCSVVYLTLYKTSNKDEYDPSTGCLKWLNKFGEYHSEKLKVELNRLRKLYPHVNIIYADYYNSLLRIFKEPAKFGFMERPFPACCGIGGPYNFNFTRKCGSVGVKSCKDPSKYVGWDGVHMTEAAYKWIADGILNGPYANPPLDRSCLRSEIKKESLYNQSTLTQACVKALTDKSDDKHIPSIPS

SEQ ID NO: 41138 - protein, 404 aa, Triticum aestivum
  misc_feature (155)..(155): Xaa can be any naturally occurring amino acid
  misc_feature (218)..(218): Xaa can be any naturally occurring amino acid
  misc_feature (280)..(280): Xaa can be any naturally occurring amino acid
  misc_feature (320)..(320): Xaa can be any naturally occurring amino acid
  unsure (1)..(404): unsure at all Xaa locations
MEAPPGPEPMVLDAPPPLAAAVVPAPAATEKTRTEGGDPVTGHIISTTIGGKNGEPRRTISYMAERVVGTGSFGIVFQAKCLETGETVAIKKVLQDRRYKNRELQLMRSMDHPNVVSLKHCFFSTTSRDELFLNLVMEYVPETLYRVLKHYSNAXNQRMPLIYVKLYMYQLFRGLAYVHTVPGVCHRDVKPQNVLVDPLTHQVKICDFGSAKVLVPGXEPNIAYICSRYYRAPELIFGATEYTTSIDIWSAGCVLAELLLGQPLFPGETAVDQLVEIIKXFLGTPTREEIRCMNPNYTEFRFPQIKAHPWHKIFHKRMPXEAIDLASRLLQYSPNLRCTALDACAHSFFDELREPNARLPNGRPFPPLFNFKPELANASPELINRLVPEHVRRQNGPNFAHAGS

SEQ ID NO: 41139 - protein, 495 aa, Escherichia coli CFT073
MDNGRHKKNVRPAGDKYIEVMMSTEIKTQVVVLGAGPAGYSAAFRCADLGLETVIVERYNTLGGVCLNVGCIPSKALLHVAKVIEEAKALAEHGIVFGEPKTDIDKIRTWKEKVINQLTGGLAGMAKGRKVKVVNGLGKFTGANTLEVEGENGKTVINFDNAIIAAGSRPIQLPFIPHEDPRIWDSTDALELKEVPERLLVMGGGIIGLEMGTVYHALGSQIDVVEMFDQVIPAADKDIVKVFTKRISKKFNLMLETKVTAVEAKEDGIYVTMEGKKAPAEPQRYDAVLVAIGRVPNGKNLDAGKAGVEVDDRGFIRVDKQLRTNVPHIFAIGDIVGQPMLAHKGVHEGHVAAEVIAGKKHYFDPKVIPSIAYTEPEVAWVGLTEKEAKEKGISYETATFPWAASGRAIASDCADGMTKLIFDKESHRVIGGAIVGTNGGELLGEIGLAIEMGCDAEDIALTIHAHPTLHESVGLAAEVFEGSITDLPNPKAKKK

SEQ ID NO: 41140 - protein, 331 aa, Kluyveromyces marxianus
MVSIAINGFGRIGRLVLRIALERKNIDVVAINDPFISVDYAAYMFKYDSTHGKYKGEVSHDGSNLIINGKKVAVFQEKDPATLPWGKLGVDIAVDSTGVFKELDSAQKHIDAGAKKVVITAPSKTAPMFVVGVNEDKYNGEKIVSNASCTTNCLAPIAKIINDEFGIEEGLMTTVHSITATQKTVDGPSHKDWRGGRTASGNIIPSSTGAAKAVGKVLPELQGKLTGMAFRVPTTDVSVVDLTVKLVKAATYDEIKAAVKKVSEGKLKDVVGYTEDAVVSSDFLGDTHSTIFDAAAGIQLSPKFVKLVAWYDNEYGYSTRVVDLVEHVAKN

SEQ ID NO: 41141 - protein, 135 aa, Candida glabrata CBS138
MVVQARDASQVFGVARIYASFNDTFVHVTDLSGRETIARVTGGMKVKADRDESSPYAAMLAAQDVAAKCLEVGITAVHVKIRATGGTRTKTPGPGGQAALRALARSGLRIGRIEDVTPVPSDSTRKKGGRRGRRL

SEQ ID NO: 41142 - protein, 429 aa, Arabidopsis thaliana
MIGTNECINLLKFFVFVCSAARRRNPLSGTRIKTRKRNIAAPLDPAAFSDAVVQIYHDNAGDLELVAKSIESSDLNFTRYGDIFFEVIFIGGRTQPGTVKSDEGERHTYSVIDCEPKREAILPSVVYIQKILRRKPFLIKNLENVTRRFLQSLELFEENERKKLAIFTALAFSQKLSGLPPETVFQPLLKDNLVAKGIVLSFVTDFFKEYLVENSLEDLISILRRGKMEDNLMDFLPPVRRSAESFAEHFTNEGLTDLVEYHSKKMFEVKLREIKTVLTSKVTEESNVDEVIESVKQQIKDAKLPDIEVVRVVWDGLMDAVQWSGKNQQQNANSVLRQVKTWAPLLNTFCTSGKLELELMYKVQMQCYEDAKLMKVFPEVVRSLYELDVLAEDTILHWFRKGTNSKGRQTFVKSLEPFVNWLEEAEEEE

SEQ ID NO: 41143 - protein, 173 aa, Glycine max
MGASLSVSEKSIHEFMVKDAKGRDGRDVNLSIYKGKVLLVVNVASKCGFTNTNYTQLTELYSKYKDRGLEILAFPCNQFLKQEPGSSQDVEEFACTRYKAAYPIFGKVRANGPDTAPVYKFLKANKSGFLGSRIKWNFTKFLVAKEGNVLRRYGSTTSPFSIENDIKRALGEA

SEQ ID NO: 41144 - protein, 331 aa, Kluyveromyces marxianus
MVRIAINGFGRIGRLVLRIALSRKNIEVVAINDPFITVDYAAYMFKYDSTHGRFDGEVSHDGKALIIDGKKVLVFQERDPATLPWGAEKIDIAIDSTGIFKELDSAQKHIDAGAKKVVITAPSSTAPMFVVGVNEDKYAGQTIVSNASCTTNCLAPLAKIINNAFGIEEGLMTTVHSITATQKTVDGPSHKDWRGGRTASGNIIPSSTGAAKAVGKVLPELQGKLTGMAFRVPTVDVSVVDLTVKLAKPATYEEIKAVVKKASENELKGVMGYTEDAVVSSDFLGDTHSSIFDAAAGIQLSPQFVKLVSWYDNEFGYSTRVVDLVELVAKN

SEQ ID NO: 41145 - protein, 292 aa, Arabidopsis thaliana
MGVMINHHFLAFIFGILGNVISFLVFLAPVPTFYRIYKRKSTESFQSLPYQVSLFSCMLWLYYALIKKDAFLLITINSFGCVVETLYIAMFFAYATREKRISAMKLFIAMNVAFFSLILMVTHFVVKTPPLQVSVLGWICVAISVSVFAAPLMIVARVIKTKSVEYMPFTLSFFLTISAVMWFAYGLFLNDICIAIPNVVGFVLGLLQMVLYLVYRNSNEKPEKINSSEQQLKSIVVMSPLGVSEVHPVVTESVDPLSEAVHHEDLSKVTKVEEPSIENGKCYVEATRPETV

SEQ ID NO: 41146 - protein, 176 aa, Arabidopsis thaliana
MVCLVSRTGRQSQRYNKGRRQVVGCIPYRLKISSDGTISDEFEVLVISSQKGHALMFPKGGWELDESVEEAASRESLEEAGVVGNVERQLGKWDFLSKSKGTFYEGFMFPMLVKEELELWPEQHLRQRIWMKVDEARDACRDWWMKEALDVLVQRLSLLSLKPMEEDENLPLISIY

SEQ ID NO: 41147 - protein, 448 aa, Lycopersicon peruvianum
WSPELSSDLYRIDGWGAPYFTVNSSGDISVRPHGTDTLPHQEIDLLKVVKKASDPINSGGLGLQLPLVVRFPDVLKNRLESLQSAFDYAVQSEGYEAHYQGVYPVKCNQDRFVVEDIVKFGSGFRFGLEAGSKPELLLAMSSLCKGSSEGLLVCNGFKDAEYISLALVARKLQLNTVIVLEQEEELDLVIDISRKMAVQPVIGLRAKLRTKHSGHFGSTSGEKGKFGLTTTQILRVVRKLKESGMLDCLQLLHFHIGSQIPSTELLADGVGEAAQVYSELVRLGAGMKFIDIGGGLGIDYDGTKSSDSDVSVGYGLQDYASTVVQAVRFVCDRKNVKHPVICSESGRAIVSHHSVLIFEAVSSTTTRSQELSSMSLHSFVEKLNDDARADYRNLSAAAIRGEYDTCMLYADQLKQRCVDQFKDGNLDMEQLAAVDAVCDFVSKAIGAS

SEQ ID NO: 41148 - protein, 448 aa, Pseudomonas putida KT2440
MNMPETGPAGIASQLKLDAHWMPYTANRNFQRDPRLIVAAEGNYLVDDHGRKIFDALSGLWTCGAGHTRKEIADAVTRQLSTLDYSPAFQFGHPLSFQLAEKIAELVPGNLNHVFYTNSGSECADTALKMVRAYWRLKGQATKTKIIGRARGYHGVNIAGTSLGGVNGNRKMFGQLLDVDHLPHTVLPVNAFSKGLPEEGGIALADEMLKLIELHDASNIAAVIVEPLAGSAGVLPPPKGYLKRLREICTQHNILLIFDEVITGFGRMGAMTGSEAFGVTPDLMCIAKQVTNGAIPMGAVIASSEIYQTFMNQPTPEYAVEFPHGYTYSAHPVACAAGLAALDLLQKENLVQSAAELAPHFEKLLHGVKGTKNIVDIRNYGLAGAIQIAARDGDAIVRPYEAAMKLWKAGFYVRFGGDTLQFGPTFNTKPQELDRLFDAVGETLNLID

SEQ ID NO: 41149 - protein, 364 aa, Zea mays
MATQWFSNMVMDEPSFFHQWQSDTLLEQYTEQQIAVAFGQGEPVDHAVAAALATAMPMQLQQPAAAEQPHHRPRKAAKVNTSWDSCITEQGSPAADSSSPTILSFGGHTAFAKAEPTTHQPPSGCAGYYGAAAAAKAPKQEMMDAAAMPPFQQARQAKRSYDDMATVAEAANAPSANTRPASQNQDHILAERKRREKLSQRFIALSKIVPGLKKMDKASVLGDAIKYVKQLQDQVKGLEDDARRRPVEAAVLVKKSQLSADDDEGSSCDENFVATEASGTLPEIEARVSDRTVLVRIHCENRKGVLIAALSEVERLGLSIMNTNVLPFTASSLDITIMAMAGDDFCLSVKDIVKKLNQAFKSSF

SEQ ID NO: 41150 - protein, 2471 aa, Pirellula sp. 1
MNSPERDLSERLAKLSPEQRAALRKRLARSSSSTSAPATQRADSGQSKAAVEPIAIVGVSCRFPGAPDLDAYWKVISEGIDATAEIPPERWDVDSLYDPTGQKAGRMSVRRAGMVDNIDQFDPKFFGISPREAARMDPQQRLLLEVSWEAFEIAGIPVTSLAGTPVGAYVGIGGTDYSKVPSTYDGYYQYIDAHVGTGNALSIAANRLSYIMDLRGPSMAIDTACSSSTMAIHLAVQSLRAGECDAALAGGVNAILTPETTIAFSKARMLSPDGQCRPFDADANGYVRGEGCGMLLLKRLSDAERDGDRIWGTILASATNQDGRTSGITAPNGVSQQAVIRTALGEAGLPASRVNYIEAHGTGTPLGDPIEVDALTQVFSGKPGVDPPCYVTSVKANVGHMETVSGVAGIIKLLLMMRHQTIPGQLHLNKLNPRMSLKRSRIVIPAQSPPWPVDDEPLVAGVSSFGFGGANTHLVMQQYLAKQTVEPSASKQSDTKDRTQHVLSLSGKSDAAIAEVASRLIQHLDRTNDHMADVAHTMNVGRVHHTHRTAVVFEDAKQLHRQLTQLSEGKKGPGIRSGQTVTSRATRTAFLFTGQGSQAPGMGRGLFETQPVFRKSMKRCDELLAKVLPKRLLDVLYGEGSDIELVHQTRYTQPALFAIEYSLAQLWLSWGVKPNVVLGHSVGEFAAACVAGVVSLEDALSLIAHRGRLMGELPAGGGMTAMFESAEVITDRLGEFESSVSGSLSIAAENGPQNTVVSGPQSDLDAFAKHCDEAGIASKALQVSHAFHSQLMEPMLDEFRQIAAQCEFKSPRIPLISNLTGEQWTKAWDADYLCDHIRNAVRFEPSMRALAEMDIDVMLEVGPSPILSGMGKRCLPESSATWATSLRSGKDDETTLFEAVGDVHARGGKIDWKAFDQPWKRQRLVLPTYPFDRQRYWLDPSDEIVEDPSRNRTGTGELLHPMLGRFQPSALRSRLYENALSARSPEFLADHAVQGSVNLPGAAFVEVAFAAARDRFGPGKHAVTDANIEQAMFVSEDRWKTFQTIVDESLSLEVYSRDRVDANDSWQRHMSASLVPAEQVGDSVDVEVVPPPPGLATVAQRFVGGKDHDEFYDLMSHRRLEYGPRFRMLHRIDYSIDEALGQVQCDDATCAELDDYILHPVLGDALMQTFSALVPRPDHDTFSEATYMPTKVSRAVVYQRPEGTLRTYGRRSSSGDVLDPEFVEGDVWLVNERDEVVAEWTGVRVTRVGRVGGGKSESLDDSLYQIDWQATESLPAASDLEGKQVWLLGDPGSRRDSLAKQLIGFGAEVVEGDLDEDLKTLAEKSESTLPLAALITLWDPSGKSSNPADDAVAVCQSALKQIRSAITHVPVSKHFRGWWHVTTGTQPVSESESSIDLVHAPLWGMIRVAMMELADLKPSLLETDPSASDQSNGLVIAAEVIAADDEDHVAYRDGTRHLGRLVKRRAPAESGNDTSVTIPSQPHRLRFRQTGSFDSLYFEPMERETPQGSEVELRVNAAGLNFSDVLKVMGLYPGITDKVVPLGIECSGVVTAVGKDAKRFQVGDQVMGVAPFSFGSHAKTPEYTLVKRPAGMDDVEAATIPIAFLTAWYGLVHLADVQPGERVLIHAGAGGVGLAATQIAQYLGAEIIATAGSDEKREFLRECGVKHVFNSRTTEFADDIRRAFSGEGVDVVLNSLPGEAIPKSLGVLNAYGRFLEIGKTDIYQDRKVGLLPFQDNLSYHAIDLDRVLRQRPAKIEKLWAELAERFEAGDLQPIACTEFDQTEMVETFRYMAQRKNIGKVITRMSTIATTDAVPQEEASESTVLITGGTGAIGLKLAKHLIKDGATSIALLSRRQPVGDVAAKIDALKQDADSVQVTVLQGDVGELDSLRSALKQLPGSLPPIRHVYHAAGVLQDGLLMDMTEEQLRVPMGSKIQGGWNLHVATKDLPIETFVLFSSIAACLGSPGQANYAAANGFLDALSEYRREKGLPATSIAWGPWAESGMAATEDRSSQLESRGMRLLPAIACLQTMQQLIDAGDQYVAVMDVDWPAMTKSMRRSRPFFAEFADRSQVDGKASVDQVDHEFRAQLSEVPESERTERLRRYFASELARLMGWEAEQIDVKQKLSELGMDSLIAMELKNNLEQRLAITIPMSALVESPSINSLVGHVVSQFADEDGEMKKASEKSEEPGGDRTALIVPLKADGARSPWLCIHPLGGSTACYSEFSQQVDDDQPVYALVGGGSDGVSEPPTSLDAMMEEYVELVQAQFGDDELRLIGWSAGGVFALELARRLENEGRSNVAVTLLDTPLPSIYRNVDPNDDVQFVADLVQFSNAFSGTDMYLSAEELEDARGTDQIWQRVLEEAQRAGVLSQSASPDMVRKLIDTSRQHVLFIKSYEIDPTSPSVQLILPVKTTALEGSSGERWTDHLDWASHLDSEVIVEQTDGDHFTMLLGEQAKELAKRMEQHAAAK

SEQ ID NO: 41151 - protein, 421 aa, Bacillus halodurans C-125
MDSIALMDNVWIMLCAVLVLLMQGGFILLEAGSTRMKNAGHIAGKTIFTVGIASLVYWAVGWGFTYGEGNAFIGLSDFFFGDYSTAEEGLVGSVDFFFQLMFAAIALTIAFGGFAERAKLSVYILFAVLFSAFVYPIVAHWIWGDGWLADLGKQDFAGSTVVHLTGAMGALAATILLKPRLGKYNKDGSMNDIQGHNQVYTALGVLLLWVGWFGFNAGSTLEVADAFFGYVALNTQLAAAAGAVAAMFIAWALSGKADVPTTLNGALAGLVAITASCAFVAPWAAVVIGIVGGLIVYFSMKFFDKAKIDDPIFALSVHGVAGVWGTLSTGFFATPELAEMNGGQAGLFYGGGFAQLGVQTLSVVACGVFAFIASYVLLLVCKSVLGGLRVTEEEEIIGLDLSEHGSYGYPESMPGSEKSGA

SEQ ID NO: 41152 - protein, 634 aa, Gladiolus hybrid cultivar 'Traveler'
MEGCDCIEPQWPADELLVKYQYISDFFIALAYFSIPLELIYFVKKSSFFPYRWVLIQFGAFIVLCGATHLINLWTFTMHSKTLALVMTVAKVSTAVVSCATALMLVHIIPDLLSVKTRELFLKNKAEELDREMGLIRTQEETGRHVRMLTHEIRSTLDRHTILKTTFVELGRTLDLAECALWMPSRTGLNLQLSHTLHNQIPVGSTVSINLPTVNQVFNSNRAVRIPHTSPLARIRPLAGRYVPPEVVAVRVPLLHLSNFQINDWPELSARSYAVMVLILPSDSARKWHVHELELVEVVADQVAVALSHAAILEESMRARDLLMEQNVALDLARREAEMAIRARNDFLAVMNHEMRTPMHAIIALSSLLLETELTPEQRIMVETMLKSSNLLATLINDVLDLSRLEDGSFELEKSSFNLHTVFREVINLIKPIAAVKRLSVSVSLAPDLPLCAMGDEKRLMQTILNVAGNAVKFTKEGHISITASVSRPDSFRDPQVHEFYPVFTDGHFYLCVQIKDTGCGISPQDIPFLFTKFAHTQNGGNKGYSGSGLGLAICKRFISLMEGHIWLESEGLGKGCTATFIVKLGICESQNGHQQQMIPTNRLLLGGADFPGPGALLKEDNKAIPSKLRYLSV

SEQ ID NO: 41153 - protein, 426 aa, Triticum aestivum
  misc_feature (109)..(109): Xaa can be any naturally occurring amino acid
  misc_feature (163)..(163): Xaa can be any naturally occurring amino acid
  misc_feature (275)..(275): Xaa can be any naturally occurring amino acid
  misc_feature (295)..(295): Xaa can be any naturally occurring amino acid
  misc_feature (307)..(307): Xaa can be any naturally occurring amino acid
  misc_feature (347)..(347): Xaa can be any naturally occurring amino acid
  misc_feature (366)..(367): Xaa can be any naturally occurring amino acid
  misc_feature (375)..(375): Xaa can be any naturally occurring amino acid
  unsure (1)..(426): unsure at all Xaa locations
MAAASFTAAKFLAPAAARSGGDRARPFPAPSASSMRPLRHRPARRLGSVLAVSSDVLKAAPAAAAYPAVTREEALELYEDMILGRNFEDMCAQMYYRGKMFGFVHLYNXQEAVSTGFIKQLNQPDCVVSTYRDHVHALSKGVPARAVMAELFGKATGCCQGQXGGSMHMFSEPHNLLGGFAFIGEGIPVATGAGFAAKYRHEVLKQSSPDGLDVTLAFFGDGTCNNGQFFECLNMAQLWKLPIIFVVENNLWAIGMSHLRSTSDPEIWKKGPAFXGCLGVHVDGMDVLKVREVAXKEAIDRARRGEXGPILSGSVETYRFRGHSLADPDEPRRPDEKSHYAARDPSXILEEYIIQQNLASEAELKXXEKKIDDSXRAVELPTQPLPHGATAGNCCDSKASHRPAQTQLSGRAVKDSRHLYPCSSHH

SEQ ID NO: 41154 - protein, 448 aa, Lycopersicon peruvianum
WSPELSSDLYRIDGWGAPYFTVNSSGDISVRPHGTDTLPHQEIDLLKVVKKASDPINSGGLGLQLPLVVRFPDVLKNRLESLQSAFDYAVQSEEYEAHYQGVYPVKCNQDRFVVEDIVKFGSGFRFGLEAGSKPELLLAMSSLCKGSSEGLLVCNGFKDAEYISLALVARKLQLNTVIVLEQEEELDLVIDISRKMAVQPVIGLRAKLRTKHSGHFGSTSGEKGKFGLTTTQILRVVRKLKESGMLDCLQLLHFHIGSQIPSTELLADGVGEAAQVYSELVRLGAGMKFIDIGGGLGIDYDGTKSSDSDVSVGYGLQDYASTVVQAVRFVCDRKNVKHPVICSESGRAIVSHHSVLIFEAVSSTTTRSQELSSMSLHSFVEKLNDDARADYRNLSAAAIRGEYDTCMLYADQLKQRCVDQFKDGNLDIEQLAAVDAVCDFVSKAIGAS

SEQ ID NO: 41155 - protein, 313 aa, Gladiolus hybrid cultivar 'Traveler'
MEGCDCIEPQWPADELLVKYQYISDFFIALAYFSIPLELIYFVKKSSFFPYRWVLIQFGAFIVLCGATHLINLWTFTMHSKTLALVMTVAKVSTAVVSCATALMLVHIIPDLLSVKTRELFLKNKAEELDREMGLIRTQEETGRHVRMLTHEIRSTLDRHTILKTTFVELGRTLDLAECALWMPSRTGLNLQLSHTLHNQIPVGSTVSINLPTVNQVFNSNRAVRIPHTSPLARIRPLAGRYVPPEVVAVRVPLLHLSNFQINDWPELSARSYAVMVLILPSDSARKWHVHELELVEVVADQTFPGLKMEALS

SEQ ID NO: 41156 - protein, 353 aa, Arabidopsis thaliana
MPGIAVVIAVLTAFFSLTFLLLLYVKHCKRRNGSVYVNHPQRFAITRYGGGYYNGGGVVGGRKNSGIDRSVIESLPVFRFGALSGHKDGLECAVCLARFEPTEVLRLLPKCKHAFHVECVDTWLDAHSTCPLCRYRVDPEDILLIGDCNSWFELQFSKDESNSVNNNPPGLTRFIPVSRISGRHSSAGERASRLNEIRTSSSYKSNPMSFRRSLDSSLKVNDAGEEKSESVAVNCLDRLQRKDGLLLIPNRESFEGRFEHRIIISGGNRDDQRWSEVRPSDLLYLRSEMILSDCRKLAAAEGGRDVINGRSVSELTGIERRRRWGGEPRQRQATAVISRWLAWSHRASASSIV

SEQ ID NO: 41157 - protein, 208 aa, Brassica napus
LLMMMMTSLGGGGGGGGGGGVGPVGGGGGGGRYMPYPPPLSVPPSAPQSPNFSGGLRSQPSFLVEQEKYLTELLADRHLPSPFLSVPPHVSQITNPAIFALNSLIENGITSGLIDHPSPLSSGGIFQNSRADMNGWPSQFPSERSVSSSPAPNWLNSPGSSSGLIVKRTIRVDIPVDQYPNYNFVGRLLGPRGNSLKRVEASTDCRVL

SEQ ID NO: 41158 - protein, 335 aa, Pirellula sp. 1
MHPMKAAFITETGPADALQVGELPDPTPGPGQVVIRVYASAINPIDTYIRNGTIAMELPLPFVPGCDAAGVVESVGPGVKRLSIGDRVWCTNQGLLGRQGTLSELIAVDEHWTFKLPEPVPYEDAAACALVGVTAHLGLFREAQLEPGETILVIGGSGGVGSMVVQMAAATGARVITTAGSEAKAQVCRDLGAEEVILYKDESIADRTKAFAPDGVNVLWETRREPDFDMAIDLMAGRGRMVLMAGRDAKPAFPVGPFYVKECSLHGFVMFKATPMEMKNAAEDISQWLASGKLSANISARFSLDEAAQAHALQESATLEDSSQLAGKIIVTLNT

SEQ ID NO: 41159 - protein, 261 aa, Zea mays
MQEFQSIPGLAGRLFGGAAAAGLRRAQGQGLGALCGGGGSGGASPAAAVKCPRCESTNTKFCYYNNYNLSQPRHFCKGCRRYWTKGGVLRNVPVGGGCRKAKRSSAPSTPTPTPTSAVGDAKSPRRASASSPRGSISSGSGSASPTPNGFAFSSTADVVAPPPAPIFADQAAALASLFAPPPPLPAFSFVAAQAKEETSSTPAGFAAPYSSVSEDMAPFASLDAAGMFEIGEDASAAAAYWNAGSCWTDVPDPSMMMYLLP

SEQ ID NO: 41160 - protein, 132 aa, Brassica napus
SYVHQERALPVECDEQELENWEHCEASESEKLKSAEAVGNVLSVLTRYSEFAGRLVCGKRNCLRVADCLSSSLVISLGRIKQSFVLTNPCLPDMPIVYASDAFLTLTGYKRHEVLGQNCRFLSGVDTDSSVL

SEQ ID NO: 41161 - protein, 589 aa, Coxiella burnetii RSA 493
MKTLTSQGIRTYGRLLQATKQYWPIFLIGVVGMIAVSLSDAGFTWLIKPIINRGFIARDLVFIRWLPFIIVLVFLFRGAANFLSTYFINRVARNIVMDFRRAIFSHLLRLPAEFYDRHSSGHLLSTVIYNVEQVAQASSDALIITLQASSLVVGLLVVMFLVSWKLTLFFLVITPLIAWVMRVCSARLRHLSTSVQKSVGEVTHIASEAIEAYKIVRLYGGQKYENEKFRHATKLNQQRELKVVVTNSVGTSLVQLLIAIPIAIVLFFATQPSFHVTAGSFASIVSAMIMMLRPVRRLTMVNSYIQKGIAAAESIFKLLDEDVEKDRGERHLVRARGAIEYQGVSFAYDNSKKTILSEISFSIEPGQMVAIVGRSGAGKSTLINLLPRFYDASTGVIKIDDINIKEFRLQELRNQFGLVSQHTTLFNDTILNNIAYGQAGSIDKRKIIEAARAAHAMEFIEQLPEGLDTVIGENGVRLSGGQRQRIAIARALFKNAPIHILDEATSSLDTHSERHIQAALDNLMDQCTTLVIAHRLSTIERADWIMVLEEGRLIEKGTHQQLLTLNGAYAELYRMQFAEKPAAMTALDE

SEQ ID NO: 41162 - protein, 463 aa, Burkholderia sp. 383
MQQHTMRRELGARQISFMALGMAIGVGLFLGSASAIKAAGPGALVAYLIGGAMIFLIMRALGEMAVHRPVSGSFGAYAFEYVGPFAGYVVGWSYWLLMVGVGVAETTAIGIYMGFWFPDVPQWLWVVSAIAAISAFNLLNVKVYGELEFWFAIVKVVTIVLMIAGGALIVFTGIGHGGVPVGLSNLWRHGGVFPHGVLGVVSALPIVAYSFAGVEMIGLTAGEAREPQKMIPRAINSVLWRILIFYVGALFIIMALYPWHELGEHGSPFVTTFESLGLRQAAGIVNFVVVTAALSSFNCIVFSGARMLSSMAGNGLAPASFAALSASGSPSRAVRATVLFMSVGVVLNYVIPARVFGWLMSFLSFDVAVIWAMIVLTHMRFRRALAARGETVAFRMPYASVTSWICLVFVAFVFVMLGVDPTTRGSLYAGAAVMALMAIIYRRSRHLQAAARSTRVGLGVERV

SEQ ID NO: 41163 - protein, 224 aa, Cryptococcus neoformans var. neoformans B-3501A
MRFLRSVARLYNTNFDRRPVATLVVTNGVLNTIADVLAQYSTILMHNPTPQSPTPAYDPLRTLRFAIFGMGMGPIIGRWMRFLERAIPIPAKATLGRAGKGAGGILTGPAGASAGVGKGGGEGIQLVKRVVADQIIMCADNAGIRAPIGLVLFVGSMGIMEGHSTEEIKEKFQDIYVSAILANWKIWPAIQGINFKLMPIQYRVPFQSTCGIAWTLYLSLLNAK

SEQ ID NO: 41164 - protein, 860 aa, Oryza sativa
MGGEEKEDETVPRFVLIHVANIYSGASWVGDTAAATAGDSTTAAGALGGGRRATRRLPGAADGAGACPGHASVAATRPRKKGSADLAALLLRRRQASAPNPQVSLSFSPADIHLRLPPSSGVAHEQPNHHAFQRQPSILVAREPVGAIDEDEPHLPPFAAAGSQDEKIFLDEAGVGTAVGIARLGGGLSSMRAAGGSGGLGGACVWRRVHAAAYDCPPPESGGGGRAPPGSGGGGGLGGMRAAAIGSGGLGGACARRRPSPAWTAATTMTVRRAAAAALGFAFPLSHGDILFPLRLASLPFPCGDLLFPLRLARIRLIYTGKINNTRRGVSIAKAQHVYDVWKENKWAQKASSERESPSKPPRERAPGWKRRRRRLERNLVAWGRVTMAAALARRGGGGLARALARGRGMCSATAAERAAGAALTSEELMRMERERSAHNYHPIPVVFSKGEGSHILDPEGNKYIDFLSAYSAVNQGHCHPKVLRALKEQAERLTLSSRAFYNDKFPIFAEYLTSMFGYEMMLPMNTGAEGVETAIKLVRKWGYEKKKIPKNEALIVSCCGCFHGRTLGVISMSCDNDATRGFGPLVPGHLKVDFGDTDGLEKIFKDHGERICGFLFEPIQGEAGVIIPPDGYLKAVRDLCSRHNILMIADEIQTGIARTGKMLACDWENIRPDVVILGRALGAGVVPVSAVLADKDIMLCIKPGEHGSTFGGNPLASAVAVASLKVVTDEGLVERAAKLGQEFRDQLQKVQQRFPQIIREVRGRGLLNAVDLSNEALSPASAYDICIKLKERGVLAKPTHDTIIRLAPPLSISPEELAEASKAFSDVLEHDLPQLQKQIKKTESAAEKQSCDRCGRDLY

SEQ ID NO: 41165 - protein, 354 aa, Arabidopsis thaliana
MNRGSLCPNPICLPPLEQSISKFLTQSGTFKDGHLRVNKDGIQTVSLSEPGAPPPIEPLDNHLSLADLEVIKVIGKGSSGNVHLVKHKLTQQLFALKVIHLNTEESTCRATSQELRINLSSQCPYLVSCYQSFYHNGLASIILDFMDGASLADLLKKVGKVPENMLSAICKRVLRGLCYIHHERRIIHRDLKPSNLLINHRGEVKITDFGVSKILTSTSSLANSFVGTYPYMSPERISGSLYSNKSDIWSLGLVLLECATGKFPYTPPEHKKGWSSVYELVDAIVENPPPCAPSNLFSPEFCSFISQCVQKDPRDRKSAKELLEHKFVKMFEDSDTNLSAYFTDAGSLIPPLAN

SEQ ID NO: 41166 - protein, 429 aa, Shigella flexneri 2a str. 2457T
MTTDDLAFDQRHIWHPYTSMTSPLPVYPVASAEGCELILSDGRRLVDGMSSWWAAIHGYNHPQLNAAMKTQIDAMSHVMFGGITHAPAIELCRKLVAMTPQPLECVFLADSGSVAVEVAMKMALQYWQAKGEARQRFLTFRNGYHGDTFGAMSVCDPDNSMHSLWKGYLPENLFAPAPQSRMDGEWDERDMVGFARLMAAHRHEIAAVIIEPIVQGAGGMRMYHPEWLKRIRKMCDREGILLIADEIATGFGRTGKLFACEYAEIAPDILCLGKALTGGTMTLSATLTTREVAETISNGEAGCFMHGPTFMGNPLACAAANASLAIIESGEWQQQVAAIEVQLREQLAPARDAEMVADVRVLGAIGVVETTRPVNMAALQKFFVEQGVWIRPFGKLIYLMPPYIILPQQLQRLTAAVNRAVQDETFFCQ

SEQ ID NO: 41167 - protein, 646 aa, Oryza sativa
MPSVLVDRATNDMLIGPDWAMNLEICDTLNRDPGQAKDVVKSIKKRIAHRNAKVQLLALTLLETMIKNCGDIVHMQVAEKDILHEMVKIVKKRPDFHVKEKILTLIDTWQEVFGGRAGAVFPQRSNGSVPIFTPPQTQPLQNYPASLRSAQQEPPGSSVPDLPSLSLAEIQNARGIMDVLSEMLNALDPSNREGLRQEVIVDLVDQCRSYKQRVVELVNTTSNEELLSQGLSLNDDLQRVLAKHDAIAAGVAVRLEKTKSLQTKIDSSPPANPGTSKAPVQSSSGTASASNQSTLALPAPASSSSPKAPAAPVPVIDLLSGDDYIKPEPANSLALVPVTEYSAADQNVLALADMFEQNNANRSNNNLTNSFNTSAPNSNFPASQAYPAPVQPALPQHPVAYSNGVSSNAIVPYYDDQNGGLPPPPWEIQQSMDNPPQPTQLGQMPLQPGQPVGMHPQSPHSGQFGQGSFMSPQQMANGQLGGTQPRQSPQPQSAPNLQYGGMMMYPNSMQVNQGAGMYSQPMFGGQFYGMSHHHQMYAVQMAGYGFGQQPGAYYIPNAAYAYVSANELTQRMNAVSVQEGNSHGGAMASRPEDSLFGDLVSIAKMKQNKPAAGKVYSNLKAFLFTPVIFLSSFSAMSVVHISIFAY

SEQ ID NO: 41168 - protein, 873 aa, Saccharophagus degradans 2-40
MGKLPERLRENVRILGDLLGETLLEHEGPALFRKVEEIRALAKSLNKGTASDASQLVDLLSQLEDKDILPIVRAFNQFLNLANIADLEYFSSADAQDNDGLDTLLTKLSSDVGKDQLYDLMSTLRIDLVLTAHPTEVTRRTLIRKYEKIARTLSDLTRGDLLTYESNKLQGRLHRLVEEVWNTNEIRDERPTAVDEAKWGFAVIENSLWHAVPDFIRHFDRLSRRRLGQALPLDLQPFKFYSWMGGDRDGNPNVTHKVTEEVIMLGRWKAADLYLQDLYELGGDLSMHEASDELLANLPNGASPTPYRERLHALRKRLEVTLDWTERTLAGENLPEPENAIHHRDDLLKPLLDIHSSLIESGFEHIANGPISDTLRRIYAFGISLAPLDIRQDSDRHVQVLDELTNYLEMGSYREWDEEKRQAFLLEQLNSKRPLLPANWPVSDDSAEVLATCKAIARQPQETLSHYVISMARQASDVLSVALLLKESGVTWDMPIVPLFETLSDLENGASVMNTLWQMHWYQRYTQGHQTVMIGYSDSAKDAGKFSATWAQYKCQEKLVDLANQYEINLVLFHGRGGTVGRGGGPVEKAMASQPPGSVAGRIRVTEQGEMIRYKFGLPRVAFRSLSNYACATIKATVTPNPAPKEQWRALIEDMSDASLEGYRSIVRGHKHFVPYFRSLTPEQELNKLALGSRPAKRKATGGVESLRAIPWVFAWTQVRLNLPGWLGAHQALQHALKEQPDLLQEMLTEWPFFSSFIDLLEMVLGKADSAICGHYERQLVDEEYRDLGEFLRGDLVALAQLIKEIKNQPALLEDDPMLQQSINVRKPYIDPLNYLQAELLKRERSAGEISPELEQALKVTMAGISAGMRNTG

SEQ ID NO: 41169 - protein, 224 aa, Glycine max
EGSDEIFGGYLYFHKAPNKKELHEETCQKIKALHLYDCLRANKSTAAWGVEARVPFLDKEFINVAMSIDPEWKMIRPDLGRIEKWVLRNAFDDDKNPYLPKHILYRQKEQFSDGVGYSWIDGLKDHANKQVTDATMMAANFIYPENTPTTKEGYLYRTIFEKFFPKNSAKATVPGGPSVACSTAKAVEWDASWSKNLDPSGRAALGVHAAAYDGAVDTTKNGPL

SEQ ID NO: 41170 - protein, 492 aa, Glycine max
MLKQILSKLPRKSLKPDSDELTRGDSARSADSPRAAGRSYKLHGVSSSTAKRASSSAVFPASMVSGIEPLVPFKDVPNAEKMNLFVSKLSLCCVTFDFTDPGKSIAAETLTPPPLVELVDFVACGTMRFSEPAILAMCRMCAINLFRVFPPNYRASGGGENDDDEPMFDPAWPHLQLVYELLLKFISSPCLDAKVAKKYIDHSVIARLLELFDSEDPRERDCLKTILHRIYGKFMVHRPYIRKSINNIFYRFVFETEKPNGIGELLEIFGSVITGFALPLKEEHKIFLWRVLVPLHKPKSIGVYFQQLSYCVMQFIEKEPKLASIVISGLLKYWPATNSQKEVMFLGELEEILEVINMVEFQRIMVPLFWRIGCCINSLHFQVAERALFLWNNDHIVNLIAHNRQVILPIIFPALDRNVQSHWNPAVVNLTHNIRKMFLEMDEKLFISCHNHFKEEEAILISTAEKRKEAWKQLEHAASLRPVIGNTAVLVS

SEQ ID NO: 41171 - protein, 364 aa, Yarrowia lipolytica CLIB122
MRFTTLFTLATAAMASLIDLTDKTFEKSVLNADHPTLVKFYAPWCGHCKKMGPDYDQLASVYAHTDDVEIARYNGDENRKFSKKYGIQGFPTLKWFPGKGADPVDYESGRDFDSLVQFVQSKSGVKAKTAPKSEGAKLIKTVDDQSFADLFKNDKKYALVAFTAKWCGYCKQLAPEYEKVAAVFSRDPVSIGQVDCTEPEPSHDLLEKYDIKSYPTLLWFEEGSTEPVKFEGGDRSVEGLVAFINDKTGLNRNTDGSYNDYAGVFSGKLLEQLKEAVENPTKVKEFIGEIPQSFSSVYERVLSKVGSLGEETEAYLDKEITRLGNIIEKRGAKQDKLDEFKIRQNVLKSIKALKNKVENVRDEL

SEQ ID NO: 41172 - protein, 315 aa, Cryptococcus neoformans var. neoformans JEC21
MASVKEGDYQALKEEIKKIMKQPGYDDGSAGPVLVRLAWHASGNFSLVEHNGGSNGAGMRFPPESVDPANAGLHYAISFLLPLQSANSWISHADLWTLAGVTAIEAMGGPQIPWEPGRLDYESEQAAVEHRGDVSNRLPDGALGAAHIRDVFGRMGFSDQEIVALSGAHNLGRCHADRSGFDGPWVVNPTRFSNQYFKLLLPGTRLMMLPTDMALIEDPSFRPWVEKYAADQNLFFKDFANAFGKLIELGVDRDDTGFARLAKKAAEEGKPLDKTAPPAGDETCPVSGAVGGGVQRAAGGGGCPFMAMQNREAKL

SEQ ID NO: 41173 - protein, 416 aa, Xanthomonas oryzae pv. oryzae KACC10331
MAQQRPSLFRPSASHAVSFFANVEQVPGDPILGLTEAYNADSRPNKVNLGVGIYYDENGRIPLLRAVHKIEQQLAQDTKPRGYLPIDGLAAYDKATQELLFGAESALLAAGRVATSQTVGGSGALRVGADLLKKLLPTSTIAISNPSWENHRAVFGAAGFEVVDYTYFDAASHGLNFDGMLADLAKLEPGTVVLLHACCHNPTGADLSKEQWKQVAGLLKERNLFPFVDIAYQGFDKGIEADAHAVRLLAAEGIDSYVVASSYSKSFSLYGERVGALSVVSATAAEAKAVQSQVKRIIRTIYSSPSTHGAALVAGVLTSPELRDVWEQELTEMRERIHALRAGLVEKLATLGAPEFEFIQRQAGMFSYSGLTKTQMDRLRDEFAIYAVGTGRICVAALSQRNLDYVAQAVATVSRM

SEQ ID NO: 41174 - protein, 220 aa, Escherichia coli CFT073
MKDIDTLISNNALWSKMLVEEDPGFFEKLAQAQKPRFLWIGCSDSRVPAERLTGLEPGELFVHRNVANLVIHTDLNCLSVVQYAVDVLEVEHIIICGHYGCGGVQAAVENPELGLINNWLLHIRDIWFKHSSLLGEMPQERRLDTLCELNVMEQVYNLGHSTIMQSAWKRGQKVTIHGWAYGIHDGLLRDLDVTATNRETLEQRYRHGISNLKLKHINHK

SEQ ID NO: 41175 - protein, 331 aa, Beta vulgaris
MAELNNGGHSKELVVSFGEMLIDFVPTSSGVSLAEAPGFLKAPGGAPANVAIAVSRLGGNAAFVGKLGDDEFGHMLAGILKKNGVSADGLSFDKGARTALAFVTLKSDGEREFMFYRNPSADMLLTPDELNLDLIRSAKVFHYGSIRLIVEPCRSAHLKAMEEAKKAGALLSYDPNLRLPLWPSAEEAREQIMSIWDKAEVIKVSDNELEFLTGNSTIDDATAMSLWHPNLKLLLVTLGDQGCRYYTKNFKGSLDGFKVNAVDTTGAGDSFVGALLNKIVDDHSIIEDESRLKEVLKFANACGAITTTKKGAIPALPTVADALELIKKNAS

SEQ ID NO: 41176 - protein, 324 aa, Annulatascus triseptatus
NFVFGQSGAGNNWAKGHYTEGAELVDQVLDVVRREAEGCDCLQGFQITHSLGGGTGAGMGTLLISKIREEFPDRMMATFSVVPSPKVSDTVVEPYNATLSVHQLVENSDETFCIDNEALYDICMRTLKLSNPSYGDLNHLVSAVMSGVTTCLRFPGQLNSDLRKLAVNMVPFPRLHFFMVGFAPLTSRGAHSFRAVTVPELTQQMFDPKNMMAASDFRNGRYLTCSAIFRGKVSMKEVEDQMRNVQNKNSSYFVEWIPNNVQTALCSIPPRGLKMSSTFVGNSTAIQELFKRVGEQFTAMFRRKAFLHWYTGEGMDEMEFTEAE

SEQ ID NO: 41177 - protein, 747 aa, Aspergillus oryzae
MANIVAGGLHKVQEAVQGAASKDKKLVDLAPDTHNVQSSKEPLTTDHGVRISDTDHWLKEVNDNHTGPMMLEDQIAREKIHRFDHERIPERVVHARGTAAFGNFKLHESAEDVSYAGILTDTSRNTPVFLRFSTVQGSKGSADTVRDVRGFAVKFYTDEGNWDLVGNNIPVFFIQDAIKFPDFVHAVKPEPHNEVPQAQTAHNNFWDFVYLHPEATHMFMWAMSDRAIPRSYRMMQGFGVNTFSLINKEGKRHFVKFHFIPHLGVHSLVWDEALKLAGQDPDFHRKDLMEAIDNGAYPKWDFAIQVIPEEKQDDFEFDIFDATKIWPEELVPLRVIGELELNRNVDEFFPQTEQVAFCTSHIVPGIDFSDDPLLQGRNFSYFDTQISRLGINWEEIPINRPVCPVLNHNRDGAKRHRIAQGTVTTWSNRSEAGPPAPVEHGGFASYPAKLNGIKKRGLSPKFREHHNQAQLFYNSLSEHEKVHVKKAFGFELDHCDDPIVYERLAGHRLAEIDLTLAQEVAELVGAPIPDKALRPNHGKRSKHLSQTEFPGKQPTIASRRIAIIIGDGYDPVAFNGLKGAITAVGALPFVIGTKRSPIYADGEDKSSSKGVIADHQYDGQRSTMFDATFIPGGPHVESLKANGQIRYWIIETFGHLKALGATGEAAAFIKEALGSALDVKVATSDNPQPVEWYGVVTAGKIHKPESFKEGIQIVKDAKDFISTFFYQISQHRNYKRELDGLASTVAF

SEQ ID NO: 41178 - protein, 448 aa, Lycopersicon peruvianum
WSPELSSYLYRIDGWGAPYFTVNSSGDISVRPHGTDTLPHQEIDLLKVVKKASDPINSGGLGLQLPLVVRFPDVLKNRLESLQSAFDYAVQSEGYEAHYQGVYPVKCNQDRFVVEDIVKFGSGFRFGLEAGSKPELLLAMSSLCKGSSEGLLVCNGFKDAEYISLALVARKLQLNTVIVLEQEEELDLVIDISRKMAVQPVIGLRAKLRTKHSGHFGSTSGEKGKFGLTTTQILRVVRKLKESGMLDCLQLLHFHIGSQIPSTELLADGVGEAAQVYSELVRLGAGMKFIDIGGGLGIDYDGTKSSDSDVSVGYGLQDYASTVVQAVRFVCDRKNVKHPVICSESGRAIVSHHSVLIFEAVSSTTTRSQELSSMSLHSFVEKLNDDARGDYRNLSAAAIRGEYDTCMLYADQLKQRCVDQFKDGNLDMEQLAAVDAVCDFVSKAIGAS

SEQ ID NO: 41179 - protein, 484 aa, Dechloromonas aromatica RCB
MNLQNTELLRSTNLIGGIWARADDGAQLAVINPATGEKLADVPLCGATETRRAIDAANAAWPAWRALTARRRSQLLQAWFSLIIKNADDLAQLVTAECGKPLQEAKGEVIYGASFVEWFAEEGKRTYGESIPSPAANTRLLVIKQPIGVCAAITPWNFPLAMITRKVAPALAAGCPVVVKPAEATPLTALALAVLAEQAGFPAGVFNVVTGKPAEIGGELCANPIVRKLSFTGSTGVGRLLMAQCAPTIKKLSLELGGNAPFIVFDDADVNAAVDGAIAAKYRNTGQTCVCANRFLIQAGIYDEFAAKFAEKASALKVGAGIEADVAQGPLINAAGLSKVEAHVADAVGKGARVLCGGARHERGGNFFQPTVLADVTTAMMVAREETFGPVAPLFRFETEEQAIAMANDTEFGLAAYFFTRNVGRCWRVGEALEYGMVGINTGMISNEVSPFGGIKQSGLGREGSKYGIEDYLEIKYLCFDVNT

SEQ ID NO: 41180 - protein, 318 aa, Apiosordaria verruculosa
  misc_feature (31)..(31): Xaa can be any naturally occurring amino acid
  unsure (1)..(318): unsure at all Xaa locations
FRPDNFVFGQSGAGNNWAKGHYTEGAELVDXVLDVVRREAEGCDCLQGFQITHSLGGGTGAGMGTLLISKIREEFPDRMMATFSVVPSPKVSDTVVEPYNATLSIHQLVENSDETFCIDNEALYDICMRTLKLPNPSYGDLNHLVSAVMSGVTVCLRFPGQLNSDLRKLAVNMVPFPRLHFFMVGFAPLTSRGAHSFRAVSVPELTQQMFDPKNMMAASDFRNGRYLTCSAIFRGKVSMKEVEDQMRNVQNKNSSYFVEWIPNNVQTALCSIPPRGLKMSSTFVGNSTAIQELFKRIGEQFTAMFRRKAFLHWYTGEG

SEQ ID NO: 41181 - protein, 182 aa, Triticum aestivum
  misc_feature (53)..(55): Xaa can be any naturally occurring amino acid
  misc_feature (172)..(172): Xaa can be any naturally occurring amino acid
  unsure (1)..(182): unsure at all Xaa locations
PRVRDTDEVFAKIRLVPARPQDADANDAIAAAAAQEDKPASFAKTLTQSDANXXXGFSVPRYCAETIFPRLDYSADPPVQTVLAKDVHGVVWKFRHIYRGTPRRHLLTTGWSSFVNQKKLVAGDSIVFMRTENGDLCVGIRRAKKGGIGGPELLPPPSPAAGGNYGGFSMFXRGRRTAATTR

SEQ ID NO: 41182 - protein, 326 aa, Barrina polyspora
PDNFVFGQSGAGNNWAKGHYTEGAELVDQVLDVVRREAESCDCLQGFQITHSLGGGTGAGMGTLLISKIREEFPDRMMATFSVVPSPKVSDTVVEPYNATLSVHQLVENSDETFCIDNEALYDICMRTLKLSNPSYGDLNHLVSAVMSGVTTCLRFPGQLNSDLRKLAVNLVPFPRLHFFMVGFAPLTSRGAYSFRAVTVPELTQQMFDPKNMMAASDFRNGRYLTCSAIFRGKVSMKEVEDQMRNVQNKNSSYFVEWIPNNVQTSLCSIPPRGLKMSSTFVGNSTAIQELFKRIGEQFTAMFRRKAFLHWYTGEGMDEMEFTEAE

SEQ ID NO: 41183 - protein, 382 aa, Cryptococcus neoformans var. neoformans B-3501A
MSDFHQAPHKLLVIPGPIEFSDPVLAANATPGTAHTSPAFIPVFGEALSLLRDVLLSAKESGSQPLLIAGSGTLGWDAVAANLIEKDEEAVVLNTGYFSDSFGECLEAYGAKVTHVKAEVGGIPTDDAIISALASKPKLLTITHVDTSTGVLSPADHIASLVKKHSPDTLIALDAVCSVASEEIKFDEWGLDVVLSATQKGLGVPPGLSVVLASKRAVETVEKRKTPIPAYYVSWKKWIPIMQNYESGKPSYFATPPVQLVYALHTSLKSITSAPLADRFKAHKAASAYVKDSLAELGLEFVPKSRDIAANGMTAVRFPKGVKAPDVLPKLAERDIVVAAGLHKAIVSEYFRIGHMGITAVDRQRGDLEKVVKGIKEVLGKA

SEQ ID NO: 41184 - protein, 547 aa, Escherichia coli
AAKDVKFGNDAGVKMLRGVNVLADAVKVTLGPKGRNVVLDKSFGAPTITKDGVSVAREIELEDKFENMGAQMVKEVASKANDAAGDGTTTATVLAQAIITEGLKAVAAGMNPMDLKRGIDKAVTVAVEELKALSVPCSDSKAIAQVGTISANSDETVGKLIAEAMDKVGKEGVITVEDGTGLQDELDVVEGMQFDRGYLSPYFINKPETGAVELESPFILLADKKISNIREMLPVLEAVAKAGKPLLIIAEDVEGEALATLVVNTMRGIVKVAAVKAPGFGDRRKAMLQDIATLTGGTVISEEIGMELEKATLEDLGQAKRVVINKDTTTIIDGVGEEAAIQGRVAQIRQQIEEATSDYDREKLQERVAKLAGGVAVIKVGAATEVEMKEKKARVEDALHATRAAVEEGVVAGGGVALIRVASKLADLRGQNADQNVGIKVALRAMEAPLRQIVLNCGEEPSVVANTVKGGDGNYGYNAATEEYGNMIDMGILDPTKVTRSALQYAASVAGLMITTECMVTDLPKNDAADLGAAGGMGGMGGMGGMM

SEQ ID NO: 41185 - protein, 487 aa, Schizosaccharomyces pombe
RTKEGKIYQRAFGGQSLEYGKGGQAYRCAAVADRTGHSILHTLYGQSLKHNTNFFIEYFGMDLLMEGGECRGVIAMNLEDGSIHRFRAHKTILATGGYGRAYFSCTSAHTCTGDGNAMVSRAGLPLQDLEFVQFHPTGIYGAGCLITEGCRGEGGYLLNSKGERFMERYAPTAKDLASRDVVSRAMTVEIREGRGVGPEKDHCYLQLSHLPAEILKERLPGISETAAIFAGVDVTKEPIPVLPTVHYNMGGIPTRFTGEVLTIDENGKDKIVPGLYAAGEAACVSVHGGNRLGANSLLDIVVFGRACALHIKDTLEPNTPHKPLAADAGLDSLKFLDQIRTSQGPKHTSEIRLDMQKTMQRDVSVFRMEETLQEGVKNIARVDGTYKDIGIRDRGLIWNTDLVEALELRNLLTCAVQTANAALNRKESRGAHAREDYPERDDKNWIKHTLTWQHKTGDPVTLKYRAVTRTTMDENEVKPVPPFKRVY

SEQ ID NO: 41186 - protein, 414 aa, Pseudomonas syringae pv. phaseolicola 1448A
MSRRRVVVTGMGMLSPLGNDVPSSWQGILAGRSGIGLIEHTDLSAFTTRFGGSVKGFNVEEYLAPKEARRLDLFIQYGLAASFQAVRNAGLEVTDANRERIGVAMGSGIGGLTNIENSSRLLHEQGPGRISPFFVPGSIINMISGFLSIHLGAQGPNYSIATACTTATHCIGMAARNIAYDEADVMIAGGAEMAACGLGLGGFGAARALSTRNDDPTRASRPWDEGRDGFVLSDGAGAMVLEELEHAKARGATIYAELVGFGMSGDAYHMTSPPDDGAGAARCIVNALRDAKVNADQVQYINAHGTSTPAGDLAEASAIKSVFGDHAYKLAVSSTKSMTGHLLGAAGAVEAIFSVLAMVDQVAPPTINLDEPSEGCDLDFVPHEARRMPIDVVLSNSFGFGGTNGSLVFRRFAE

SEQ ID NO: 41187 - protein, 1182 aa, Magnaporthe grisea 70-15
MDDRIQDIYKKIEREKALINAANLMRQQTNNDAVRSKLDTQMREGRRNLEFFEGTLREMQMRSMGQGMDNLSIGGSTLAASASSSSRPRSAVEEDGPMPPPKDGGYGAGGDGYGQTQYSQIGEHGDLMPPRGPFANQGPGSHIPKTRPNFTKLDLIKYDTPYLGPRIQLMLSQIQFKLNVEEQYLKGIEKMVQLYQMEGDKKSRADAAARRVESKQKIVLLKQALRRYEELHIDIDSGDSPDDDSINMPNLRKPLTGQLSIRVIAIKDVDHAPTGRFARGPDTFVAIKVEDNIAARTRVSRTDRWENEYHNVEVDKANEIELTVYDKPGEHSIPIGMLWVRISDIAEELRRKKIEAETNSLGWVSADRMGDVNPAARVPPPQFPMNTQQQQPGGPVSPGIQGQQQGYGQPGDPQQPGQQGQMGQVQEPITGWFNLEPTGSIQLSLNFFKQSKDRRPVDLGLGRKGAIRQRKEEVHEMYGHKFVERQFYNIMRCALCGDFLKGGSGMQCEDCKYTCHIKCYTSVVTKCISKSNAETDPDEEKINHRIPHRFVAFSNLTANWCCHCGYLLPFGKKNCRKCSECQMAAHAGCVHLVPDFCGMSMAVANQILEGIRSQKQRQQKASSMSDRTLRSGKMSPPGSGHASSASFSQGMGSSYGQASPEATEAAKFMYSSQTSPQRITSPDRTSSSSQAAAAATAAMTGLPGAMSSQPGRQGQQPITDYGSASGGRYGSYGPHDDPYAQPQQSPPPQQQAAYGQPQQRKYNPADYANISGGYGSQPQMAQQPQQARPQQQQQQPLYSPQQHASQAQQPLSPVKQQHQEQQIISPTAGTVIPTSAKRPLPSATDPGTGQRIGLDHFNFLAVLGKGNFGKVMLAESKKTRKLYAIKVLKKEFIIENDEVESIRSEKRVFLIANRERHPFLTNLHACFQTETRVYFVEEYISGGDLMLHIQRGQFGTRRAQFYAAEVCLALKYFHENGVIYRDLKLDNILLTLDGHIKIADYGLCKEDMWYGSTTSTFCGTPEFMAPEILLDKKYGRAVDWWAFGVLIYQMLLQQSPFRGEDEDEIYDAILADEPLYPIHMPRDSVSILQKLLTREPDQRLGSGPTDAQEVMSQPFFRNIVWDDIYHKRVAPPFLPQIKSATDTSNFDSEFTSVTPVLTPVQSVLSQAMQEEFRGFSYTADFD

SEQ ID NO: 41188 - protein, 619 aa, Prochlorococcus marinus str. NATL2A
MAEELSDFIEASGLLSYDPVAIDSIYKKNPIRLLRRLWQTLLPIGLFLLGVGWEKLIGSLDKDERKTFRAKEFTKLLVDLGPAFIKAGQALSTRPDIVPPTVLEELAQLQDQLPGFDSKLAMACIEQDLDNKIENIFAEIDKEPISAASLGQVHKAKLKSGEQVAVKIQRPGLREQITLDLYIVRNIAIWFKNNIGIIRSDLVALIDELGKRIFEEMDYINEANNAEKFKELHSGNDKIAVPKIYRKATSRRVLTMEWIDGTKLTNIEAVKNLGINPNEMVEIGVSCSLQQLIEHGFFHADPHPGNILAMKDGRLCYLDFGMMSDITQQSRVGLIRAVVHLVNRRFDKLSNDFVQLGFLSEDVDLTPIAPAFESVFTTALEIGVNKMDFKAVTDDMSGIMYKFPFKLPPYYALIIRSLITLEGIALSVDPNFKILGAAYPYFARRLMEDENPELRNSLKEMLFDENTLKLERLDDLLQSATKEKLLDGEKILDQTIDFLFSKKGLFLRNELVNILASKIDSVGWKTLIRLNEKLPTKIRSKTIEKSYKINNKQLLNISSIKKMFKMSKMKSGFKRKILFKKLPKILITKDTYRMGLGLMQKTSEKGIIRLVKVAAGVRQ

SEQ ID NO: 41189 - protein, 605 aa, Schizosaccharomyces pombe
MTKDAESTMTVGTYLAQRLVEIGIKNHFVVPGDYNLRLLDFLEYYPGLSEIGCCNELNCAFAAEGYARSNGIACAVVTYSVGALTAFDGIGGAYAENLPVILVSGSPNTNDLSSGHLLHHTLGTHDFEYQMEIAKKLTCAAVAIKRAEDAPVMIDHAIRQAILQHKPVYIEIPTNMANQPCAVPGPISAVISPEISDKESLEKATDIAAELISKKEKPILLAGPKLRAAGAESAFVKLAEALNCAAFIMPAAKGFYSEEHKNYAGVYWGEVSSSETTKAVYESSDLVIGAGVLFNDYSTVGWRAAPNPNILLNSDYTSVSIPGYVFSRVYMAEFLELLAKKVSKKPTTLEAYNKGRPQTVVSKAAEPKAALNRVEVMRQIQGLVDSNTTLYAETGDSWFNGLQMKLPAGAKFEVEMQWGHIGWSVPSAMGYAVAAPERRTIVMVGDGSFQLTGQEISQMIRHKLPVLIFLLNNRGYTIEIQIHDGPYNRIQNWDFAAFCESLNGETGKTKGLHAKTGEELTSAIKVALQNKEGSTLIECPIDEAACIQEWIAGYRTFTPRKIQLTFLDTQACMAAGLLSASEGTPYSESYFLSASEGICPYSESY

SEQ ID NO: 41190 - protein, 140 aa, Triticum aestivum
  misc_feature (37)..(37): Xaa can be any naturally occurring amino acid
  misc_feature (94)..(94): Xaa can be any naturally occurring amino acid
  misc_feature (98)..(98): Xaa can be any naturally occurring amino acid
  unsure (1)..(140): unsure at all Xaa locations
MLVRLKGPVRMPGESHAYQQGEQWRGMMVDTTILALXDARAKEKPYIDSKGIYVIRRHVKVNLVRKHCSGANDLGSEDMPGATSHGMRVQAYLXDGYXQDIGTTEAIYKATVGITKKPIPDTRFYDRSAPIYTQSRDLPP

SEQ ID NO: 41191 - protein, 160 aa, Neurospora crassa
MLTGEMLTLDFLLLTCLLISYTTNAFPGEYIPTVFDNYSASVMVDGKPVSLGLWDTAGQEDYDRLRPLSYPQTDVFLICFSLWHPEIQHHAPGIPIILVGTKLDLREDPDTIQSLSQKRMAPITFEMGVNCAKEIGARKYLECSALTQRNLKSVFDEAIR

SEQ ID NO: 41192 - protein, 594 aa, Arabidopsis thaliana
MENYEVLEQIGKGSFGSALLVRHKHEKKLYVLKKIRLARQTGRTRRSAHQEMELISKIHNPFIVEYKDSWVEKGCYVAEAIKKTNGVHFTEEKLCKWLVQILLALEYLHANHILHRDVKCSNIFLTKDQDIRLGDFGLAKVLTSDDLASSVVGTPSYMCPELLADIPYGSKSDIWSLGCCMYEMTAMKPAFKAFDMQGLINRINRSIVPPLPAQYSAAFRGLVKSMLRKNPELRPSAAELLRQPLLQPYIQKIHLKVNDPGSNVLPAQWPESESARRNSFPEQRRRPAGKSHSFGPSRFRGNLEDSVSSIKKTVPAYLNRERQVDLSTDASGDGTVVRRTSEASKSSRYVPVRASASPVRPRQPRSDLGQLPVSSQLKNRKPAALIRRASMPSSRKPAKEIKDSLYISKTSFLHQINSPDVSMNAPRIDKIEFPLASYEEEPFVPVVRGKKKKASSRGSYSPPPEPPLDCSITKDKFTLEPGQNREGAIMKAVYEEDAYLEDRSESSDQNATAGASSRASSGVRRQRFDPSSYQQRAEALEGLLEFSARLLQDERYDELNVLLRPFGPGKVSPRETAIWLSKSFKETTTTKLGD

SEQ ID NO: 41193 - protein, 161 aa, Glycine max
  misc_feature (63)..(63): Xaa can be any naturally occurring amino acid
  misc_feature (101)..(101): Xaa can be any naturally occurring amino acid
  misc_feature (115)..(115): Xaa can be any naturally occurring amino acid
  unsure (1)..(161): unsure at all Xaa locations
MDLSKTTYHTNVPDHSTFAYRYDPTYLARFKIAEESILKEATIHIIHDELMLDGNSRLDLASXVTTCMEPVRDKVIAADIDKNDVHMDDYAVTTELHNPSXNMIPHLFNAPLYEXHTCRGGGSFGSSEGIMWDVLSLNTRWGNRKNLVWKPYDNPNIVTGA

SEQ ID NO: 41194 - protein, 205 aa, Pyrococcus horikoshii OT3
MCDMADEYLVPLDQYLAAGVHIGTQQKTKDMKKFIYRVRQDGLYVLDVRKTDERLKVAGKFLARFEPQSILAVSVRLYGQKPVKKFGEVTGARAIPGRFLPGTMTNPAVKNFFEPEVIIITDPRADHQAMKEAIEIGIPIVALVDTENLLSYVDLAIPTNNKGRKALALIYWILAREILYNRGEISSREEFKIPVEEFEMKIVRR

SEQ ID NO: 41195 - protein, 278 aa, Bacillus halodurans C-125
MIQSIQDRVKLANGVEMPWFGLGVYKAAEGEEVIGAVRAALKAGYRSIDTASLYQNEVGVGQAIRESGIPRDEIFVTTKVWNTEQGYDETLAAFERSRKRLGLEVIDLYLIHWPVREKFLDTWRALETLYKERKVRAIGVSNFNIHHLETVMNISDINPMVNQVEFHPFLTQKPLLTFCKAHDIQLEAWRPLTKGEIFTHPVVQALAKKYGKTPAQIVLRWNLEHRVVTIPKSVREERIQENANIFDFHLSPEDVEALDGLNEDRRLGQDPDSFSFDF

SEQ ID NO: 41196 - protein, 482 aa, Phyllostachys pubescens
MVSQVADEKPQLLSKKAGCNSHGQDSSYFLGWQEYEKNPFDPAANPGGIIQMGLAENQLSFNLLEDWLEANPDALGLRREGASVFREPALFQDYNGLPAFKNALARFMSEQRGYRAVFDPSNIVLTAGATSANEALMFCLADHGDAFLIPTPYYPGFDRDLKWRTGAEIVPVHCTSANGFRVTRAALDDAYRRAQKSRLRVKGVLITNPSNPLGTTVPRADLEMLVEFVAAKGIHLISDEIYSGTAFAEPGFVSVLEVVAARSPLAADVSGRVHIVYSLSKDLGLPGFRVGAIYSANAGVVSAATKMSSFGLVSSQTQYLLAMLLGDKDFTRRYVAENKKRIKERHDQLVEGPKEIGIGCLESNAGLFCWVDMSHLMRSRSFEGEMELWKKVVFEVGLNISAGLSCHCREPGWFRVCFANMSAKTLDVAMQRLSSFVHHASSFVDEAGRRRGSGPARSMSCPLAIKWAFRLPPASADRKAER

SEQ ID NO: 41197 - protein, 622 aa, Candida glabrata CBS138
MSTPVDEERQPLNPRGSRSQVRYISIPLARNPDLEAVDGDTSGYAVQDSSFTNHEPQPMGRRQSILDQPIGSFRGVNSLSRFATSLRRANSFRNIEVKPEVERTYFNDDYDELFDPSTLAPAPHGRSLSIALQSANATLQVSGKPSIPNIDAQSTHSISQQELEDFRSIRTTSFSMDNNGILRPTLSMNEMLTGSTPFDTNDVDSMVIKQVEGKDGTVVTLLAGQSTAPQTIFNSINVLIGIGLLALPLGMKYAGWIPGLIMLSIFAFGTFCTAELLSRCLDTDPTLISYADLGYAAFGSRGRAFISALFTVDLLSCGVSLVILFGDSLNALFPQYSVTFFKIVCFFVVTPPVFIPLSILSNISLLGILSTTGTVLVIFICGLFKRDAPGSLIEPMPTHLWPTDFKSLCLSIGLLSASWGGHAVFPNLKSDMRHPQKFKKCLKTTYQITSVTDIGTAVIGFLMFGDLVKDEITKNVLLSDGYSNTVHVLISALMTVIPIAKTPLNARPIVSVLDIMFGIHEAEKEYTGKKLKFAQFGQFFNRIFVNFMFVLIAIIFPQFDRIIAFMGAGLCFAICFILPCLFYLRICGEANIVKPWERLACKATIVVSVVLSVLGVSAAMFS

SEQ ID NO: 41198 - protein, 328 aa, Bertia moriformis
FRPDNFVFGQSGAGNNWAKGHYTEGAELVDQVLDVVRREAEGCDSLQGFQITHSLGGGTGAGMGTLLISKIREEFPDRMMATFSVVPSPKVSDTVVEPYNATLSVHQLVENSDETFCIDNEALYDICMRTLKLSNPSYGDLNYLVSAVMSGVTTCLRFPGQLNSDLRKLAVNMVPFPRLHFFMVGFAPLTSRGAHSFRAVSVPELTQQMFDPKNMMAASDFRNGRYLTCSAIFRGKVAMKEVEDQMRNVQNKNSSYFVEWIPNNVQTALCSIPPRGLKMSSTFVGNSTAIQELFKRIGEQFAAMFRRKAFLHWYTGEGMDEMEFTEAE

SEQ ID NO: 41199 - protein, 509 aa, Pirellula sp. 1
MAHYLGIDIGTSGTKTLLIDETGHVVAEANAEYPMEQPKPGWTQQDPEHWWAATKKTVKAMMKKSGVDKADVKAIGLSGQMHGSVFLDRDDNVIRPALLWNDQRTADQCDQITSAAGSREKLIGMVANPALTGFQAPKVLWLRDNEKRNFDKLAKVLLPKDDIRRRLTGDYVTEVSDASGTLFLDVKKRDWSKELLGKLDLSTDLLPRVVESEDVTGTLTKEAAKVLGLTTQCKVVGGAGDCAAGAIGNGIVKSGLLSTSIGTSGVMFVHSDEPNVDASGRLHTFCHAVRGKWHMMGVNLTSGGSLQWWVDQVVQGLAGVPAAKRFEAATAEAEKAIAGSGGMLFLPYLNGERTPHADPNARGAFVGMNLTHDRAAMTRAVMEGITFALRDSLEIIESLGVPVRQIRASGGGSKNVFWRQMQADVFGKKITTLKVEQGPAFGVALLAAVGDGAYKHIAQACQATIEVAAETKADRSAKLTYNKLFPVYRSLYGSLKDDMHQLAELQSTN

SEQ ID NO: 41200 - protein, 171 aa, Triticum aestivum
  misc_feature (57)..(57): Xaa can be any naturally occurring amino acid
  misc_feature (62)..(62): Xaa can be any naturally occurring amino acid
  misc_feature (66)..(66): Xaa can be any naturally occurring amino acid
  misc_feature (129)..(129): Xaa can be any naturally occurring amino acid
  unsure (1)..(171): unsure at all Xaa locations
HVKICVAHILAVIVNFSQDKSWRVRYMVAGQLYELCEAVGPDYSRAGLLLAYVYVVXDNAGXVRIXALGKVMKFCSILSPHDAIYHIITCAKESSSDSSQHVRSSLASVIMGMAPVLGKDPSNGHLLHXFLCICQDEFPHICLSIISNPYQVNQVIGVKHNKVGTGGGKGV

SEQ ID NO: 41201 - protein, 314 aa, Bombardia bombarda
FVFGQSGAGNNWAKGHYTEGAELVDQVLDVVRREAEGCDCLQGFQITHSLGGGTGAGMGTLLISKIREEFPDRMMATFSVVPSPKVSDTVVEPYNATLSIHQLVENSDETFCIDNEALYDICLRTLKLSNPSYGDLNHLVSAVMSGVTVSLRFPGQLNSDLRKLAVNMVPFPRLHFFMVGFAPLTSRGAYSFRAVSVPELTQQMFDPKNMMAASDFRNGRYLTCSAIFRGKVSMKEVEDQMRNVQNKNSSYFVEWIPNNVQTALCSIPPRGLKMSSTFVGNSTAIQELFKRIGEQFTAMFRRKAFLHWYTGEGM

SEQ ID NO: 41202 - protein, 389 aa, Pirellula sp. 1
MNESSEANDLAIRRQIIDETKCVVVKVGTRVLTTSDGKLDLERVDRLAEQLCRIADTGRQTIMVSSGAVGAGVAKLGLPQRPTDLKSLQAIAAIGQADLIGAYEKSLQKRGRHAAQVLLTRNDLRRRSGYLHVRNALNGIDELGAIAVVNENDSVAVSELKTTFGDNDRLAAQVAGLFNDVMLILLTDVSALYDGHPDEKDSQPIHMVHDVDDGVMALVDDQVSTVSKGGMGGKLRASKLANSHGHPTIIGSGTEEFVLDRIFAGDAVGTLFVPPKRSLKGRRRWIGSSANVAGTLFLDQGAVDAIQKHGRSLLAIGIQRVEGTFAHGNVVRLVGPNGEEFGRGLSNYRSHEVARIAGKPSEQIEWILGHRPYENVIHRNNLVLRIVPE

SEQ ID NO: 41203 - protein, 604 aa, Kluyveromyces lactis NRRL Y-1140
TQTDRNVKRKKTSSMTITKFVSEHPQTDPKWWKEAIVYQVYPASFKDSNHDGWGDIKGIDSKLEYIKELGANAIWICPFYDSPQEDMGYDISDYEKVWPRYGTNEDIFNLIDRAHGLGIKIIVDLVINHCSSEHAWFKEARSSLDNPKRDWFIWKAPKGFDSNGKPIPPNNWRSFFGGSAWEYDEHTGQFYLRLFAKGQPDFNWENEVTRNAIYESAVGFWLDHGVDGFRIDTAGLYSKQPGFPDVPIINPGLDFQHPDPAILNGPRIHEFHKEMNKFMRERVKDGRELLTVGEIPCGTHDVCKAYTSAKEQEITQLFEFEHVSVGRKPGNVGVVNFKLSEFKDGIAAAFQFIDKTDSWSTVYIENHDQPRSVTRFGDDSPEYREISAKLLALLETSLTGTLYVYQGQELGMINFRDWPIEKYEDVEVKGMYKMMVDQFGADSDQVKDYVNGLQLISRDHARTPFPWTSEAPYAGFTDGKEPWFPLTETFQEGINAEDELKDPKSVFNFWKTAIEVRKTHKDVLNYGYDFTFVDHANEKLFAFTKKYGEKVLYVVLNFSKEEIEFSFLEGYNSYDYIFGNYPEAEIDTGSNKLQPWEGRFYYAN

SEQ ID NO: 41204 - protein, 328 aa, Bombardia bombarda
FRPDNFVFGQSGAGNNWAKGHYTEGAELVDQVLDVVRREAEGCDCLQGFQITHSLGGGTGAGMGTLLISKIREEFPDRMMATFSVVPSPKVSDTVVEPYNATLSIHQLVENSDETFCIDNEALYDICLRTLKLSNPSYGDLNHLVSAVMSGVTVSLRFPGQLNSDLRKLAVNMVPFPRLHFFMVGFAPLTSRGAYSFRAVSVPELTQQMFDPKNMMAASDFRNGRYLTCSAIFRGKVSMKEVEDQMRNVQNKNSSYFVEWIPNNVQTALCSIPPRGLKMSSTFVGNSTAIQELFKRIGEQFTAMFRRKAFLQWYTGEGMDEMEFTEAE

SEQ ID NO: 41205 - protein, 397 aa, Shigella flexneri 2a str. 301
MFQKVDAYAGDPILTLMERFKEDPRSDKVNLSIGLYYNEDGIIPQLKAVAEAEARLNAQPHGASLYLPMEGLNSYRHAIAPLLFGADHPVLQQQRVATIQTLGGSGALKVGADFLKRYFPESGVWVSDPTWENHVAIFAGAGFEVSTYPWYDEVTNSVRFNDLLATLKTLPARSIVLLHPCCHNPTGADLTNDQWDAVIEILKARELIPFLDIAYQGFSAGMEEDAYAIRAIASAGLPALVSNSFSKIFSLYGERVGGLSVLCEDAEAAGRVLGQLKATVRRNYSSPPNFGAQVVAAVLNDEALKASWLAEVEEMRTRILAMRQELVKVLSTEMPERNFDYLLNQRGMFSYTGLSAAQVDRLREEFGVYLIASGRMCVAGLNTANVQRVAKAFAAVM

SEQ ID NO: 41206 - protein, 474 aa, Salmonella typhimurium LT2
MSTEIKTQVVVLGAGPAGYSAAFRCADLGLETVIVERYNTLGGVCLNVGCIPSKALLHVAKVIEEAKALAEHGIVFGEPKTDIDKIRTWKEKVITQLTGGLAGMAKGRKVKVVNGLGKFTGANTLEVEGENGKTVINFDNAIIAAGSRPIQLPFIPHEDPRVWDSTDALELKEVPKRMLVMGGGIIGLEMGTVYHALGSEIDVVEMFDQVIPAADKDIVKVFTKRISKKFNLMLETKVTAVEAKEDGIYVSMEGKKAPAEAQRYDAVLVAIGRVPNGKNLDAGKAGVEVDDRGFIRVDKQLRTNVPHIFAIGDIVGQPMLAHKGVHEGHVAAEVIAGKKHYFDPKVIPSIAYTEPEVAWVGLTEKEAKEKGISYETATFPWAASGRAIASDCADGMTKLIFDKESHRVIGGAIVGTNGGELLGEIGLAIEMGCDAEDIALTIHAHPTLHESVGLAAEVFEGSITDLPNPKAKKK

SEQ ID NO: 41207 - protein, 215 aa, Glycine max
  misc_feature (8)..(8): Xaa can be any naturally occurring amino acid
  unsure (1)..(215): unsure at all Xaa locations
RTFPLPLXVKRLTELVWEKISDPASIAEVLNQVYAENSTNVDSVFSRIIETTRHPAAAAAFASIMFAPQAELSFSEALSRCQKSNVPICLMYGKEDPWVKPLWGLQVKRQVPEASYYQISPAGHCPHDEVPEVINFLLRGWIRNLESEGSISLPLLDGLDNLKQANARELEFMKEGSKKSVMVRFFDSKFSLWDRIRSYINPRFKLRNSATKSQI

SEQ ID NO: 41208 - protein, 327 aa, Shigella flexneri 2a str. 301
MATRIEFHKHGGPEVLQAVEFTPADPAENEIQVENKAIGINFIDTYIRSGLYPPPSLPSGLGTEAAGIVSKVGSGVKHIKAGDHVVYAQSALGAYSSVHNINADKAAILPAAISFEQAAASFLKGLTVYYLLRKTYEIKPDEQFLFHAAAGGIGLIACQWAKALGAKLIGTVGTAQKAQSALKAGAWQVINYREENLVERLKEITGGKKVRVVYDSVGRDTWERSLDCLQRRGLMVSFGNSSGAVTGVNLGILNQKGSLYVTRPSLQGYITTREELTEASNELFSLIASGVIKVDVAEQQKYPLKDAQRAHEILESRATQGSSLLIP

SEQ ID NO: 41209 - protein, 447 aa, Hordeum vulgare subsp. vulgare
MGKEKTHINIVVIGHVDSGKSTTTGHLIYKLGGIDKRVIERFEKEAAEMNKRSFKYAWVLDKLKAERERGITIDIALWKFETTKYYCTVIDAPGHRDFIKNMITGTSQADCAVLIIDSTTGGFEAGISKDGQTREHALLAFTLGVKQMICCCNKMDATTPKYSKARYEEIVKEVSSYLKKVGYNPDKVPFVPISGFEGDNMIERSTNLDWYKGPTLLEALDQINEPKRPSDKPLRLPLQDVYKIGGIGTVPVGRVETGVIKPGMVVTFGPTGLTTEVKSVEMHHESLLEALPGDNVGFNVKNVAVKDLKRGFVASNSKDDPAKEAANFTSQVIIMNHPGQIGNGYAPVLDCHTSHIAVKFAELVTKIDRRSGKELEALPKFLKNGDAGIVKMIPTKPMVVETFATYPPLGRFAVRDMRQTVAVGVIKGVEKKDPTGAKVTKAAIKKK

SEQ ID NO: 41210 - protein, 326 aa, Bombardia bombarda
RSDNFVFGQSGAGNNWAKGHYTEGAELVDQVLDVVRREAEGCDCLQGFQITHSLGGGTGAGMGTLLISKIREEFPDRMMATFSVVPSPKVSDTVVEPYNATLSIHQLVENSDETFCIDNEALYDICLRTLKLSNPSYGDLNHLVSAVMSGVTVSLRFPGQLNSDLRKLAVNMVPFPRLHFFMVGFAPLTSRGAYSFRAVSVPELTQQMFDPKNMMAASDFRNGRYLTCSAIFRGKVSMKEVEDQMRNVQNKNSSYFVEWIPNNVQTALCSIPPRGLKMSSTFVGNSTAIQELFKRIGEQFTAMFRRKAFLHWYTGEGMDEMEFTEA

SEQ ID NO: 41211 - protein, 239 aa, Thermotoga maritima
DYESPIVNVVEACAPAVVKIDVVKTVKTSFFDPYFEQFFKKWFGELPPGFERQVASLGSGFIFDPEGYILTNYHVVGGADNITVTMLDGSKYDAEYIGGDEELDIAVIKIKASDKKFPYLEFGDSDKVKIGEWAIAIGNPLGFQHTVTVGVVSATNRRIPKPDGSGYYVGLIQTDAAINPGNSGGPLLNIHGEVIGINTAIVNPQEAVNLGFAIPINTVKKFLDTILTQKKVEKAYLGV

SEQ ID NO: 41212 - protein, 86 aa, Zea mays
MIYLSKSAWLLLWWATIVVLLLLVCYTGTQGGPVTMVSARKCESQSFRFKGPCSRDANCANVCLTEGFTGGVCKGLRHRCFCTRDC

SEQ ID NO: 41213 - protein, 448 aa, Lycopersicon chilense
WSPELSSDLYRIDGWGAPYFTVNSSGDISVRPHGTDTLPHQEIDLLKVVKKASDPINSGGLGLQLPLVVRFPDVLKNRLESLQSAFDYAVQSEGYEAHYQGVYPVKCNQDRFVVEDIVKFGSGFRFGLEAGSKPELLLAMSSLCKGSSEGLLVCNGFKDAEYISLALVARKLQLNTVIVLEQEEELDLVIDISRKMEVQPVIGLRAKLRTKHSGHFGSTSGEKGKFGLTTTQILRVVRKLKESGMLDCLQLLHFHIGSQIPSTELLADGVGEAAQVYSELVRLGAGMKFIDIGGGLGIDYDGTKSSDSDVSVGYGLQDYASTVVQAVRFVCDRKNVKHPVICSESGRAIVSHHSVLIFEAVSSTTTRSQELSSMSLHSFVEKLNDDARADYRNLSAAAIRGEYDTCMLYADQLKQRCVDQFKDGNLDIEQLAAVDAVCDFVSKAIGAS

SEQ ID NO: 41214 - protein, 320 aa, Bombardioidea anartia
FRPDNFVFGQSGAGNNWAKGHYTEGAELVDQVLDVVRREAEGCDCLQGFQITHSLGGGTGAGMGTLLISKIREEFPDRMMATFSVVPSPKVSDTVVEPYNATLSIHQLVENSDETFCIDNEALYDICMRTLKLSNPSYGDLNHLVSAVMSGVTVSLRFPGQLNSDLRKLAVNMVPFPRLHFFMVGFAPLTSRGAYSFRAVSVPELTQQMFDPKNMMAASDFRNGRYLTCSAIFRGKVSMKEVEDQMRNVQNKNSSYFVEWIPNNVQTALCSIPPRGLKMSSTFVGNSTAIQELFKRIGEQFTAMFRRKAFLHWYTGEGMD

SEQ ID NO: 41215 - protein, 355 aa, Arabidopsis thaliana
MTIGKSPILLHHHVIFLLLLVLQVSGQHQPRTTAPPYIAQRPNQVPAVIIAMLMFTLLFSMLACCVCYKYTNTSPHGTSSDTEEGGHGEVAFTRRTSRGLGKDVINSFPSFLYSQVKGLKIGKGGVECAICLNEFEDEETLRLMPPCSHAFHASCIDVWLSSRSTCPVCRASLPPKPGSDQNSLYPFIRPHDNQDMDLENVTARRSVLESPDVRLLDRLSWSNNTGANTPPRSRSTGLSNWRITELLFPRSHSTGHSLVPRVENLDRFTLQLPEEVRRQLSHMKTLPQARSSREGYRSGSVGSERRGFPYGRRYNRRNISLSFSFSFQTTSLQSGKGKEKEFGEGSFDRLKAEMV

SEQ ID NO: 41216 - protein, 166 aa, Arabidopsis thaliana
MLKQAAKKALGLTSRQSTPWSVSIFRTYHENVIDHYDNPRNVGSFDKNDPNVGTGLVGAPACGDVMKLQIKVDEKTGQIVDARFKTFGCGSAIASSSVATEWVKGKAMEDVLTIKNTEIAKHLSLPPVKLHCSMLAEDAIKAAVKDYKEKRVKTNGAAAAGETTQA

SEQ ID NO: 41217 - protein, 328 aa, Oryza sativa (japonica cultivar-group)
MGEQQQQVERQPDLPPGFRFHPTDEEIITFYLAPKVVDSRGFCVAAIGEVDLNKCEPWDLPGKAKMNGEKEWYFYCQKDRKYPTGMRTNRATEAGYWKATGKDKEIFRNHHMLIGMKKTLVFYKGRAPKGDKTNWVMHEYRLADASPPQPPPPPSSAEPPRQDDWAVCRIFHKSSGIKKPVQVPMQMPMQMQMPVAHQVPAANYQQQMAMASASIIQVPMQMQMPSMSDQLQMLDDFSTGSLMAPPPPPPSYSTLPGFPLQINGGAQQFVGNPSMYYQQQQQQQQQQMDMAAGGFVVSEPSSLVVSPQATWTLPSGSTDTYIHTYIHT

SEQ ID NO: 41218 - protein, 766 aa, Pseudomonas aeruginosa PAO1
MALAHTLGFPRIGRDRELKKAQEAFWKGELDEAGLRAVGRQLRAAHWQVQKDAGIQLLPVGDFAWYDQVLTHSLTFGVIPERFRAHGEAGPTLHTLFGMARGVSDDSCCGGAHAQEMTKWFDTNYHYLVPEFSADQQFQLSWEQLFEEVDEARALGHQVKPVLIGPLTYLWLGKAKGAEFDRLDLLDRLLPLYGQIFRRLAGQGVEWVQIDEPILVLDLPQAWKNAFERAYNLLQSEPLKKLVATYFGGLEDNLGLAANLPVDGLHIDLVRAPEQYPSILDRLPAYKVVSLGLVNGRNVWRCDLEKALEVVRHARERLGERLWVAPSCSLLHSPVDLEREDGLDAELKSWLAFAVQKCREVAVLARAATEPEAAEVLAALEESRAVQASRASSPRIHKPAVQARLAAIKASDAQRRSPFAERIARQRAGLDLPAFPTTTIGSFPQTSSIRLARQSFKQGKLSEAEYIEAMHSEIRHAVQIQEQLGLDVLVHGEAERNDMVEYFAEQLDGYVFTRFGWVQSYGSRCVKPAVIYGDLSRPRAMTVEWIRYAQSLTDKVMKGMLTGPVTMLMWSFPREDVSREVQARQLALAIRDEVVDLEAAGIRIVQIDEAAFREGLPLRRNAWPHYLEWATEAFRLCASGVRDETQIHTHMCYSEFNDVIESIAAMDADVITIETSRSDMELLEAFEQFDYPNEIGPGVYDIHSPRVPSREEIVALLRKAARRIPAERLWVNPDCGLKTRAWPETEAALVNMVAAARELRGDLARG

SEQ ID NO: 41219 - protein, 248 aa, Brassica napus
  misc_feature (237)..(237): Xaa can be any naturally occurring amino acid
  misc_feature (245)..(245): Xaa can be any naturally occurring amino acid
  unsure (1)..(248): unsure at all Xaa locations
RPTRPIPMKLSQADDIPSYEPPVALTRSARNSPVRAIPSKINQANNVTSDASHIRSRHRFSPTQTLATASVIDQVADMTLDEAHIAQTQPDYDISNQKEEPRISERENEDDVSETLMQTHNEVLNTLQSRLTKLQIVRHFWVRNDIKGAIMALKKLSDPSVQADVISILTDKPEILTLDLFSQLAPVLTGLLGSRTERPVSVSLEMLLKLVAVFGAVVQSNVSARRSVGVDLHAEEXITDLPKLXCGI

SEQ ID NO: 41220 - protein, 199 aa, Oryza sativa (japonica cultivar-group); identical to SEQ ID NO: 1124

SEQ ID NO: 41221 - protein, 146 aa, Brassica napus
  misc_feature (17)..(17): Xaa can be any naturally occurring amino acid
  unsure (1)..(146): unsure at all Xaa locations
WALDPKSGVNLPSSTRXTVKALTEVEAFALASEELKFVASQFRRLHSRQVQHTFRFYSHQWRTWAACFIQAAWRRYCKRKKMEEAEAEAVPMSTTGSSSSMGAAFLVTKFAASALRTIHRNRNTRIRELVKLQKPPEPDFTAEDAD

SEQ ID NO: 41222 - protein, 411 aa, Arabidopsis thaliana
MNALAATNRNFRHASRILGLDSKIERSLMIPFREIKVECTIPKDDGTLVSYIGFRVQHDNARGPMKGGIRYHPEVDPDEVNALAQLMTWKTAVADIPYGGAKGGIGCSPRDLSLSELERLTRVFTQKIHDLIGIHTDVPAPDMGTNAQTMAWILDEYSKFHGHSPAVVTGKPIDLGGSLGREAATGRGVVFATEALLAEYGKSIQGLTFVIQGFGNVGTWAAKLIHEKGGKVVAVSDITGAIRNPEGIDINALIKHKDATGSLNDFNGGDAMNSDELLIHECDVLIPCALGGVLNKENAGDVKAKFIVEAANHPTDPDADEILSKKGVIILPDIYANAGGVTVSYFEWVQNIQGFMWEEEKVNLELQKYMTRAFHNIKTMCHTHSCNLRMGAFTLGVNRVARATQLRGWEA

SEQ ID NO: 41223 - protein, 457 aa, Staphylococcus epidermidis RP62A
MAIGVILNRVFRLNNNPLFDYIYSNKESINHCYFIIPTEEFEEEAKKKAQYYYGSIQKFMYELQRYDIEPFLMSYDKLIDFCKKQAIDKVVVAGDIMSYHHEEYDILHQRKRFKQANIQVISLRANHYFNPRKTHNKQGEPYKVFTSFYRKWRPYLMIRDEYDYHLEDISKVVVKSQHKIKEDYHSYGISERDVQNRWSEFLSQDIENYKENREYLPEVLTSQLSIYLAYGMIDIIQVFNDLLQNYDKNEQNYETFIRELIFREFYYVLMTNYPETAHVAFKEKYQQLKWSYNEENFKLWKDGNTGFPIIDAAMEELKTTGFMHNRMRMVVSQFLTKDLFIDWIWGESFFKQKLIDYDAASNVHGWQWSASTGTDAVPYFRMFNPIRQSERFDNNARYIKTYIPRLNQVDAKYLHDTHKFEQQIKGQGVEIGKDYPKQMIDHKESRQRVMSEFKALD

SEQ ID NO: 41224 - protein, 195 aa, Mesorhizobium loti MAFF303099
MDEKAAPGSETAIFAGGCFWGVQGVFQHVKGVSKAVSGYTGGAKDDAVYETVGTGRTGHAESVEITYDPSKVTYGQLLQVYFSVAHNPTQLNFQGPDSGTQYRSTIFAENDTQKQIAQSYIDQLDKAKLYPAPIVTTIETGKTFYPAENYHQDFLTLNPTYPYIVYNDLPKVANLKQLFPALYSEKPVLVLSASN

SEQ ID NO: 41225 - protein, 426 aa, Catharanthus roseus
MGSSEETKSSKPEKSSSPAPEQSNVHVYPDWAAMQAYYGPRVAVPPYFSSAVASGHPPHPYMWGPPQPMMPPYGTPYAAIYAHGGVYTHPGVPLGSHANAHAGATSPGATEAIAASPLSIDTPTKSSANGSQGLMNKLRGFDGLAMSIGNGNTDSADGGTDHGISQSGDTEGSSDGSNGTTSKAGQKNKKRSREGTPANDRERKSLTPSSPSAAVNTNGSSEKAMRASKVPAAATEKVMGAVLSPNMTTASELRNPSAANAKTSPAKVSQSCSSLPGETWLQNERELKRERRKQSNRESARRSRLRKQAETEELAKKVQTLTAENMTLRSEINKLTENSEHLRHESALLDKLKNARVMQAGEMNKYDELHRQPTGTADLLARVNNSGSTDKSNEEGGGDVFENRNSGTKLHQLLDASPRADAVAAG

SEQ ID NO: 41226 - protein, 322 aa, Arabidopsis thaliana
  misc_feature (163)..(163): Xaa can be any naturally occurring amino acid
  unsure (1)..(322): unsure at all Xaa locations
MSYRLLSVDKDELVTSPCLKERNYLGLSDCSSVDSSTIPNVVGKSNLNFKATELRLGLPESQSPERETDFGLLSPRTPDEKLLFPLLPSKDNGSATTGHKNVVSGNKRGFADTWDEFSGVKGSVRPGGGINMMLSPKVKDVSKSIQEERSHAKGGLNNAPAAXKAQVVGWPPIRSYRKNTMASSTSKNTDEVDGKPGLGVLFVKVSMDGAPYLRKVDLRTYTSYQQLSSALEKMFSCFTLGQCGLHGAQGRERMSEIKLKDLLHGSEFVLTYEDKDGDWMLVGDVPWEIFTETCQKLKIMKGSDSIGLAPGAVEKSKNKERV

SEQ ID NO: 41227 - protein, 198 aa, Bradyrhizobium genosp. beta bv. genistearum
PTPNLRGKTQIKEFASFPTLEQLPLWGFDGSSTQQAEGHSSDCVLKPVAVFPDAARTNGVLVMCEVMMPDGKTPHASNKRATILDDAGAWFGFEQEYFFYKDGRPLGFPSSGYPAPQGPYYTGVGYSNVGDVARKIVEEHLDLCLAAGINHEGINAEVAKGQWEFQIFGKGSKTAADQMWMARYLMLRLTEKYGIDIE

SEQ ID NO: 41228 - protein, 523 aa, Ipomoea batatas
MAAAIGAPKLAPYTCTAERNDGSARRAARFKSLSFASSNLSGDKLGSLVSRRCSRSGGKSSERRNAPIIVSPKAVSDSQNSQTCLDPDASRSVLGIILGGGAGTRLYPLTKKRAKPAVPLGANYRLIDIPVSNCLNSNVSKIYVLTQFNSASLIRHLSRAYASNMGGYKNEGFVEVLAAQQSPENPNWFQGTADAVRQYLWLFEEHNVLEFLVLAGDHLYRMDYERFIQAHRETDADITVAALPMDEKRATAFGLMKIDEEGRIIEFAEKPKGEQLKAMKVDTTIFGLDDQRAKELPFIASMGIYVISKNVMLNLLREKFPGANDFGSEVIPGATSIGMRVQAYLFDGYWEDIGTIEAFYNANLGITKKPVPDFSLYDRSAPIYTQPRYLPPSKMLDADVTDSVIGEGCVIKNCKIHHSVVGVRSCISEGAIIEDSLLMGADYYETDADRRLLAAKGSIPIGIGRNSHIKRAIIDKNARIGDNVKIINSDDVQEAARETDGYFIKSGIVTVIKDALIPSGTVI

SEQ ID NO: 41229 - protein, 394 aa, Catharanthus roseus
MGSSEIDKSSKEAKEAKEAKETPPSSQEQPAATSAGTPDWTGFQAYSPIPPHGFLASSPQAHPYMWGVQHLMPPYGTPPHPYVAMYPHGGIYAHPSIPPGSYPFSPFAMPSPNGIAEPSVNTPGNMEVDGKASEGKEKLPIKRSRGSLGSLNMITGKNNDAGKTSGASANGACSKSAESASEGSSEGSDANSQNESQMKSGNRQDSGETSQNGSGAHGSQNGGTNTPHSMVAMVPLSASGGVTGPATNLNIGMDYWGTAASPTVPVVRGKVPSTPVGGGMVPARDPVQAQLWIQDERELKRQRRKQSNRESARRSRLRKQAECDELAQRAEALKEENNSLRAEVSLIRSEYEQLLAQNAALKERLGEASGQDDPRSSRNEQQHSVQRETAARSQ

SEQ ID NO: 41230 - protein, 522 aa, Ipomoea batatas
MAAATIGALSSPYTGGVGERIDGDVSKASFRRLSFASSHLSGDKLMPLPPRRLRSGGKSSEVRTAPFIVSPKAVSDSQNSQTCLDPDASRSVLGIILGGGAGTRLYPLTKKRAKPAVPLGANYRLIDIPVSNCLNSNISKIYVLTQFNSASLIRHLSRAYASNMGGYKNEGFVEVLAAQQSPENPNWFQGTADAVRQYLWLFEEHNVLEFLVLAGDHLYRMDYERFIQAHRETDADITVAALPMDEKRATAFGLMKIDEEGRIIEFAEKPKGEQLKAMKVDTTLFGLDDQRAKEMPYIASMGIYVVSKDVMVNLLRQKFPGANDFGSEVIPGATSIGLRVQAYLFDGYWEDIGTIEAFYNANLGITKKPVPDFSFYDRSAPIYTQPRYLPPSKMLDADVTDSVIGEGCVIKNCKIHHSVVGLRSCISEGAIIEDTLLMGADYYETDADRRLLAAKGSVPIGIGRNSHIKRAIIDKNARIGNDVKIINNDNVQEAARETEGYFIKSGIVTIIKDALIPSGTII

SEQ ID NO: 41231 - protein, 458 aa, Rhizobium sp. NGR234
MYSNSLIELDRAHLIHPVASYRGHEKLGVRVLASAKGATVTDASGRQLIDGFAGLWCVNAGYGHESIVEAATRQMRELPYATGYFGLGSEPAIRLASELAERAPGNLDHVFFTLGGSDAVDSTIRFIRYYWIGRGEPQRDQFISVEQGYHGSSTVGAGLTALPAFHAGFGIPFDWQHKIPSHYAYRNPVGDDPQAIIDASLAALRQKVEEIGPERVAAFYAEPIQGSGGVLVPPKGWMKAMRQLCQELGILFVADEVITGFGRTGPLFACHEDEIVPDFMTVAKGLTSGYVPMGAVFMGDHIYQTIADSAGAGAVGHGYTYSAHPVSAAVGLEVLKLYENELLDNGRKAGARLMAGLESLKDHPLVGDVRGRGMLAAVELVVDKEKKTPLPAKAEPARRIFDRAWENGLVIRAFANGVLGYAPPLCCTEAEIDGIVERTRKVLDETLEDPAVRSGLSD

SEQ ID NO: 41232 - protein, 491 aa, Erwinia carotovora subsp. atroseptica SCRI1043
MAQHDIQQTTQGAPTLRRELKARHLTMIAIGGSIGTGLFVASGATVSQAGPGGALLSYALIGLMVYFLMTSLGELAAFMPVSGSFSTYGSRYVEEGFGFALGWNYWYNWAVTIAVDLVAAQLVMGYWFPEVSGWIWSALFLALMFLLNYISVKGFGEAEYWFSLIKVTTVIIFIAVGVMMITGIMSGAENAGFHNWEIGDAPFAGGFSAMIGVAMIVGFSFQGTELIGVAAGESQEPSKNIPRAIRQVFWRILLFYIFAILIISLIIPYTDPNLLRNDVKDITVSPFTLVFENAGLLSAAAVMNAVILTAVLSAGNSGMYASTRMLFTLASEGKAPRIFAKLSKGGVPRNALYATTVVAALCFLSSLYGNQTVYLWLLNTSGMTGFIAWLGIAISHYRFRRGYVMQGHDLNRLPYQSRFFPLGPIFAFVLCLIITLGQNYQAFLQDNIDWYAVTATYIGIPLFLLIWFGYKLYRGTGFIKYQDMTFPDHKD

SEQ ID NO: 41233 - protein, 198 aa, Bradyrhizobium canariense bv. genistearum
PTPNLRGKTQIKEFASFPTLEQLPLWGFDGSSTQQAEGHSSDCVLKPVAVFPDGARTNGVLVMCEVMMPDGKTPHPTNKRATILDDSGAWFGFEQEYFFYKDGRPLGFPASGYPAPQGPYYTGVGFSNVGDVARKIVEEHLDLCLAAGINHEGINAEVAKGQWEFQIFGKGSKKAADEMWMARYLMLRLTEKYGIDIE

SEQ ID NO: 41234 - protein, 277 aa, Bacillus anthracis str. A2012
MSLTSLKDYTTLHNGVKMPWFGLGVFKVEDGSQVIDSVKAAIKNGYRSIDTAAIYQNEEGVGQAIRESGVSREELFITSKVWNSDQGYETTLQAFETTLEKLGLEYLDLYLVHWPVKGKYTESWKALEKLYKDGRVRAIGVSNFHIHHLQDVFEIAEIKPMVNQVEYHPRLAQEELHAFCKEHNIQLEAWSPLMQGQLLDNPTLQDIAKKYNKSTAQIILRWDLQNEVVTIPKSIKEHRIIENANIFDFELSSDDMKAIQALNEDHRVGPDPDNFNF

SEQ ID NO: 41235 - protein, 155 aa, Prochlorococcus marinus str. NATL2A
MFGLLNTLFGFTIKPKSAFASSKSMENYKTLTDTDWENRLPKDAFYVLRKEGTERPFSSPLNDEKRKGVFRCAGCGLALFSSTTKFDSGTGWPSFFDHLPDAIETKTDFKLIVPRTEYHCRRCGGHQGHVFNDGPRPTGKRYCNNGVALAFEVDS

SEQ ID NO: 41236 - protein, 198 aa, Bradyrhizobium canariense bv. genistearum
PTPNLRGKTQIKEFASFPTLEQLPLWGFDGSSTQQAEGHSSDCVLKPVAVFPDGARTNGVLVMCEVMMPDGKTPHSTNKRATILDDSGAWFGFEQEYFFYKDGRPLGFPASGYPAPQGPYYTGVGFSNVGDVARKIVEEHLDLCLAAGINHEGINAEVAKGQWEFQIFGKGSKKAADEMWMARYLMLRLTEKYGIDIE

SEQ ID NO: 41237 - protein, 299 aa, Glycine max
  misc_feature (135)..(135): Xaa can be any naturally occurring amino acid
  unsure (1)..(299): unsure at all Xaa locations
MEFETSYPTCFMSNSSWFSQEGQFTEWTREENKKFESALAIYDKDTPDRWLRVAAMLPGKTVYDVIKQYRELEEDVCEIEAGRIPVPGYPTSSLTLEMVDNQCYDACRKKPATLRSSDQERKKGVPWTEEEHRRXLMGLLKYGKGDWRNISRNFVVTKTPTQVASHAQKYYIRQKLSGGKDNKRRPSIHDITIVNLTSDQEKPLLLNDESHMTFEQQKLTSMPKVQLEWINHHDNGSRMVVNPNYDMFMSPSSGISSKTLKLQGQDFYECAFHETYAKLKNSGFRTTSRDFNKEGIHAL

SEQ ID NO: 41238 - protein, 455 aa, Arabidopsis thaliana
MSFRSIVRDVRDSIGSLSRRSFDFKLSSLNKEGGKSRGSVQDSHEEQLVVTIQETPWANLPPELLRDVIKRLEESESVWPARRHVVACASVCRSWRDMCKEIVQSPELSGKITFPVSLKQPGPRDATMQCFIKRDKSNLTYHLYLCLSPALLVENGKFLLSAKRIRRTTYTEYVISMHADTISRSSNTYIGKIRSNFLGTKFIIYDTQPAYNSNIARAVQPVGLSRRFYSKRVSPKVPSGSYKIAQVSYELNVLGTRGPRRMHCAMNSIPASSLAEGGTVPGQPDIIVPRSILDESFRSITSSSSRKITYDYSNDFSSARFSDILGPLSEDQEVVLEEGKERNSPPLVLKNKPPRWHEQLQCWCLNFRGRVTVASVKNFQLIAANQPQPQPQPQPQPQPLTQPQPSGQTDGPDKIILQFGKVGKDMFTMDFRYPLSAFQAFAICLSSFDTKLACE

SEQ ID NO: 41239 - protein, 171 aa, Triticum aestivum
MGSSDMDKTPKEESKTPPATSQEQSSTTGMPTTNPDWYNFQTYSPIPPHGFLASSPQAHPYMWGVQHIMPPYGTPPHPYVAMYPHGGIYAHPSIPPGSYPFSPFAMASPNGIADASGNAPGSIEVGGKPPEMKEKLPIKRSKGSVSGGNLSMWITGKNNEPGKTPGESANG

SEQ ID NO: 41240 - protein, 379 aa, Jungermannia leiantha
SDSGKDAGRLSAAWEMFKCQEDLVKVAKEFGIKLTMFHGRGGTVGRGGGPTHLAILSQPPDTIHGSLRVTVQGEVIEQSFGEEHLCFRTLQRFTAATLEHGMHPPRAPERKWREVMDEMAKVATEEYRNIVFKHPKFVEYFRAATPETEYGRMNIGSRPAKRKPSGGIESLRAIPWIFAWTQTRFHLPVWLGFGGAFKHVLAKSNSNVVLLREMYNEWSFFRVTIDLIEMVFAKGDSRIAALYDELLVSDELKPLGEHLRAMYAETRELLLKIAGHEDVLAGNPTLKQRLRLREPYITILNLIQASTLCKIRDQNFHITEQPTTPRAGDSSSQPTTPRAGGKHSAELVTLNRTTEYPPGLEDTLIITMKGIATGMQNTG

SEQ ID NO: 41241 - protein, 198 aa, Bradyrhizobium canariense bv. genistearum
PTPNLRGKTQIKEFASFPTLEQLPLWGFDGSSTQQAEGHSSDCVLKPIAVFPDGARTNGVLVMCEVMMPDGKTPHSTNKRATILDDSGAWFGFEQEYFFYKDGRPLGFPASGYPAPQGPYYTGVGFSNVGDVARKIVEEHLDLCLAAGINHEGINAEVAKGQWEFQIFGKGSKKAADEMWMARYLMLRLTEKYGIDIE

SEQ ID NO: 41242 - protein, 149 aa, Glycine max
  misc_feature (34)..(34): Xaa can be any naturally occurring amino acid
  unsure (1)..(149): unsure at all Xaa locations
SPTNAARGCRGLNPGSFLTLAKGSESGGSYGQWXSAIGRTAATTTLAESTVVLTTLLIKRTLDGHWNVIDVRYGLVGGYAVITYRCAVAQPSGAIVCGFVAAWVLIGLNKLAANVEYDDPLDAAQLHGGCGAWRCLFTGLFAKKEYVEE

SEQ ID NO: 41243 - protein, 253 aa, Wolbachia endosymbiont of Drosophila simulans
MKSKAFILSIFAYFLIAFSSYANMFDWNAKKVVDASTTACNCNQGLADLVEELIPAVVNISSEQIIKQENNSRTRVPSMPGNNFFDDFREFFEHFDQFFMDRGPSVNKEVVLLGSGFIIDKGGTIVTNYHVIKNAKDITVTMNDNTYFKAEVLGYDARTDLAVLKINSDKDLSSVAFGDSDKARVGDTVMAIGNPFGLGGSVSTGIISARSRDISIGTMNEFIQTDAAINRGNSGGPLFDLNGKVIGINTAIY

SEQ ID NO: 41244 - protein, 226 aa, Bacillus halodurans C-125
MDCPFEAVIFDMDGVIADTVGLHYEANQHIAKKLSVTFSEEMNQSLQGLSREKTVRAICDLTGEEVSDEQVKQLSELRNEQYQRLIAELTPADALPGIYSFIRELKEKKVSIALASASTNAPRVLSRLQLIDAFDVIVDVQKVRRGKPDPEIFLTAAQLLGVSSNRCVAIEDGEAGLTGILQTDMFAVGVGTHSAMKKAHWQVASTEELSIKSLINAVEKTRNKDI

SEQ ID NO: 41245 - protein, 432 aa, Kineococcus radiotolerans SRS30216
MTLAPVQPAGTTVEEAVLAVCRRAKVASRPLRLASRATKDAALHAIADAIEAATERIVTANGEDLARGAADGTSPHLLDRLRLDPQRVAAVAAAVREVAALPDPVGEVVRGSTLPNGLRLRQLRVPMGVLGVVYEARPNVTVDVAVLALKSGNAVVLRGGSAAQSSNTVLVEVVRGALESVGLPADAVTSIDEHGRDGVGALLTARGLVDLLVPRGGADLIQRVVREATVPVIETGVGNCHVYVDASADLAQAVEIVLNAKTSRPSVCNAAETVLVHSALAADFLPTLLRALHEAGVVLHADATSLAAARAAGLPAQPVTDEDWAAEFHGLEIAVGVVDSVQDAVEHIARWTSAHTEAVLATDVRVTDYFCAAVDSAVVAVNASTRFTDGGEFGLGAEVGISTQKLHARGPMGLAELTTTTWQVLGDGHVRV

SEQ ID NO: 41246 - protein, 318 aa, Camarops petersii
SDNFVFGQSGAGNNWAKGHYTEGAELVDQVLDVVRREAEGCDCLQGFQITHSLGGGTGAGMGTLLISKIREEFPDRMMATFSVVPSPKVSDTVVEPYNATLSVHQLVENSDETFCIDNEALYDICMRTLKLSNPSYGDLNHLVSAVMSGVTTCLRFPGQLNSDLRKLAVNMVPFPRLHFFMVGFAPLTSRGAYSFRAVTVPELTQQMFDPKNMMAASDFRNGRYLTCSAIFRGKVSMKEVEDQMRNVQNKNSSYFVEWIPNNVQTALCSIPPRGLKMSSTFVGNSTAIQELFKRVGEQFTAMFRRKAFLHWYTGEGMD

SEQ ID NO: 41247 - protein, 377 aa, Pirellula sp. 1
MKPLNIGLIGYGFMGRTHTNGYRQAPRFFDLEYHPVLKAVCARNEEKAKAFAEQQGYESVETDWRKLLERDDIDAVDVCTPNNLHKEISIAAAEAGKMVLCEKPLAMNTAEGIEMCEAVEKAGVRNMVWYNYRRVPAVTLAKQLIDEGRLGKIFHYRANFLQDWTINADVPQGGAATWRLDAEAAGSGVTGDLLAHCIDTALWLNGSIQDVSAVTETFVKERVHSETGEKTPVKIDDACAFHCHFGNGSLGLFESTRYARGHKALYTLEINGENGSLRWDLHDLHRLEFFDHNDDSIVRGWRSIHVSDGDQPYMANWWVPGLQIGYEHTFVHQVADFLKSLESDQPAAPTFRDALETQRVCDAVLDSAATRSWKDVK

SEQ ID NO: 41248 - protein, 419 aa, Crocosphaera watsonii WH 8501
MTIKSSPNWLLTSVERSYNAYLALETSDSLDRSLGIKAMAKGLNRSFDAILEANTLDLEMSREMAIPDILIDWLKLTPERLKNTVEILESLAELPDPIQQVFNAPYRLNMAGTYSQLKPLGVVALVYETFPELGAIAAGFCLKTGNSLLLRGCNSSTHSNQVIADILQTALKDTELPTGCLEVISAEQGASIQDLVTQHQYLSLVLPYGRPSLVEQVTQWATAPVLKSAMGNCYLYWSPTVDLEMVRWVILDSHSSEPDPVNAIEKVLISPDQKPSILVRLFNILQEQGFELRGDERLLEEYKDHLKPVKASEWSTPYLDKIIAFKIVDNLSEGITWINQYSSGHADCLVTDSYTESRQFATEIDSALVYINNSPRFDRHPTYGESLFLGVSNQKGHYRGLISLETFTTLKQVVQGQGK

SEQ ID NO: 41249 - protein, 325 aa, Camarops tubulina
DNFVFGQSGAGNNWAKGHYTEGAELVDQVLDVVRREAEGCDCLQGFQITHSLGGGTGAGMGTLLISKIREEFPDRMMATFSVVPSPKVSDTVVEPYNATLSVHQLVENSDETFCIDNEALYDICMRTLKLSNPSYGDLNHLVSAVMSGVTTCLRFPGQLNSDLRKLAVNMVPFPRLHFFMVGFAPLTSRGAYSFRAVTVPELTQQMFDPKNMMAASDFRNGRYLTCSAIFRGKVSMKEVEDQMRNVQNKNSSYFVEWIPNNVQTALCSIPPRGLKMSSTFVGNSTAIQELFKRVGEQFTAMFRRKAFLHWYTGEGMDEMEFTEAE

SEQ ID NO: 41250 - protein, 382 aa, Kineococcus radiotolerans SRS30216
MSTPSTVTRREDLARAGRVVVKVGSSSLTTAVGGLDAARLGALVDVLAARRAGGGEVVLVSSGAIAAGLAPLGLRKRPRDLASQQAAASVGQGLLLAEYARAFARAGLTVGQVLLTAEDVVRRTHYGNAQRTLERLLSLGVVPVVNENDTVATHEIRFGDNDRLAALVAHLVRADALVLLSDVDALYDAPPSTPGASRLATVRGPEDLGGVTVGSAGAAGVGTGGMATKVEAAGIAVAAGVPALVTSAALAGDALAGADVGTWFPVTATGRARRSTRQLWLAHAAAPAGRLVLDEGAVRAVRQARSSLLPAGVVGLSGRFRAGDPVDLVDGNGHALARGLVNYSSEELPDLLGRSTRELARQWGPAYEREVVHRDHLVLLGR

SEQ ID NO: 41251 - protein, 328 aa, Camarops ustulinoides
FRPDNFVFGQSGAGNNWAKGHYTEGAELVDQVLDVVRREAEGCDCLQGFQITHSLGGGTGAGMGTLLISKIREEFPDRMMATFSVVPSPKVSDTVVEPYNATLSVHQLVENSDETFCIDNEALYDICMRTLKLSNPSYGDLNHLVSAVMSGVTTCLRFPGQLNSDLRKLAVNMVPFPRLHFFMVGFAPLTSRGAYSFRAVTVPELTQQMFDPKNMMAASDFRNGRYLTCSAIFRGKVSMKEVEDQMRNVQNKNSSYFVEWIPNNVQTALCSIPPRGLKMSSTFVGNSTAIQELFKRVGEQFTAMFRRKAFLHWYTGEGMDEMEFTEAE

SEQ ID NO: 41252 - protein, 327 aa, Catabotrys deciduum
GPDNFVFGQSGAGNNWAKGHYTEGAELVDNVLDVVRREAEGCDCLQGFQITHSLGGGTGAGMGTLLISKIREEFPDRMMSTYSVVPSPKVSDTVVEPYNATLSVHQLVENSDETFCIDNEALYDICMRTLKLPSPSYGDLNHLVSAVMSGVTTCLRFPGQLNSDLRKLAVNMVPFPRLHFFMVGFAPLTSRGAYSFRAVSVPELTQQMFDPKNMMAASDFRNGRYLTCSAIFRGKVAMKEVEDQMRNVQNKNSSYFVEWIPNNVQTALCSIPPRGLKMASTFVGNSTSIQELFKRVGEQFTLMFRRKAFLHWYTGEGMDEMEFTEAE

SEQ ID NO: 41253 - protein, 386 aa, Solibacter usitatus Ellin6076
MKKLNIGMIGYGFMGRTHSNAFSQVNHFFDVPYQPVLKTVCARNADRAKAFASKWGYESVEPDWRKVVESPEIDLIDIASPNDTHAEIAVAAAKAGKMVMCEKPLGRNAAEGETMVKAVEAAGVPNMVWYNYRRVPAVMLAKQLIDEGRLGRIFHYRAKFLQDWTISSDLPQGGEGLWRLDVAVAGSGVTGDLLAHCIDTAMWLNGGIDEVTGATETFIKARQHNLTGKLEPVGIDDASLFLARFNNGSLATFEATRYARGHKALYTLEINGEKASIIWDLHDLHRLQYFDHRDEGRLRGWKSVHITDSDHPYMKHWWVPGLQIGYEHTFIHQAADFLSALGEGKSAAPTFREALLTDYVTDAVLASAQNRKWVKVQGSEKLEAAC

SEQ ID NO: 41254 - protein, 312 aa, Ochromonas danica
NGFGRIGRLVARIMIEDPNSKLLAINTGADANYMAYQFKYDTVHGKWKGSLEVDGDDLIINGQRVKTTHFRNPNEIPWKGLGVEYLCEPTGVFLTADSAKPHVDSGVKKVIFSAPAKDKSPTIVMGVNENEYTTDMTFVSLNASCTTNCLAPMVKAIHDKFGIEDALMTTVHAMTSTQMVVDGSSKKDWRGGRGAAQNIIPSSTGAAKAVAQVILPSKGKITGMAFRVPTADVSVVDLTLRLATETTYEEICAEIQRRANTDMKGILGYTDEALVSSDFVTCPISSVFDAKAGIMLNPRFVKLVAWYDNEWG

SEQ ID NO: 41255 - protein, 315 aa, Ochromonas danica
NGFGRIGRLVLRAARNKPDVQVVAINDPFIPVDYMKYMFYYDSVHGRYPQAPVVVENGKLIVDGKVISVSHELDPVNIKWGDSGADYIVGITGKKFLTEEGAAKHFVGGAKKIVMSGPSKNKTPMFVVGVNHKEYKKELLVVSNASCTTNCLAPLAKAINDNFGIKEGLMTTIHATTASQPTVDGHSLKDWRGGRGAVGINIIPSSTGAAKAVGKVIPALHGKLTGMAFRVPTANVSVVDLTVTLEKGAKYADIKEAVKAASNGELKGILGYTEDSVVSFHFVSDTRSSTFDANAGIALTDNFVKLVSWYDNEWG

SEQ ID NO: 41256 - protein, 344 aa, Nostoc punctiforme PCC 73102
MKVGINGFGRIGRLVLRAGLDNPNIEFVGINDLVPPDNLAYLLKYDSTHGQLKHKVEAKEDGILIDGHFIPCVSMRNPAELPWGKLGADYVVEATGLFTDYEGAANHLKAGAKRVVISAPTKDPDRVTTLLMGVNHHLFDPGKDIIVSNASCTTNCLAPIAKVINDNFGLTEGLMTTVHAMTATQPTVDGPSKKDWRGGRGASQNIIPSSTGAAKAVALVLPELKGRLTGMALRVPTPDVSVVDLTFKTAKATSYKEICAAMKEAAAGSLAGILGYTDEEVVSTDFQGDTHSSIFDAGAGIELNSNFFKVIAWYDNEWGYSNRVIDLMLSISQKEKLASTVAVV

SEQ ID NO: 41257 - protein, 498 aa, Arabidopsis thaliana
MSGAITCSAADLATLLGPNATAAADYICGQLGTVNNKFTDAAFAIDNTYLLFSAYLVFAMQLGFAMLCAGSVRAKNTMNIMLTNVLDAAAGGLFYYLFGYAFAFGGSSEGFIGRHNFALRDFPTPTADYSFFLYQWAFAIAAAGITSGSIAERTQFVAYLIYSSFLTGFVYPVVSHWFWSPDGWASPFRSADDRLFSTGAIDFAGSGVVHMVGGIAGLWGALIEGPRRGRFEKGGRAIALRGHSASLVVLGTFLLWFGWYGFNPGSFTKILVPYNSGSNYGQWSGIGRTAVNTTLSGCTAALTTLFGKRLLSGHWNVTDVCNGLLGGFAAITAGCSVVEPWAAIVCGFMASVVLIGCNKLAELVQYDDPLEAAQLHGGCGAWGLIFVGLFAKEKYLNEVYGATPGRPYGLFMGGGGKLLGAQLVQILVIVGWVSATMGTLFFILKRLNLLRISEQHEMQGMDMTRHGGFAYIYHDNDDESHRVDPGSPFPRSATPPRV

SEQ ID NO: 41258 - protein, 555 aa, Cryptococcus neoformans var. neoformans B-3501A
MTNLHFGVCSSTNRLHQKNPTNVLLCLVCIISSAQSYISPDYQLMIPSTSSTNHSAFRVSYLWSPALQRLSDDLPSNVGRSSMVHDLIKSFDLLDFEELKERFSKSDKPEDEDGKSEDDDDNEADRNEVNNGDKQGADGEPQRRKPGSPTESPPHAQNKKATVVFPQPSLGTKACLLKYHDRSYIERLLMAHIDRDPNDPTHLPSSPSSSASSPRPAKIARTDPYNLSHDNPVFPTLASYISHVTAATSTACRLLATDKADWAVCWDGGRHHAKRKEAGGFCYVNDLVLGGLLLSREGRIPLPLKEGEDPKRQRTRAPRILYLDMDLHYSDGVSAAFHSPTVYPYPLKEGITPPKPPNVLTLSVHHSSPIFFPPPTPLSLLPSPDTESPFSLSIPLSAYPSRQTYAKVFNQCIQPIREAWDPDYIILQLGTDGLPGDRVGQYGNWSVDGEGGIKWVVERVKEWGKKVCVTGGGGYRHDNAARAWAEVMGVLLDRDFVEDMPIPHHDHFEQYAPSFTLQVPDSHMRDENKPEDLEKAAEVFNVLAERIKIIVDANS

SEQ ID NO: 41259 - protein, 276 aa, Schizosaccharomyces pombe
FESLGLLVDDRVDLAKGMVENFIFEITYYGKILNANRTYYLLRSQPPFLTDMALRVYERIKNEEGSLDFLHRAFSATIKEYHTVWTATPRLDPKTGLSRYRPGGLGIPPETEASHFEHLLRPYMEKYHMTLEEFTHAYNYQQIHEPALDEYFVHDRAVRESGHDTTYRLEKVCADLATVDLNSLLYKYETDISHVILEYFDDKFVLPNGTIETSAIWDRRARARRAAMEKYLWSEADSMWYDYNTKLETKSTYESATAFWALVGRCGNSPSSRKIC

SEQ ID NO: 41260 - protein, 484 aa, Rhizobium sp. NGR234
MKLKDKELFRQAGVIGGEWIGAASGDVVEVFDPASQAVLGTVPDMGTAETRAAIEAAETAFGPWKKKTHAERAALLERWHALMIEHLEDLALILTLEQGKPLDEARGEIRYGAAFVKWFAEEARRIGGHTIPSPTPDRRIVVLKEAVGVCAIVTPWNFPNAMITRKVAPALAAGCTVVIKPSEFTPFSALALGVLAERAGIPAGVVNIVTGMPTAIGNEIMANETVRKISFTGSTRVGSLLMRGAADSVKRLSLELGGNAPFIVFDDADLDLAVEGAIASKFRNGGQTCVCANRILVQSGVYDAFAEKLAARVNAMKVGPGTEPGVAIGPMINAAAIDKIDRHVEDALAKGAKIAARGRSLPVGRQYTAPLVLTGATTEMLLASEETFGPVAPLFCFETEEEAITIANGTPFGLAAYFYTENLKRSWRVAEALEFGMVGLNTGAISTEVAPFGGVKQSGLGREGAQVGIEEYLELKSFHIGGLA

SEQ ID NO: 41261 - protein, 296 aa, Zea mays
  misc_feature (60)..(60): Xaa can be any naturally occurring amino acid
  unsure (1)..(296): unsure at all Xaa locations
MMRETYMDVLPPVDHIAARSNWFPAAARLWTAAENKQFERALAGLDLCRPDWEEVARAIXPGRTVREVVSHFKHLEVDVQQIESGQVPLPAYGGGASSFTLQWDGYGPGPGDFRHGYRFAGGCGRRHHGRTPEQERKKGVPWTEEEHRLFLLGLKKYGKGDWRNISRNFVQTRTPTQVASHAQKYFIRLNSGGKDKRRSSIHDITTVNLTDDQPPSPSQSSLITSQSNAPATAPAAGICQVPLAADAKRHGAGTLPFSSPNRTSAAPAYRMEFHDQQGLQCGPLHDQLLASQSVLF

SEQ ID NO: 41262 - protein, 198 aa, Bradyrhizobium genosp. alpha
PTPNLRGKTQIKEFASFPTLEQLPLWGFDGSSTQQAEGHSSDCVLKPVAVFPDGARTNGVLVMCEVMMPDGKTPHASNKRATILDDAGAWFGFEQEYFFYKDGRPLGFPASGYPAPQGPYYTGVGFSNVGDVARKIVEEHLDLCLAAGINHEGINAEVAKGQWEFQIFGKGSKKAADEMWMARYLMLRLTEKYGIDIE

SEQ ID NO: 41263 - protein, 333 aa, Erwinia carotovora subsp. atroseptica SCRI1043
MLTKVNLITGFLGSGKTTTIRHLLSQKPEDEVWAVLVNEFGEVGIDGALLADSGAVLKEIPGGCMCCVNGLPMQVGLNMLLQQKKPHRLLIEPTGLGHPKQILSLLTSDIYQPWLTLQATLCLLDARQLSDSRYTENENFRDQLAAADIIIANKRDTYTTDDLAALQQWQQANSDGRQIIETSQGNLDRQQLDQPRHPLSQNRVRELPDGIHHHAHKPKNGLAALQLPSGQSWRRSLNQGQGYHACGWIFEPETAFDTATLLDWVRLSPVSRVKGVMRIKEGTLVVNRQGLDLHIETRSAAPIDSRIEVINETPAEWNTLQASLLKARLPNVD

SEQ ID NO: 41264 - protein, 241 aa, Pyrococcus horikoshii OT3
MVKVIFFDLDDTLVDTSKLAEIARKNAIENMIRHGLPVDFETAYSELIELIKEYGSNFPYHFDYLLRRLDLPYNPKWISAGVIAYHNTKFAYLREVPGARKVLIRLKELGYELGIITDGNPVKQWEKILRLELDDFFEHVIISDFEGVKKPHPKIFKKALKAFNVKPEEALMVGDRLYSDIYGAKRVGMKTVWFRYGKHSERELEYRKYADYEIDNLESLLEVLARESSSNKKVHPPRQQI

SEQ ID NO: 41265 - protein, 598 aa, Ehrlichia ruminantium str. Gardel
MSSSTYSIIDHEYDVVIIGAGGAGLRATFGMTSVGLSVACISKVFPTRSHTVAAQGGISAALGNVTEDDWRWHMFDTVKGSDWLGDQDAIEYMCKNAAEAVIELERYGVPFSRTSDGKIYQRPFGGMTTEFGKGKPAIRTCAASDKTGHAILHTLYQQSLKHNAEFFVEYFAIDLIMNEVGQCQGVIAWSLCDGTLHRFRSHAVVLATGGYGRIYFSATSAHTCTGDGGGMVSRINLPLEDMEFVQFHPTGIYGSGCLMTEGCRGEGGYLINSEGERFMERYAPKAKDLASRDVVSRAMTLEIREGRGVGPNKDHVYLSISHLGAEVIHDKLPGISETARTFAGVDVTKEPIPVLPTVHYNMGGIPTNYYGQVITLTDSGEKIVPGLFAIGEAACVSVHGANRLGSNSLLDLVVFGRAAAIKAKELIKPGMLHAPINKASEEKIIARFDGIRFSKGSLRVAEVRGKMQHVMQNHAAVFRTAEVLDEGKVKIKDVAKLMPEIVVQDKSMIWNSDLVEALELTNMMPQAVVTMECAANRQESRGAHAREDFPERDDENWMKHTLAWYDAANCSVEIKYKDVAKTTLTNDVQYFPPQKRVY

SEQ ID NO: 41266 - protein, 278 aa, Hordeum vulgare subsp. vulgare
METGGSKREGDCPGQERTKKVRRRTTGPDSVAETIKKWKEQNQKLQQENGSRKAPAKGSKKGCMAGKGGPENSNCAYRGVRQRTWGKWVAEIREPNRGNRLWLGSFPTAVEAARAYDDAARAMYGATARVNFPEHSPDANSGCTMAPSLLTSNGATAVSHPSDGKDESESPPSLVSNAPTAALHRSDAKDEFESAGTVAHKVKTEVSNDLGSTHEEHKALEVFQPKGKALHKEANVSYDYFNVEEVVDMIIVELSADVKMEAHEEYQEGDDGFSLFSY

SEQ ID NO: 41267 - protein, 553 aa, Bacillus halodurans C-125
MNRQWWKEAVAYQIYPRSFCDSNGDGIGDLQGVIEKLDYVKDLGIDVIWICPMYRSPNDDNGYDISDYQDIMDEFGTMEDFDQLLHEVHRRGMKLIIDLVINHTSDEHPWFIESRSSKVNPKRDWYIWRDPKEDGSEPNNWESIFNGSAWEYDQATGQYYMHIFSRKQPDLNWENRDVRKALYQMINWWLEKGIDGFRVDAISHIKKVKGLPDLPNPKGLDYVPSFEGHMNREGIHEYLQELKRETFDHFNIMTVGEANGVTVEQADDWVGEDHGAFNMIFQFEHLGLWDKGVNGTVDLAELKSIFTTWQKGLEGKGWNALFLENHDQPRSVSTWGNDKGYWKESAKALGTLFFFMQGTPFIYQGQEIGMTNVRFPSIEDYDDVGMKNFYRIETEKGRSHEEIMEIIWQKGRDNSRTPMQWNDQKHAGFSTATETWMGVNPNYKQINVEKQLKEEDSVLSYYKKMIELRKSSDLFVYGSYDLVLPEHKQIFAYKRTLEKESALILVNMFADEVSFQFPLKLIGEKERVLGNYKTQGAKDKLRPYEARVYRWQS

SEQ ID NO: 41268 - protein, 590 aa, Oryza sativa
GAVDFLVKPIRKNELKNLWQHVWRRCHSSSGSGSESGIRTQKCTKPKVDDEYENNSGSNNDNEDDDDNDEDDDDLSVGHNARDGSDNGSGTQSSWTKRAVEIDSPQQMSPDQPSDLPDSTCAQVIHPTSEICSNRWLPTANKRSGKKHKENNDDSMGKYLEIGAPRNSSMEYQSSPREMSVNPTEKQHETLMPQSKTTRETDSRNTQNEPTTQTVDLISSIARSTDDKQVVRINNAPDCSSKVPDGNDKNRDSLIDMTSEELGLKRLKTTGSATEIHDERNILKRSDLSAFTRYHTTVASNQGGAGFGGSCSPQDNSSEALKTDSNCKVKSNSDAAEIKQGSNGSSNNNDMGSSTKNAITKPSSNRGKVISPSAVKATQHTSAFHPVQRQTSPANVVGKDKVDEGIANGVNVGHPVDVQNSFMQHHHHVHYYVHVMTQQQQQPSIERGSSDAQCGSSNVFDPPIEGHAANYSVNGSFSGGHNGNNGQRGPSTAPNVGRPNMETVNGIVDENGAGGGNGSGSGSGNDLYQNGVCYREAALNKFRQKRKVRNFGKKVRYQSRKRLAEQRPRIRGQFVRQSGQEDQAGQDEDR

SEQ ID NO: 41269 - protein, 472 aa, Escherichia coli O157:H7 EDL933
  misc_feature (309)..(309): Xaa can be any naturally occurring amino acid
  unsure (1)..(472): unsure at all Xaa locations
MTTHLVWFRQDLRLHDNLALAAACRNSSARLLALYIATPRQWAAHNMSPRQAELINAQLNGLQIALAEKGIPLLFREVDDFAASVEIVKQVCAENSVTHLFYNYQYEVNERARDVQVERTLRNVVCEGFDDSVILPPGAVMTGNHEMYKVFTPFKNAWLKRLREGMPECVAAPKVRSSGSIKPAPSITLNYPRQSFDTAHFPVEEKAAIAQLRQFCQNGAGEYEQQRDFPAVEGTSRLSASLATGGLSPRQCLHRLLAEQPQALDGGAGSVWLNELIWREFYRHLMTYYPSLCKHCPFIAWTDRVQWQXNPAHLQAWQEGKTGYPIVDAAMRQLNSTGWMHNRLRMITASFLVKDLLIDWREGERYFMSQLIDGDLAANNGGWQWAASTGTDAAPYFRIFNPTTQGEKFDREGEFIRQWLPELRNVPGKSVHEPWKWAEKAGVKLDYPQPIVEHKEARVQTLAAYEAARKGK

SEQ ID NO: 41270 - protein, 588 aa, Thermus sp. IM6501
MRKEAIHHRSTDNFAYAYDSETLHLRLQTKKNDVDHVELLFGDPYEWHDGAWQFQTMPMRKTGSDGLFDYWLAEVKPPYRRLRYGFVLRAGGEKLVYTEKGFYHEAPSDDTAYYFCFPFLHRVDLFQAPDWVKDTVWYQIFPERFANGNPAISPKGARPWGSEDPTPTSFFGGDLQGIIDHLDYLADLGITGIYLTPIFRAPSNHKYDTADYFEIDPHFGDKETLKTLVKRCHEKGIRVMLDAVFNHCGYEFAPFQDVLKNGAASRYKDWFHIREFPLQTEPRPNYDTFAFVPHMPKLNTAHPEVKRYLLDVATYWIREFDIDGWRLDVANEIDHQFWREFRQAVKALKPDVYILGEIWHDAMPWLRGDQFDAVMNYPLADAALRFFAKEDMSASEFADRLMHVLHSYPKQVNEAAFNLLGSHDTPRLLTVCGGDVRKVKLLFLFQLTFTGSPCIYYGDEIGMTGGNDPECRKCMVWDPEKQNKELYEHVKQLIALRKQYRALRRGDVAFLTADDEVNHLVYAKTDGNETVMIIINRSNEAAEIPMPIDARGKWLVNLLTGERFAAEAETLCVSLPPYGFVLYAVESW

SEQ ID NO: 41271 - protein, 273 aa, Bacillus cereus ATCC 10987
MSAFLGELIGTALLIVLGGGVCAGVSLKKSFAKDSGWIVITMGWGLAVAVAAYAVGSISGAHLNPALTIGLAFKGAFPWSDVPGYIAAQMIGAIIGAVIVYLHYLPHWKETEDPGTKLGVFATGPAIPNTFANLLSEMIGTFVLVFGILAIGANKFADGLNPFIVGFLIVSIGLSLGGTTGYAINPARDLGPRIAHFFLPIAGKGGSNWKYAWIPVVGPILGGSLAGLFHQVVFEGKQNAALIYVIIATVIVLAISYMTSKKSGSNTNSRKVA

SEQ ID NO: 41272 - protein, 252 aa, Kineococcus radiotolerans SRS30216
MSAPTGVGSHATGLYGSRAGENLLRSGAAELLGTFVLVLAGGAVAVGAGTTDPPVYDLLAIVLAFGLALTALVAALGHVSGCHLNPAVTLGLAVTRKFPWRAVPVYVVAQLVGAVLASLATWAVHTGRGREVANLSTTLPAPGVSDGRAFFVEALITFVLVLVVISVATDDRVPAAAAPLAVGAALAVCIFIAAPVTGGAVNPARAFGPAVVSGNLDALWLYLLAPVVGGVLAAVVYDRLLAPAQAPTPEDD

SEQ ID NO: 41273 - protein, 357 aa, Photobacterium profundum SS9
MLLTIDVNYSRIVSGYSHFLFFDMNRLQTATTDSNLMANPPTVKQNKIAIIGECMIELSGKPFASQAQNFGGDTLNTAVYLSRLLPSLRPSYVTAVGADTYSKIMLSAWESEGVDTSLTLVNPDKLPGMYAIEIDDDGERSFHYWRDDSAARYLCEHEGFNDVVSSLKSVDLVYLSGISLAILSDHGKVKLLNTLAQLKSSGVKIAVDSNYRPRLWRNATDACEWLGKLYQLSDIALVTADDEELLLGRKLSEPQVIARRLHSLGIKQVVVKLGSDGAMWSQAGNQGVVSGNKVTQVIDTTAAGDSFNAAYLAAWCSGMEMAECCYWGNKLAAQVIQHKGAIIPVEQTRYITELMSD

SEQ ID NO: 41274 - protein, 136 aa, Clostridium thermocellum ATCC 27405
MERTLVILKPDSVKRKLVGEIISRFEKRNFTILHLKMMNIDRELACEHYSHVKDKPFFNDMIDYITSGPVVVMVLSGYRVIEAVRSMVGATSNFDSKPGTIRGDYGYHRFENLIHASDSCESAEIEIKRFFPELDS

SEQ ID NO: 41275 - protein, 541 aa, Glycine max
  misc_feature (201)..(201): Xaa can be any naturally occurring amino acid
  misc_feature (209)..(209): Xaa can be any naturally occurring amino acid
  misc_feature (222)..(222): Xaa can be any naturally occurring amino acid
  misc_feature (294)..(294): Xaa can be any naturally occurring amino acid
  unsure (1)..(541): unsure at all Xaa locations
MLDGRSCVVPRLFSGTCQAENEWSYMKCLLELDIKNGKRPMGIDDVEEDEPHQPRKCTKKLDSCHRVEMARISFQRQSIEAKDSVVVPPLDQETIEPLSVCQGVVGEEGALTDRLLCEKEHEGDGDLMDFGDHQSDKQQQAQPGDLSDFGVRLFDEDQLQHDDNLLNLSEQQSEGRQQQHHHGGDSSGFQSLLARMNRDSXITCLSRLXEVKIMGLSALLNXSFRNIIRRGELYQWRRLNGIMEHWIYFSCALLEWEAYDPIRQRWMHLPRMASNECFMCSDKESLAAGTELLXVFGRELRSQCTYRYSLLTNLWTSGTRMNAPRCLFGSASLGEIAILAGGCDSEGHILDSAELYNSETQTWETLPRMKKPRKMSSGVFMDGKFYVIGGIGGSDSKLLTCGEEYNLQTRTWTEIPNMSPGRSSRGPEMPATAEAPPLVAVVNDELYAADYADMEVKKYDKERNVWFTIGRLPERAVSMNGWGLAFRACGDKLIVIGGPRTHGEGFIELNSWVPSEGPPRWDLLARKRSGNFVYNCAVMGC

SEQ ID NO: 41276 - protein, 220 aa, Salmonella typhimurium LT2
MKDIDTLISNNALWSKMLVEEDPGFFEKLAQAQKPRFLWIGCSDSRVPAERLTGLEPGELFVHRNVANLVIHTDLNCLSVVQYAVDVLEVEHIIICGHSGCGGIKAAVENPELGLINNWLLHIRDIWLKHSSLLGKMPEEQRLDALYELNVMEQVYNLGHSTIMQSAWKRGQNVTIHGWAYSINDGLLRDLDVTATNRETLENGYHKGISALSLKYIPHQ

SEQ ID NO: 41277 - protein, 651 aa, Bradyrhizobium sp. BTAi1
MPERGGWPCAIALRQGRPRCAAARAAHRDTFRSPETGVQQSGPIDHPPVAAGALADIATLPELWRWRCLRSPDTQAYRHFDSRRGEWTSLSWREIDAVVDRWRQALAADGFGPGERAAILMPNGVAHLAMDQAALSLGLVPVPMHAVDNADSIAYILADCGARLLLVDSDERWNEIAAVGQALPDLKRIICAELRASPGMAGDSRLKALDAWLDAAGDTMPRDNTVPVAPHDLAAIVYTSGTTGRPKGVMLSHDNVVSNLKAIHQRLAARQDDVFLSFLPLSHTFERTAGYYYPIAIGACVAYARSVKQLAEDLVEVRPTILISVPRIYERIFSLVMHHRALANPIERALLDLTIAIGNRRFDAQHGGAQLGTFDRLAWPLLKRVVADKVLARFGGRLQVAVSGGAPIAEPVVRLFLALGLEVLQGYGMTETSPVVSVNTPDDNDPRTVGRALPGIEVRIGDNDELMVRGPNVMLGYWHRPEETARIKQPDGWLHSGDQARIDHGRITITGRIKDILVTSTGEKIAPADLETAILTDPLFEQAIVIGENRPFLTAIVVLNPKGWAEQQARLAAHSQRGTEAEAASLLRHIARAVKAYPSYATPKAVHWTLEPWTVQAGLITPTLKNKRPAIERAFAKEIEAIYARRPVAAA

SEQ ID NO: 41278 - protein, 551 aa, Pirellula sp. 1
MTKHIFVTGGVVSSLGKGLTSASIGMVLERRGLRVRMQKLDPYINVDPGTMSPYQHGEVYVLDDGSETDLDLGHYERFTSGKLNRDCNYTTGQIYLSVIEKERRGQFLGKTVQVIPHVTNEIKRVIKRMGGDDVDVVITEIGGTVGDIESLPFLEAIRQFSLDAGRENCLYMHLTLVPYLKAADELKTKPTQHSVGQLREIGIQPDVLVCRCEQSISRDDRDKIALFCNVEPEAVIEEKDKDFSIYEVPLSLVDNKLDELIVKKLGLTSAGSLDMTPWNDLLHRLRNPRHEISIAVVGKYAEHKDAYKSIYESLDHAGMHHDAQIRIGRIQSSDIEREGAERLLSGFHGILVPGGFGERGVEGKVQAIQFARERNVPFFGICLGMQTAVIEYGRNVLGLEKAHSTEFDKDTPHPVICLLDEQQNVIDLGGTMRLGSQPSRLVADSKAIQAYGREEIDERHRHRYEFNNEYRKAFEDAGMRFTGLSPDGGLVEIVEIDSHPWFVAAQFHPEFKSKPLKSHPLFTDFIEAAINRRKQRVTEEIASETEKPTAS

SEQ ID NO: 41279 - protein, 281 aa, Medicago sativa
IRHEKRSNAVLHKIITSAIPDTVGGKLIGLVTSREAIPDLLKLDDVIDLVVPRGSNKLVSQIKDSTKIPVLGHADGICHIYIDKAANINVAKKIVKDAKTDYPAACNAMETLLVHKDLAGKWWDLNETCCWNSKEGVQLYGGPKASVLLKISEAKSFHLEYSSLACTIEIVDDVYAAIDHIHDHGSSHTDCIVTEDSKVAETFLRQVDSAAVFHNASTRFCDGARFGLGAEVGISTSRIHARGPVGVEGLLTNRWVLRGNGQVVDGDRSMIYTHKELPIKA

SEQ ID NO: 41280 - protein, 304 aa, Brucella melitensis 16M
MCWHKFARYWDVEIREIPMEPGRLFMGPEQMLEAVDENTIGVVPTFGVTYTGNYEFPEPLQDALDKLQKTKGLDIDIHVDAASGGFLAPFCAPDIPWDFRLPRVKSISASGHKYGLAPLGCGWVVWRDKEALPEELIFNVDYLGGQVGTFAINFSRPAGQVISQYYEFMRLGREGYTKVQQAAYRVAQYIAREIEPLGPYEFICAGEEKGGIPAVCFRIREGEDPGYSLYDLSERLRLTGWQVPAFALSGKASDITVMRVMCRRGFEMDLAALFIRDFKAGIEFFKSHPSPKITPSMGTGFHHT

SEQ ID NO: 41281 - protein, 429 aa, Crocosphaera watsonii WH 8501
MKKVLAIILGGGAGTRLYPLTKLRAKPAVPLAGKYRLIDIPISNCINAEILKIYVLTQFNSASLNRHLTRTYNFTGFSDGFVEVLAAQQTAENPSWFQGTADAVRQYLWLFDEWDVDQYLILSGDHLYRMDYSDFVRRHQETGADITLSVVPIDERRASSFGLMKIDDSGRVVDFSEKPKGDALKQMQVDTSILGLNPEQAKESPYIASMGIYVFNKKALTDLLRNNPEQTDFGKEIIPGSAKDYNLQAYLFKGYWEDIGTIEAFYEANLALNRQPLPRFSFYNEKAPIYTRARNLPPTKVLNCNITESMISEGCMIKDCRINNSVLGIRSRIESDCVVEDSLLMGADFYESLDTRQSLLDQGKIPVGIGKGSTIRRAIVDKNARIGTNVNIVNKENIEESNREDDGFYIRNGIVVVIKNAVIPDGTVI

SEQ ID NO: 41282 - protein, 268 aa, Fusobacterium nucleatum subsp. vincentii ATCC 49256
MLNSNLKKETEDEKNLLESIQLTDINGNDYTFSRDKNIYIKFWASWCPTCLAGLEELDRLAGETNNFEVITVVFPGINGEKNPTKFKEWYDTLGYKNIKVLYDTDGKLLQIFKIRALPTSAIIYKDLKIDNVIVGHISNGQIKDYFEGKGENITMENNTKNIKDIYLAGGCFWGVEEYFARIDGVIDTVSGYANGSFDNPSYENVCNNSGHAETVHITYDSTKVPLDTLLKYYFRIIDPTSVNKQVMIEEFNTELVYIIKMRKINKLL

SEQ ID NO: 41283 - protein, 167 aa, Brucella melitensis 16M
MKITLEVIMTGSNYPARDLIASVFGTEALQEIAASRGFREKEMQANAVYQIIHDELFLDGNARQNLATFCQTWDDDYVHKLMDLSINKNWIDKEEYPQSAAIDLRCVNMVADLWNAPKFADNATGTNTIGSSEACMLGGMAMKWRWRKKMQEMGKPTDKPNFVCGPV

SEQ ID NO: 41284 - protein, 187 aa, Fusobacterium nucleatum subsp. vincentii ATCC 49256
MEKLKRFDKAEEYHQDYLKKNPNGYCHINLNKANEAIIDEKKYQKPSDEVLKEKLSDLEYQVTQEAATERAFTHEYYKNQEDGIYVDITTGEPLFSSKDKYDAGCGWPSFTKPIATEVVNYKKDSSHGMNRVEVRSRAGEAHLGHVFEDGPRDKGGLRYCINGASLRFIPYDKMDEEGYGEFKKYVK

SEQ ID NO: 41285 - protein, 339 aa, Glycine max
MDERYETLKELGSGNFGVARLAKDKETGELVAIKYIERGKKIDANVQREIVNHRSLRHPNIIRFKEVFLTPTHLAIVLEYAAGGELFERICNAGRLSEDEARFFFQQLISGVSYCHSMQICHRDLKLENTLLDGNPAPRLKICDFGFSKSALLHSQPKSTVGTPAYIAPEVLSRKEYDGKVADVWSCGVTLYVMLVGAYPFEDPEDPKNFRKSIGRIMSVQYAIPDYVRVSKECRHLISRIFVANPAKRINISEIKQHLWFRKNLPREIIEAERRGYEETQKDQPSQSVEEIMQIIQEARTKIHTGEQAGTGTSDVVRGDEANEEVDINDHFAKYLTLD

SEQ ID NO: 41286 - protein, 345 aa, Marinomonas mediterranea
MRGFFVTATNSAVEMLIANSNTFFILLGAIMVFAMHAGFAFLEVGTVRSKNQVNALVKIMTDFAISALVYFFIGYQIAYGINFFESAATLAEQSGYALVKFFFLMTFAAAIPAIISGGVAERARFYPMLISAAVIVGVAYPFLEGLIWNGNYGFQDWLETQFGAPFHDFAGSIVVHGFGGWVALAAIILLGTRNGRFRGDKLVAFAPSNIPFLALGAWILCIGWFGFNVMSAQTLDGISGLVAVNSLMAMVGGIIAAMILGKNDPGFIHNGPLAGLVAVCAGSDIMHPIGALATGLVAGALFTWLFTLIQQKFQHIDDVLGVWPLHGICGAWGGIAAGIFGLESL

SEQ ID NO: 41287 - protein, 103 aa, Triticum aestivum
  misc_feature (52)..(52): Xaa can be any naturally occurring amino acid
  misc_feature (68)..(68): Xaa can be any naturally occurring amino acid
  unsure (1)..(103): unsure at all Xaa locations
VHKRAVFDVHPAALARLFLIDWYRERINGKQEDMIGYSDSRLDSARLSPTWXMYNGSEDLVKVALSIXVKLTMIHGRGGTVGRGGGPTHAAISPQPHDTSNGS

SEQ ID NO: 41288 - protein, 384 aa, Haloarcula marismortui ATCC 43049
MTTRFGAPGTGLSRREFLAATGATGIASLAGCSAGGANEPAATSDTATQTQTDSPNLPYTSPPTVVNVDEQGGGVTMRTQQARHAVHPLDTMGGPVEFPRVWAFQADDNDPSVPGPILRTTEGNAMEVTLDNTDGRRPHTIHFHGIRKTWENDGVPTTTGIQVPPGETHTYEIPANVPGTHFYHCHFQTHRHIDMGMYGIYRVDPEGYEPADREYFMTIKDWDSRVPRKWAGEADFTYNSASRNPDVFTVNGKSAPRTLHPEEGSPIIVDEGDSVRIHLVNGGYMSHPMHIHNHRFQRVEKDGGTIPEAARHDMDVTNVAPAERHTIEFTADADPGIYLMHCHKVNHVMNGTFYPGGMLTGVVYRSVMDTDIFNQLMEYAGYST

SEQ ID NO: 41289 - protein, 517 aa, Glycine max
MADHTPGSGTVSVEASSQERRKLPNFLLSVRLKYVKLGYHYLISNAMYLLLIPLLGVASAHLSTISYQDVVQLWENLKFNLVSVTLCSSLIVFLVTFYFMSRPRGVYLVDFACYKPEPECTCTREIFMNRSVETGVFSEENLAFQKKILERSGLGQKTYLPPAILSIPPNPCMAEARKEAEQVMFGAIDQLLEKTGVKAKDIGILVVNCSLFNPTPSLSAMIVNHYKLRGNIQSYNLGGMGCSAGLISIDLAKQLLQVHPNSYALVVSMENITLNWYFGNNRSMLVSNCLFRMGGAAVLLSNKSSDRRRAKYQLIHTVRTHKGADDRSYGCVFQEEDEKKTIGVALSKDLMAVAGEALKTNITTLGPLVLPMSEQLLFFATLVARKVFKMKIKPYIPDFKLAFEHFCIHAGGRAVLDELEKNLELSDWHMEPSRMTLNRFGNTSSSSLWYELAYTEAKGRIRKGDRTWQIAFGSGFKCNSAVWRALRTINPAKEKNPWMDEIHEFPVHVPKVATISS

SEQ ID NO: 41290 - protein, 396 aa, Oryza sativa
  misc_feature (67)..(67): Xaa can be any naturally occurring amino acid
  unsure (1)..(396): unsure at all Xaa locations
MAMPFASLSPAADHRPSFIFPFCRSSTLSEIRLRSRLRSLFEAQQHMMGARWAAAVARPTTFTAAQXYEELEQQALIYKYLVAGVPVPADLLLPIRRGLDSLASRFYHHPVLGYGSYFGKKLDPEPGRCRRTDGKKWRCSKEAAPDSKYCERHMHRGRNRSRKPVEAQLVAPHSQPPATAPAAAVTSTAFQNHSLYPAIANGGGANGGGGGGGGGGSAPGSFALGSNTQLHMDNAASYSTVAAGAGNKDFRYSAYGVRPLADEHSPLITGAMDTSIDNSWCLLPSQTSTFSVSSYPMLGNLSELDQNTICSLPKVEREPLSFFGSDYVTVDSGKQENQTLRPFFDEWPKARDSWPDLADDNSLATFSATQLSISIPMATSDFSTTSSRSHNGIYSR

SEQ ID NO: 41291 - protein, 450 aa, Bifidobacterium longum DJO10A
MSIRKELTAQNVLLGFQHVLVSNVWLDPVFVAGAIGLPIALSSNMINAIFIVSGLVTLVQATRLVRLPVVQGPSAAFDALMIAAGTAGMLGAASSSILIASLVFLLLCLTGVIERMRFLFSPMISGVVIFMVGVSLSGFTLSEFLGGAPGDKTFADPHILTVSILTTAIVLVLSLLGKGLLKSFSFLIALVVGTVVAAAFGMVDFSPVASKGWLGLPTFLPYGPFTFDWKIFIPFFIAYMVAVMEALGVYQAASEIQGTPLERKQVRYGLAGEAAGSAISSLIGGFTTTAYPQNVGLLNLTGEGKLRTRTPVIIAAVLLLILGFVPKAGALLSVIPSAVVGGIFLPAAASLIVTGLRALRKVADDERRQTVIGMSLLLGIALPKALSGLTGGASVFFGNNIMVGVFSAIILNALFVALPDLVAKHRAPASVDVPAADPADGTGAAAYDER

SEQ ID NO: 41292 - protein, 1423 aa, Ashbya gossypii ATCC 10895
MAFLKRLNVSSHSRSSSGSSGRTPQNTSGGSKATAVKPLPQIPVEMGGIESEVIKNGEGGQSVVILCDDVGSGSYTSVLLSPSDPHMFSADGQRLSVEEQAEKTLYSWDVTDPEQWTMQRVMSWFKAHDFDEQWILFFKRNHISGKKFLQLLAHDNFNKYESFLSATKNSSYNRFQHLLKRTLEENVSNSHRRQRSNKSNDSKGSADCSLRYRRRRSVASEQRTLTAAEGVTPRKTVEVADDRAGSSKNHRKAKSASVLYRRSFISLRSSSSSNIKNDVDDDCKTLPAMKISIPPRPFSSIERSTSSSPASTLKSQSSPLSPGNHNMFRKDHKSSSSDSSLFNNLFGSADEITKAVGGTAPQGEQIAVKKYNDTLPSPMRVSPRHIDDKSTIWDKLKKRALPSTEQYTPSRIKQLTSGRNSSYIQTLQESPDECSANNEDPPATATLEAPIIDDLVLEEKHYPSQKQDSSAQYVLVTKDNRIFLPLNIAPYKTTQELKDGMTAFLGISSKAYTIHLTDLGCDPGVSLSDDVIAAIGQRKLNTRHLKFYVKDATRMHLRLKNDSFTSDHNITTEMSRSKGSLRSAASSFISSNDDTNSFSDITSIDEHGNITGRRVYPQTPSHYYDQSAATHSPEVDYWNIKERLSEGTSPMNISLLRSTTKAASLPSSIDEIKKSSFKVIRKASVTDIDFNKGRESPYIRPKLAPKREAPRPPRTSSQVSLASSSSIQSSLVEQKSISNSPTKPQRQHAGTYVKNKTRPPPPPSIGSTMTVDTKVMTSVSDSPVSNEPPNRPYGPFSTQKLVPQGFKGVGVHPGTRKVEEQMHTNPVTQYIQKQRSRNSISKMGNNPSLYSPPRLKKRISTRRMVSSTSAADIFDENEISFADAPDLSDYDSENSESSDDIIWSTTNTTSLDASKISVSDSTTGDDSNFSVASSVELQSSIKNDAKTSEDSIVDSIKEEGDSVCNLVGRKMTLRPTTEVVYQNLEMFFPGTDLDKPILEGLTPPASPDSEANKMPDQDLTPLSKVSTISSESSMRQSTPRLLITKKSDSPQPMPVRNLKPPKRTKTIRSIAREASEARKKSLYNNLKRQNTKMWGTRVVEVTDKRMVSINKSKNSKGEYREFAWIKGEMIGKGSFGAVYLGLNVTTGEMMAVKQVEVPKFGSQDETTVNNAEALISEVSTLKDLDHLNIVQYLGFENKNCIYSLFLEYVAGGSVGSLIRLYGHFDEQLIRFLTTQVLEGLAYLHLRGILHRDMKADNLLLDNDGVCKISDFGISRKSNNIYSNSEMTMRGTVFWMAPEMVDTTQGYSAKVDIWSLGCVVLEMFAGKRPWSNLEVVAAMFQIGKSKSAPPIPEDTLPHISQDGRAFLDDCFMIDPEERPTADTLLSHPFCQVPKEFNFRDTDLYNFIKQNDKLNNSKLTRNSQR

SEQ ID NO: 41293 - protein, 510 aa, Pseudomonas syringae pv. syringae B728a
MPLLNWSRHMVCLTAAGLITVPTVYAADTLTRDNGAVVGDNQNSQTAGAQGPVLLQDVQLLQKLQRFDRERIPERVVHARGTGVKGEFTASADISDLSKATVFKSGEKTPVFVRFSSVVHGNHSPETLRDPHGFATKFYTADGNWDLVGNNFPTFFIRDAIKFPDMVHAFKPDPRTNLDNDSRRFDFFSHVPEATRTLTLLYSNEGTPAGYRFMDGNGVHAYKLVNAKGEVHYVKFHWKSLQGLKNLDPKEVAQVQSKDYSHLTNDLVGAIKKGDFPKWDLYVQVLKPEELAKFDFDPLDATKIWPDVPEKKIGQMVLNKNVDNFFQETEQVAMAPANLVPGIEPSEDRLLQGRVFSYADTQMYRLGANGLSLPVNQPKVAVNNGNQDGALNTGHTTSGVNYEPSRLEPRPADDKARYSQLPLSGTTQQAKITREQNFKQAGDLYRSYSAKEKTDLVQSFGESLADTDTESKNIMLSYLYKADPDYGTRVAEVAKGDLSKVKSLAASLKD

SEQ ID NO: 41294 - protein, 268 aa, Gracilaria tenuistipitata var. liui
MNAITNFLRKKNSSCALIPFITAGYPNIDICIKALKVLDREGADLIELGIPYSDALADGPIIQEASQAALKQGIYIEQVLSILTKVIPDLHAPIIIFTYYNPVLVRGVDKFICEISQAGAKGLIIPDLPLEEVDYILELCNLYSIELILFVAPTSSQSRIQLIASKSPGCIYLVSSCGVTGLRDNFDVKIQHLANNIKSTTNKLIMLGFGINNPDQISQIINWNIDGIVVGSAIITHIVGELPQDMLNSLAHFCKKLKYSIHTASNVK

SEQ ID NO: 41295 - protein, 384 aa, Prochlorococcus marinus str. NATL2A
MQDKLNLMIPGPTPVPENVLSSMSKHPIGHRSGDFQKIVQKTTEQLKWLHQTTADVLTITGSGTAAMEAGIINTLSKGDQVICGDNGKFGERWVKVARAYGLDVKVVKADWGTPLDPNQFKRILEEDTNEKIKAVILTHSETSTGVINDLKSINNEVKNHSKAITIADCVTSLGACNIPMDEWGIDVIASGSQKGYMIPPGLSFVAMSKRAWEANNQSNLPKFYLDLKQYLKTVNQNSNPFTPAINLYFALEASLTMMQKEGLNNIFARHARHQKATQEGIKAMGLNLFTKENFGSPAITAVKPENIDAESIRKAIKNDFDILLAGGQDHLKGKIFRIGHLGFVNNRDIISVISALESTLDKMGKLNVPTGQGIAKTISVLNNE

SEQ ID NO: 41296 - protein, 373 aa, Cryptococcus neoformans var. neoformans JEC21
MARARGVIRFFGGLRPWLPRQVRPSADVTALQQSSIPLDNYYYISFISSTFLPTDLSRPRKHNKMPHTSAPPVLYSFDDTKHLQSSLANFILKAQADAVAHRGVFTIALSGGSLPNQLRPLADIEGIHWDKWQVFFSDERIVPLDHPDSNYAACAKAFLDHVPIKKEQIHTINTSLFREQTRSDPTAEIKPGEEDAAENEAVDIADDYEKQLVQTFGGGNAARYPTFDLILLGMGPDGHTCSLFPGHELLSENDRWVAEIQDSPKPPKRRITFTYPVLNHAFRCAFVASGEGKQDMLSQILDNPEEGLPCSRVRPNSPGLVFWFVDASASAKIQYPKTEYKWIQAAGEDDPVAVERKKMKSEMDAAVKEGERQ

SEQ ID NO: 41297 - protein, 353 aa, Zymomonas mobilis
MAKATQDSNRPHKADVGSAIPNHDLPPIPGRYHADREELLEFYRRMLMIRRFEERCGQLYGLGLIAGFNHLYIGQEAVAVGLQAALQPGRDSVITGYREHGHMLAYGIDPKIVMAELTGRASGISHGKGGSMHMFSTEHKFFGGNGIVGAQVPLGAGLAFAHKYRNDGGCSAAYFGDGSANQGQVYEAYNMAALWKLPVIFVIENNGYAMGTSIQRANAHTALSERGAGFGIPALVVDGMDVLEVRGAATVAVDWVQAGKGPIILEMKTYRYRGHSMSDPARYRSREEVNDMKENHDPLDNLKKDLFAGVPEAELVKLDEDIRQQVKEAADFAEKAPLPADEELYTNILVGKY

SEQ ID NO: 41298 - protein, 483 aa, Pediococcus pentosaceus ATCC 25745
MAEQGGSQVKRALKTRHISMISLGGSIGTGLFVASGSAISTAGPGGALLAYVGMGVMVYFLMTSLGEMATYMPVSGSFSTYATKYVDPAFGFAMGWNYWFNWAITVAVDISTIALIMKFWFPHAPGWIWSLLALVLVFLVNALTVKAFGETEYWIALIKLVTVIIFLVVGVLTIVGIMGGKATYLENFVYHKAPFVGGIPAILSVFVVAGFSFQGTELIGITAGESETPETSVPKAISQVFWRILLFYILAIFVIACIIPYTSPNLLGSSARDVSISPFTLVFRRAGLAGAAGVMNAVILTSVLSSANSGMYASTRMLYSLSKQGFAAKIFGKTSKRGIPYLALLGTTIVGLLTFISSIMGPKIYIWLVAASGLTGFVAWVGIAIAHWRFRRAFIKQGHDVSELRYRAKWFPFGPLFAFVLSIIVIAGQDIHSIANFDWQAIGITYMAIPLFIVLYTYYKIRYKTKLIPLEEIDLSRPDITKE

SEQ ID NO: 41299 - protein, 932 aa, Arabidopsis thaliana
MTTKRAYKLQEFVAHSAAVNCLKIGRKSSRVLVTGGEDHKVNLWAIGKPNAILVSSRVLVCCQSLYGHSSGIDSVTFDASEVLVAAGAASGTIKLWDLEEAKIVRTLTGHRSNCISVDFHPFGEFFASGSLDTNLKIWDIRKKGCIHTYKGHTRGVNVLRFTPDGRWVVSGGEDNIVKVWDLTAGKLLTEFKSHEGQIQSLDFHPHEFLLATGSADRTVKFWDLETFELIGSGGPETAGVRCLSFNPDGKTVLCGLQESLKIFSWEPIRCHDGVDVGWSRLSDMNVHEGKLLGCSYNQSCVGVWVVDLSVFLSPYISFSFCLIVAGSNLYEPTHFQMHGQRTEPCMAGDTAQSNGHPEKRSCSGRDPVVLNDNNSKTVLGKLSVSQNVDPLLKETKSLGRLSVSQNSDPSTKETKSIGRSSTSQNSESSMKESKPLGRLSVSQNSDVSKESRTFSSTGSLPGTPHRVSSTNVSKATSGVSTAVSNAATSRRNFTKANPKANPVNKAADFAPVIVPRADPRIEQATESRAELDIIARTMPYSLQAADSRRSPSSRNNPDLPDASVLEMSESQPVEPNNIPDGGTLPGGKVGMRGATERSINDFRYKRYGRSNSRSRMGSPPRNHDENYDLVSHRSNRDPSPTESQKGGDSSAQLSSFLLQMKRISFMCLIISGRFQSLVINRERRGRFSNFEGPVSNFSSGNMPAPNIRPSNMFKQRGNHMPVEQGIDSPSEENIVEDIMGKHNQFVSSMQSRLAKLQVVRRYWERNDVKNSIGSIEKMADNAVTADVLGIITERNEILTLDNCTSLLPLLTALLGSGMDQHLSVSLDLLLKLVRLYGSPIYSSLSAPASVGVDIEAEQRIERYSRCFVELEKVKACLPSLASISGSFIIITMSLTTLDKNAEQKPVFLVEEPASSQVPNHLLFDVDLVPKGV

SEQ ID NO: 41300 - protein, 343 aa, Arabidopsis thaliana
MGRAPCCEKVGIKKGRWTAEEDRTLSDYIQSNGEGSWRSLPKNAGLKRCGKSCRLRWINYLRSDIKRGNITPEEEDVIVKLHSTLGTRWSTIASNLPGRTDNEIKNYWNSHLSRKLHGYFRKPTVANTVENAPPPPKRRPGRTSRSAMKPKFILNPKNHKTPNSFKANKSDIVLPTTTIENGEGDKEDALMVLSSSSLSGAEEPGLGPCGYGDDGDCNPSINGDDGALCLNDDIFDSCFLLDDSHAVHVSSCESNNVKNFEPYGGMSVGHKNIETMADDFVDWDFVWREGQTLWDEKEDLDSVLSRLLDGEEMESEIRQRDSNDFGEPLDIDEENKMAAWLLS

SEQ ID NO: 41301 - protein, 561 aa, Xanthomonas oryzae pv. oryzae KACC10331
MLIDPPKGVSAGNRAMRDRTQHAEQASDEADATPGPTGCQRNRAKGCAALSPAVKLRAGTLVQLDLRSQTPHSSSTAQPGIRSMRPLPTLLTLSLAAAFGGFAATGINAWLDNRAQATPPSNAAFTLPTTAALPAAVAGQPVPSLAPMLQQAMPAVVSVNTKQVVRVRNPFFNDPILRRLFPEVPQDRINESLGSGVIIDAQKGYVLTNHHVIENADDVQVTLGDGRTVKADFIGSDADTDIALIRIKADNLTDIKLADSNALRVGDFVVAIGNPFGFTQTVTSGIVSAVGRSGIRGLGYQNFIQTDASINPGNSGGALVNLQGQLVGINTASFNPQGSMAGNIGLGLAIPSNLARNVVEQLVTKGVVVRGTLGLETQNLTQQMLQGLGVDSLRGALVTRVLPGSAAAAAGVQPGDVVVAANDQRVDSAEALHNYEGLQAVGSAVTLDIRRDGKPLKLKATLKEQDRAVTGDMLDPRLTGATFVDLPESLRQSGITGVMVSEVKRGGRAAANGLVTGDVIVASSVGEFADLASWRANFQRKPQQLVVRILRGNAQYDALMR

SEQ ID NO: 41302 - protein, 189 aa, Brassica napus
  misc_feature (28)..(28): Xaa can be any naturally occurring amino acid
  misc_feature (87)..(87): Xaa can be any naturally occurring amino acid
  misc_feature (114)..(114): Xaa can be any naturally occurring amino acid
  misc_feature (142)..(142): Xaa can be any naturally occurring amino acid
  unsure (1)..(189): unsure at all Xaa locations
MAPTGEKPLIVSFGEMLIDFVPTESGVXSLAEAPGFPQSPRSGAPANVAIAVSRPSAGPIRRYVGKLGDDDVRPHARPGSMRKNGVXPDQGINLRYPAARTSLGRFVYVEGRRXSGSLCFYRNPSADMLLRPDELDLELIRXRAKVFHYGSISLIVEPCRSALLASPALFVPARALLPPPPPSPLRAPF

SEQ ID NO: 41303 - protein, 692 aa, Trichodesmium erythraeum IMS101
MNYRINSQNQNPEDADKNIVSQNETIVGTSKCPPILKERYQVIKPLGESVWNHTFLAIDHDKPSKPPCIIKEFVNLDDIKDLVFQSQEVIPTFFSCDPVQLDKIGKHPHIPELLASIEHDGHHYLVQEYIEGSNLATELIEYGVFSESKIWQILNQLLLVLELIHDHHLIHGDIKPENIICRRKQGTNTQEFVLVDFGVTISATGDLFSIGSINGSAEYAAPEQTQGKVYPNSDIYSLGVTCLHLLTMVSPFELFDIKAEKWVWQDYLKHPISRHLGRILDKMIQRDHRQRYQSAAEVIKDIKYGPTPADVILQKQNWNVTIWGGVAIAMLSLVISSRVPSAKPRPSLSPSSNTTTIPNEERSFPRPKIKEEYKNTLPSLQPYTGVGDKLSPLRTLATTSGPVWSITTSPDGRIVASGSTNGSIQLLHLRSGQNLGQLSGHDGPIWSVAISPDGRTLVSASGDSTLKIWNLYTRRLKNTLSGHLQDVLSVAISPDGNTIASVSKDKTIKLWDINSGLLLYTLYGHLDVVQSVAFSSDGKTLASGSNDGTVKLWNWRDGRLLSTLKGHRKPVWSVAISPDGKTLASGSWDKTIKLWEINNNSFQRVIRRSQRTLIGHSEKVQSLQFSPDGETLASGDFDGTIKLWQIKTGGLMGTLKGHSAWVNLTFDPRGKTLISGSFDDTIKVWRFSPLRF

SEQ ID NO: 41304 - protein, 204 aa, Zea mays
EVSRRDGAVSWSVHRPTTVFGYSPRSAMNLVGSLCVYAAICRKEGATLRWPGSRVTWEGFSDASDADLIAEHEIWAAVDPFAKNEAFNCSNGDLFKWKQLWPILADHFGLEWAGYEGEENRFKLEEAMSGKEAVWAEIVRENDLIATELDEITNWWFVDAMFAVETQLLDSMNKSKEHGFLGFRNTVSSFNTWIEKLKVFKIVP

SEQ ID NO: 41305 - protein, 427 aa, Escherichia coli O157:H7 EDL933
  misc_feature (27)..(27): Xaa can be any naturally occurring amino acid
  unsure (1)..(427): unsure at all Xaa locations
MADTKAKLTLNGDTAVELDVLKGTLGXDVIDIRTLGSKGVFTFDPGFTSTASCESKITFIDGDEGILLHRGFPIDQLATDSNYLEVCYILLNGEKPTQEQYDEFKTTVTRHTMIHEQITRLFHAFRRDSHPMAVMCGITGALAAFYHDSLDVNNPRHREIAAFRLLSKMPTMAAMCYKYSIGQPFVYPRNDLSYAGNFLNMMFSTPCEPYEVNPILERAMDRILILHADHEQNASTSTVRTAGSSGANPFACIAAGIASLWGPAHGGANEAALKMLEEISSVKHIPEFVRRAKDKNDSFRLMGFGHRVYKNYDPRATVMRETCHEVLKELGTKDDLLEVAMELENIALNDPYFIEKKLYPNVDFYSGIILKAMGIPSSMFTVIFAMARTVGWIAHWSEMHSDGMKIARPRQLYTGYEKRDFKSDVKH

SEQ ID NO: 41306 - protein, 588 aa, Escherichia coli O157:H7 EDL933
  misc_feature (255)..(255): Xaa can be any naturally occurring amino acid
  unsure (1)..(588): unsure at all Xaa locations
MKLPVREFDAVVIGAGGAGMRAALQISQSGQTCALLSKVFPTRSHTVSAQGGITVALGNTHEDNWEWHMYDTVKGSDYIGDQDAIEYMCKTGPEAILELEHMGLPFSRLDDGRIYQRPFGGQSKNFGGEQAARTAAAADRTGHALLHTLYQQNLKNHTTIFSEWYALDLVKNQDGAVVGCTALCIETGEVVYFKARATVLATGGAGRIYQSTTNAHINTGDGVGMAIRAGVPVQDMEMWQFHPTGIAGAGVLVTXGCRGEGGYLLNKHGERFMERYAPNAKDLAGRDVVARSIMIEIREGRGCDGPWGPHAKLKLDHLGKEVLESRLPGILELSRTFAHVDPVKEPIPVIPTCHYMMGGIPTKVTGQALTVNEKGEDVVVPGLFAVGEIACVSVHGANRLGGNSLLDLVVFGRAAGLHLQESIAEQGALRDASESDVEASLDRLNRWNNNRNGEDPVAIRKALQECMQHNFSVFREGDAMAKGLEQLKVIRERLKNARLDDTSSEFNTQRVECLELDNLMETAYATAVSANFRTESRGAHSRFDFPDRDDENWLCHSLYLPESESMTRRSVNMEPKLRPAFPPKIRTY

SEQ ID NO: 41307 - protein, 883 aa, Escherichia coli O157:H7
MNEQYSALRSNVSMLGKVLGETIKDALGEHILERVETIRKLSKSSRAGNDANRQELLTTLQNLSNDELLPVARAFSQFLNLANTAEQYHSISPKGEAASNPEVIARTLRKLKNQPELSEDTIKKAVESLSLELVLTAHPTEITRRTLIHKMVEVNACLKQLDNKDIADYEHNQLMRRLRQLIAQSWHTDEIRKLRPSPVDEAKWGFAVVENSLWQGVPNYLRELNEQLEENLGYKLPVEFVPVRFTSWMGGDRDGNPNVTADITRHVLLLSRWKATDLFLKDIQVLVSELSMVEATPELLALVGEEGAAEPYRYLMKNLRSRLMATQAWLEARLKGEELPKPEGLLTQNEELWEPLYACYQSLQACGMGIIANGDLLDTLRRVKCFGVPLVRIDIRQESTRHTEALGELTRYLGIGDYESWSEADKQAFLIRELNSKRPLLPRNWQPSAETREVLDTCQVIAEAPQGSIAAYVISMAKTPSDVLAVHLLLKEAGIGFAMPVAPLFETLDDLNNANDVMTQLLNIDWYRGLIQGKQMVMIGYSDSAKDAGVMAASWAQYQAQDALIKTCEKAGIELTLFHGRGGSIGRGGAPAHAALLSQPPGSLKGGLRVTEQGEMIRFKYGLPEITVSSLSLYTGAILEANLLPPPEPKESWRRIMDELSVISCDLYRGYVRENKDFVPYFRSATPEQELGKLPLGSRPAKRRPTGGVESLRAIPWIFAWTQNRLMLPAWLGAGTALQKVVEDGKQSELEAMCRDWPFFSTRLGMLEMVFAKADLWLAEYYDQRLVDKTLWPLGKELRNLQEEDIKVVLAIANDSHLMADLPWIAESIQLRNIYTDPLNVLQAELLHRSRQAEKEGQEPDPRVEQALMVTIAGIAAGMRNTG

SEQ ID NO: 41308 - protein, 257 aa, Triticum aestivum
MTLGLFRVTLQKQVCTKKQVATGPEFPGYRRPTRPESLDPKAATDIICSRTPSQLQIMKQTYYAKFGTYLEHDISQQASRPRRPGDHQKILLAYVGIPRYEGPEVDPTIVTHDAKDLYKAGEKKLGTDEKTFIRIFTERSWAHMAAVASAYHHMYDRSLQKVVKNETSGNFEVALLTILRCAENPAKYFAKVLRKSMKGLGTDDKTLVRVVVTRTEIDMQYIKAEYYKKYKKPLADAIHSETSGGYRTFLLSLVGSH

SEQ ID NO: 41309 - protein, 100 aa, Brassica napus
  misc_feature (17)..(17): Xaa can be any naturally occurring amino acid
  unsure (1)..(100): unsure at all Xaa locations
MAGGGAPAPKADEPQPXPPKDQLPNIVLLQSPAPAPWPEAMLLGVQHYLVMLGTAVLIPTALVPQMGRACEEKAKVGHTFLFVARFNTLLQTSFWTRPPG

SEQ ID NO: 41310 - protein, 327 aa, Cercophora newfieldiana
RPDNFVFGQSGAGNNWAKGHYTEGAELVDQVLDVVRREAEGCDCLQGFQITHSLGGGTGAGMGTLLISKIREEFPDRMMATFSVVPSPKVSDTVVEPYNATLSVHQLVENSDETFCIDNEALYDICMRTLKLSNPSYGDLNHLVSAVMSGVTVSLRFPGQLNSDLRKLAVNMVPFPRLHFFMVGFAPLTSRGAYTFRAVSVPELTQQMFDPKNMMAASDFRNGRYLTCSAIFRGKVSMKEVEDQMRNVQNKNSSYFVEWIPNNVQTALCSIPPRGLKMSSTFVGNSTAIQELFKRIGEQFTAMFRRKAFLHWYTGEGMDEMEFTEAE

SEQ ID NO: 41311 - protein, 614 aa, Arabidopsis thaliana
MAHSGNGESFHDPLRGFIQRNCFRWNNQKLILQCFMALAFVGITSSTTQPDIEGGALLQLRDSLNDSSNRLKWTRDFVSPCYSWSYVTCRGQSVVALNLASSGFTGTLSPAITKLKFLVTLELQNNSLSGALPDSLGNMVNLQTLNLSVNSFSGSIPASWSQLSNLKHLDLSSNNLTGSIPTQFFSIPTFDFSGTQLICGKSLNQPCSSSSRLPVTSSKKKLRDITLTASCVASIILFLGAMVMYHHHRVRRTKYDIFFDVAGEDDRKISFGQLKRFSLREIQLATDSFNESNLIGQGGFGKVYRGLLPDKTKVAVKRLADYFSPGGEAAFQREIQLISVAVHKNLLRLIGFCTTSSERILVYPYMENLSVAYRLRDLKAGEEGLDWPTRKRVAFGSAHGLEYLHEHCNPKIIHRDLKAANILLDNNFEPVLGDFGLAKLVDTSLTHVTTQVRGTMGHIAPEYLCTGKSSEKTDVFGYGITLLELVTGQRAIDFSRLEEEENILLLDHIKKLLREQRLRDIVDSNLTTYDSKEVETIVQVALLCTQGSPEDRPAMSEVVKMLQGTGGLAEKWTEWEQLEEVRNKEALLLPTLPATWDEEETTVDQESIRLSTAR

SEQ ID NO: 41312 - protein, 446 aa, Pleurotus sajor-caju
MREIVHLQTGQCGNQIGAKFWEVVSDEHGIEPDGLYKGNNDLQLERISVYYNEVGANKYVPRAVLVDLEPGTMDSVRSGPLASLFRPDNFVFGQSGAGNNWAKGHYTEGAELVDAVLDVVRKEAEGTDCLQGFQITHSLGGGTGAGMGTLLISKIREEYPDRMMCTYSVVPSPKVSDTVVEPYNATLSVHQLVENSDETFCIDNEALYDICFRTLKLTTPTYGDLNHLISIVMSGITTCLRFPGQLNSDLRKLAVNMVPFPRLHFFMPGLCPLTARGSQQYRAVTVPELTQQMFDAKNMMAASDPRHGRYLTVAAVFRGKVSMKEVEEQMQNVQNKNSAYFVEWIPNNVLTAQCDIPPRGCKMAVTFLGNSTAIQELFKRVNDQFAAMFKRKAFLHWYTQEGMDEMEFTEAESNMQDLVAEYQQYQDATADEEEGEYEEEPAEEEQ

SEQ ID NO: 41313 - protein, 327 aa, Pseudomonas fluorescens PfO-1
MTGQNIMKAVVIQAFGGPEVLTVHDIQLAEPGPGQVVVKVMAAGINFMDTGARRGLGAAWELPLTLGAEGAGVVLASGPQVTEFAVGARVAWHYVPGSYAEQVIAPVSQLVPLPDDIDFSTAASLMMQGLTASNLVDKVHAIQPGDVAFVHAAAGGVGLMLTQMIKLRGGKVIGRVSHADKVEAVLAAGADYVVIGRAQNIAGQVMRLTEGQRVNVVYDGTGAEGFADSLEMLDYFGTLALYGPFMNPTPPIDIFSMPRSIKLTYPSVMHYVRDREVLLEKSRQLFAWVSTGKLKTFIGKRYSLDEAQQAHIDIESRNTTGKLIIVP

SEQ ID NO: 41314 - protein, 159 aa, Brassica napus
LFSPSSLTLSHSDPGKSSWRCNDNLIVIRFPISSNEDMDLFCGECSSGESTAEFSSEEVESWPDDSIASCIEDERHFVPGLDYLSRFHSQSLDASAREESVTWILQVQAFYSFQPLTAYLAVNYMDRFLYARRLPETSGWPMQLLAVACLSLAAKMEEV

SEQ ID NO: 41315 - protein, 407 aa, Pyrobaculum aerophilum str. IM2
MVRIAVIPVGGEAVRLRPLTVETSKAMIRFLNRPLVELSILHLARQGIEEFYFGVRGYHNYRDIYDYFREGSWFAVKYGVNIKIRYMPRVETRGNAEAVLATLEYYDINEPVLVIQGDNIFNLDVKEMYSFHSSKKAFITIALKEETGDLSEFGVAAVDDNMRILKFVEKPKRREEAPSNLVNTGLYLLSEDFKSFFKGELGGKLYSEGRLDFGGDVIPAVIEAGLPVYGYHTKGYWFDVGTPERYLKAVQYLLRHLTAYELEAEEIAPSVFAQGKSEQSKALKEKIAEAIKNGQIKAEGRLLLGRHVQIGDNSYLRDTVIDNYVIIGDNSVIEDSVVMDRSYIGRGVVIRRSIIGRHVQIGDGAVIEDAVVADNVIVGDGAHLRRVKVWPHKTVERGVRLEGFSLI
